United States Patent Application Publication US 2024/0327476 A1 - sequence listing, part 43

SEQ ID NO: 78953 - DNA, 3378 bp, synthetic construct
  misc_feature 1..3378: note = Description of Artificial Sequence: Synthetic coding sequence
  source 1..3378: mol_type = other DNA
atgggcgaccccaaggcccacgtgatggccagacccctgagagcccccctgagaagaagcttcagcgaccacatcagagacagcaccgccagagccctggacgtgatctggaagaacaccagagacagaagactggccgagatcgaggccaaggaggcctgcgactggctgagagccaccggcttcccccagtacgcccagctgtacgaggacttcctgttccccatcgacatcagcctggtgaagagagagcacgacttcctggacagagacgccatcgaggccctgtgcagaagactgaacaccctgaacaagtgcgccgtgatgaagctggagatcagcccccacagaaagagaagcgacgacagcgacgaggacgagccctgcgccatcagcggcaagtggaccttccagagagacagcaagagatggagcagactggaggagttcgacgtgttcagccccaagcaggacctggtgcccggcagccccgacgacagccaccccaaggacggccccagccccggcggcaccctgatggacctgagcgagagacaggaggtgagcagcgtgagaagcctgagcagcaccggcagcctgcccagccacgccccccccagcgaggacgccgccacccccagaaccaacagcgtgatcagcgtgtgcagcagcagcaacctggccggcaacgacgacagcttcggcagcctgcccagccccaaggagctgagcagcttcagcttcagcatgaagggccacgagaagaccgccaagagcaagaccagaagcctgctgaagagaatggagagcctgaagctgaagagcagccaccacagcaagcacaaggcccccagcaagctgggcctgatcatcagcggccccatcctgcaggagggcatggacgaggagaagctgaagcagctgaactgcgtggagatcagcgccctgaacggcaacagaatcaacgtgcccatggtgagaaagagaagcgtgagcaacagcacccagaccagcagcagcagcagccagagcgagaccagcagcgccgtgagcacccccagccccgtgaccagaaccagaagcctgagcgcctgcaacaagagagtgggcatgtacctggagggcttcgaccccttcaaccagagcaccttcaacaacgtggtggagcagaacttcaagaacagagagagctaccccgaggacaccgtgttctacatccccgaggaccacaagcccggcaccttccccaaggccctgaccaacggcagcttcagccccagcggcaacaacggcagcgtgaactggagaaccggcagcttccacggccccggccacatcagcctgagaagagagaacagcagcgacagccccaaggagctgaagagaagaaacagcagcagcagcatgagcagcagactgagcatctacgacaacgtgcccggcagcatcctgtacagcagcagcggcgacctggccgacctggagaacgaggacatcttccccgagctggacgacatcctgtaccacgtgaagggcatgcagagaatcgtgaaccagtggagcgagaagttcagcgacgagggcgacagcgacagcgccctggacagcgtgagcccctgccccagcagccccaagcagatccacctggacgtggacaacgacagaaccacccccagcgacctggacagcaccggcaacagcctgaacgagcccgaggagcccagcgagatccccgagagaagagacagcggcgtgggcgccagcctgaccagaagcaacagacacagactgagatggcacagcttccagagcagccacagacccagcctgaacagcgtgagcctgcagatcaactgccagagcgtggcccagatgaacctgctgcagaagtacagcctgctgaagctgaccgccctgctggagaagtacacccccagcaacaagcacggcttcagctgggccgtgcccaagttcatgaagagaatcaaggtgcccgactacaaggacagaagcgtgttcggcgtgcccctgaccgtgaacgtgcagagaaccggccagcccctgccccagagcatccagcaggccatgagatacctgagaaaccactgcctggaccaggtgggcctgttcagaaagagcggcgtgaagagcagaatccaggccctgagacagatgaacgagggcgccatcgactgcgtgaactacgagggccagagcgcctacgacgtggccgacatgctgaagcagtacttcagagacctgcccgagcccctgatgaccaacaagctgagcgagaccttcctgcagatctaccagtacgtgcccaaggaccagagactgcaggccatcaaggccgccatcatgctgctgcccgacgagaacagagaggtgctgcagaccctgctgtacttcctgagcgacgtgaccgccgccgtgaaggagaaccagatgacccccaccaacctggccgtgtgcctggcccccagcctgttccacctgaacaccctgaagagagagaacagcagccccagagtgatgcagagaaagcagagcctgggcaagcccgaccagaaggacctgaacgagaacctggccgccacccagggcctggcccacatgatcgccgagtgcaagaagctgttccaggtgcccgaggagatgagcagatgcagaaacagctacaccgagcaggagctgaagcccctgaccctggaggccctgggccacctgggcaacgacgacagcgccgactaccagcacttcctgcaggactgcgtggacggcctgttcaaggaggtgaaggagaagttcaagggctgggtgagctacagcaccagcgagcaggccgagctgagctacaagaaggtgagcgagggcccccccctgagactgtggagaagcgtgatcgaggtgcccgccgtgcccgaggagatcctgaagagactgctgaaggagcagcacctgtgggacgtggacctgctggacagcaaggtgatcgagatcctggacagccagaccgagatctaccagtacgtgcagaacagcatggccccccaccccgccagagactacgtggtgctgagaacctggagaaccaacctgcccaagggcgcctgcgccctgctgctgaccagcgtggaccacgacagagcccccgtggtgggcgtgagagtgaacgtgctgctgagcagatacctgatcgagccctgcggccccggcaagagcaagctgacctacatgtgcagagtggacctgagaggccacatgcccgagtggtacaccaagagcttcggccacctgtgcgccgccgaggtggtgaagatcagagacagcttcagcaaccagaacaccgagaccaaggacaccaagagcagatag

SEQ ID NO: 78954 - DNA, 3054 bp, synthetic construct
  misc_feature 1..3054: note = Description of Artificial Sequence: Synthetic coding sequence
  source 1..3054: mol_type = other DNA
atgaagctggagatcagcccccacagaaagagaagcgacgacagcgacgaggacgagccctgcgccatcagcggcaagtggaccttccagagagacagcaagagatggagcagactggaggagttcgacgtgttcagccccaagcaggacctggtgcccggcagccccgacgacagccaccccaaggacggccccagccccggcggcaccctgatggacctgagcgagagacaggaggtgagcagcgtgagaagcctgagcagcaccggcagcctgcccagccacgccccccccagcgaggacgccgccacccccagaaccaacagcgtgatcagcgtgtgcagcagcagcaacctggccggcaacgacgacagcttcggcagcctgcccagccccaaggagctgagcagcttcagcttcagcatgaagggccacgagaagaccgccaagagcaagaccagaagcctgctgaagagaatggagagcctgaagctgaagagcagccaccacagcaagcacaaggcccccagcaagctgggcctgatcatcagcggccccatcctgcaggagggcatggacgaggagaagctgaagcagctgaactgcgtggagatcagcgccctgaacggcaacagaatcaacgtgcccatggtgagaaagagaagcgtgagcaacagcacccagaccagcagcagcagcagccagagcgagaccagcagcgccgtgagcacccccagccccgtgaccagaaccagaagcctgagcgcctgcaacaagagagtgggcatgtacctggagggcttcgaccccttcaaccagagcaccttcaacaacgtggtggagcagaacttcaagaacagagagagctaccccgaggacaccgtgttctacatccccgaggaccacaagcccggcaccttccccaaggccctgaccaacggcagcttcagccccagcggcaacaacggcagcgtgaactggagaaccggcagcttccacggccccggccacatcagcctgagaagagagaacagcagcgacagccccaaggagctgaagagaagaaacagcagcagcagcatgagcagcagactgagcatctacgacaacgtgcccggcagcatcctgtacagcagcagcggcgacctggccgacctggagaacgaggacatcttccccgagctggacgacatcctgtaccacgtgaagggcatgcagagaatcgtgaaccagtggagcgagaagttcagcgacgagggcgacagcgacagcgccctggacagcgtgagcccctgccccagcagccccaagcagatccacctggacgtggacaacgacagaaccacccccagcgacctggacagcaccggcaacagcctgaacgagcccgaggagcccagcgagatccccgagagaagagacagcggcgtgggcgccagcctgaccagaagcaacagacacagactgagatggcacagcttccagagcagccacagacccagcctgaacagcgtgagcctgcagatcaactgccagagcgtggcccagatgaacctgctgcagaagtacagcctgctgaagctgaccgccctgctggagaagtacacccccagcaacaagcacggcttcagctgggccgtgcccaagttcatgaagagaatcaaggtgcccgactacaaggacagaagcgtgttcggcgtgcccctgaccgtgaacgtgcagagaaccggccagcccctgccccagagcatccagcaggccatgagatacctgagaaaccactgcctggaccaggtgggcctgttcagaaagagcggcgtgaagagcagaatccaggccctgagacagatgaacgagggcgccatcgactgcgtgaactacgagggccagagcgcctacgacgtggccgacatgctgaagcagtacttcagagacctgcccgagcccctgatgaccaacaagctgagcgagaccttcctgcagatctaccagtacgtgcccaaggaccagagactgcaggccatcaaggccgccatcatgctgctgcccgacgagaacagagaggtgctgcagaccctgctgtacttcctgagcgacgtgaccgccgccgtgaaggagaaccagatgacccccaccaacctggccgtgtgcctggcccccagcctgttccacctgaacaccctgaagagagagaacagcagccccagagtgatgcagagaaagcagagcctgggcaagcccgaccagaaggacctgaacgagaacctggccgccacccagggcctggcccacatgatcgccgagtgcaagaagctgttccaggtgcccgaggagatgagcagatgcagaaacagctacaccgagcaggagctgaagcccctgaccctggaggccctgggccacctgggcaacgacgacagcgccgactaccagcacttcctgcaggactgcgtggacggcctgttcaaggaggtgaaggagaagttcaagggctgggtgagctacagcaccagcgagcaggccgagctgagctacaagaaggtgagcgagggcccccccctgagactgtggagaagcgtgatcgaggtgcccgccgtgcccgaggagatcctgaagagactgctgaaggagcagcacctgtgggacgtggacctgctggacagcaaggtgatcgagatcctggacagccagaccgagatctaccagtacgtgcagaacagcatggccccccaccccgccagagactacgtggtgctgagaacctggagaaccaacctgcccaagggcgcctgcgccctgctgctgaccagcgtggaccacgacagagcccccgtggtgggcgtgagagtgaacgtgctgctgagcagatacctgatcgagccctgcggccccggcaagagcaagctgacctacatgtgcagagtggacctgagaggccacatgcccgagtggtacaccaagagcttcggccacctgtgcgccgccgaggtggtgaagatcagagacagcttcagcaaccagaacaccgagaccaaggacaccaagagcagatag

SEQ ID NO: 78955 - DNA, 972 bp, synthetic construct
  misc_feature 1..972: note = Description of Artificial Sequence: Synthetic coding sequence
  source 1..972: mol_type = other DNA
atgggcaacagcgccagcagaagcgacttcgagtgggtgtacaccgaccagccccacacccagagaagaaaggagatcctggccaagtaccccgccatcaaggccctgatgagacccgaccccagactgaagtgggccgtgctggtgctggtgctggtgcagatgctggcctgctggctggtgagaggcctggcctggagatggctgctgttctgggcctacgccttcggcggctgcgtgaaccacagcctgaccctggccatccacgacatcagccacaacgccgccttcggcaccggcagagccgccagaaacagatggctggccgtgttcgccaacctgcccgtgggcgtgccctacgccgccagcttcaagaagtaccacgtggaccaccacagatacctgggcggcgacggcctggacgtggacgtgcccaccagactggagggctggttcttctgcacccccgccagaaagctgctgtggctggtgctgcagcccttcttctacagcctgagacccctgtgcgtgcaccccaaggccgtgaccagaatggaggtgctgaacaccctggtgcagctggccgccgacctggccatcttcgccctgtggggcctgaagcccgtggtgtacctgctggccagcagcttcctgggcctgggcctgcaccccatcagcggccacttcgtggccgagcactacatgttcctgaagggccacgagacctacagctactacggccccctgaactggatcaccttcaacgtgggctaccacgtggagcaccacgacttccccagcatccccggctacaacctgcccctggtgagaaagatcgcccccgagtactacgaccacctgccccagcaccacagctgggtgaaggtgctgtgggacttcgtgttcgaggacagcctgggcccctacgccagagtgaagagagtgtacagactggccaaggacggcctgtag

SEQ ID NO: 78956 - DNA, 2214 bp, synthetic construct
  misc_feature 1..2214: note = Description of Artificial Sequence: Synthetic coding sequence
  source 1..2214: mol_type = other DNA
atgcagcccagaagagcccaggcccccggcgcccagctgctgcccgccctggccctgctgctgctgctgctgggcgccggccccagaggcagcagcctggccaaccccgtgcccgccgcccccctgagcgcccccggcccctgcgccgcccagccctgcagaaacggcggcgtgtgcaccagcagacccgagcccgacccccagcaccccgcccccgccggcgagcccggctacagctgcacctgccccgccggcatcagcggcgccaactgccagctggtggccgacccctgcgccagcaacccctgccaccacggcaactgcagcagcagcagcagcagcagcagcgacggctacctgtgcatctgcaacgagggctacgagggccccaactgcgagcaggccctgcccagcctgcccgccaccggctggaccgagagcatggcccccagacagctgcagcccgtgcccgccacccaggagcccgacaagatcctgcccagaagccaggccaccgtgaccctgcccacctggcagcccaagaccggccagaaggtggtggagatgaagtgggaccaggtggaggtgatccccgacatcgcctgcggcaacgccagcagcaacagcagcgccggcggcagactggtgagcttcgaggtgccccagaacaccagcgtgaagatcagacaggacgccaccgccagcctgatcctgctgtggaaggtgaccgccaccggcttccagcagtgcagcctgatcgacggcagaagcgtgacccccctgcaggccagcggcggcctggtgctgctggaggagatgctggccctgggcaacaaccacttcatcggcttcgtgaacgacagcgtgaccaagagcatcgtggccctgagactgaccctggtggtgaaggtgagcacctgcgtgcccggcgagagccacgccaacgacctggagtgcagcggcaagggcaagtgcaccaccaagcccagcgaggccaccttcagctgcacctgcgaggagcagtacgtgggcaccttctgcgaggagtacgacgcctgccagagaaagccctgccagaacaacgccagctgcatcgacgccaacgagaagcaggacggcagcaacttcacctgcgtgtgcctgcccggctacaccggcgagctgtgccagagcaagatcgactactgcatcctggacccctgcagaaacggcgccacctgcatcagcagcctgagcggcttcacctgccagtgccccgagggctacttcggcagcgcctgcgaggagaaggtggacccctgcgccagcagcccctgccagaacaacggcacctgctacgtggacggcgtgcacttcacctgcaactgcagccccggcttcaccggccccacctgcgcccagctgatcgacttctgcgccctgagcccctgcgcccacggcacctgcagaagcgtgggcaccagctacaagtgcctgtgcgaccccggctaccacggcctgtactgcgaggaggagtacaacgagtgcctgagcgccccctgcctgaacgccgccacctgcagagacctggtgaacggctacgagtgcgtgtgcctggccgagtacaagggcacccactgcgagctgtacaaggacccctgcgccaacgtgagctgcctgaacggcgccacctgcgacagcgacggcctgaacggcacctgcatctgcgcccccggcttcaccggcgaggagtgcgacatcgacatcaacgagtgcgacagcaacccctgccaccacggcggcagctgcctggaccagcccaacggctacaactgccactgcccccacggctgggtgggcgccaactgcgagatccacctgcagtggaagagcggccacatggccgagagcctgaccaacatgcccagacacagcctgtacatcatcatcggcgccctgtgcgtggccttcatcctgatgctgatcatcctgatcgtgggcatctgcagaatcagcagaatcgagtaccagggcagcagcagacccgcctacgaggagttctacaactgcagaagcatcgacagcgagttcagcaacgccatcgccagcatcagacacgccagattcggcaagaagagcagacccgccatgtacgacgtgagccccatcgcctacgaggactacagccccgacgacaagcccctggtgaccctgatcaagaccaaggacctgtag

SEQ ID NO: 78957 - DNA, 1368 bp, synthetic construct
  misc_feature 1..1368: note = Description of Artificial Sequence: Synthetic coding sequence
  source 1..1368: mol_type = other DNA
atgctggccctgggcaacaaccacttcatcggcttcgtgaacgacagcgtgaccaagagcatcgtggccctgagactgaccctggtggtgaaggtgagcacctgcgtgcccggcgagagccacgccaacgacctggagtgcagcggcaagggcaagtgcaccaccaagcccagcgaggccaccttcagctgcacctgcgaggagcagtacgtgggcaccttctgcgaggagtacgacgcctgccagagaaagccctgccagaacaacgccagctgcatcgacgccaacgagaagcaggacggcagcaacttcacctgcgtgtgcctgcccggctacaccggcgagctgtgccagagcaagatcgactactgcatcctggacccctgcagaaacggcgccacctgcatcagcagcctgagcggcttcacctgccagtgccccgagggctacttcggcagcgcctgcgaggagaaggtggacccctgcgccagcagcccctgccagaacaacggcacctgctgcagccccggcttcaccggccccacctgcgcccagctgatcgacttctgcgccctgagcccctgcgcccacggcacctgcagaagcgtgggcaccagctacaagtgcctgtgcgaccccggctaccacggcctgtactgcgaggaggagtacaacgagtgcctgagcgccccctgcctgaacgccgccacctgcagagacctggtgaacggctacgagtgcgtgtgcctggccgagtacaagggcacccactgcgagctgtacaaggacccctgcgccaacgtgagctgcctgaacggcgccacctgcgacagcgacggcctgaacggcacctgcatctgcgcccccggcttcaccggcgaggagtgcgacatcgacatcaacgagtgcgacagcaacccctgccaccacggcggcagctgcctggaccagcccaacggctacaactgccactgcccccacggctgggtgggcgccaactgcgagatccacctgcagtggaagagcggccacatggccgagagcctgaccaacatgcccagacacagcctgtacatcatcatcggcgccctgtgcgtggccttcatcctgatgctgatcatcctgatcgtgggcatctgcagaatcagcagaatcgagtaccagggcagcagcagacccgcctacgaggagttctacaactgcagaagcatcgacagcgagttcagcaacgccatcgccagcatcagacacgccagattcggcaagaagagcagacccgccatgtacgacgtgagccccatcgcctacgaggactacagccccgacgacaagcccctggtgaccctgatcaagaccaaggacctgtag

SEQ ID NO: 78958 - DNA, 933 bp, synthetic construct
  misc_feature 1..933: note = Description of Artificial Sequence: Synthetic coding sequence
  source 1..933: mol_type = other DNA
atgaccgccaccgaggccctgctgagagtgctgctgctgctgctggccttcggccacagcacctacggcgccgagtgcttccccgcctgcaacccccagaacggcttctgcgaggacgacaacgtgtgcagatgccagcccggctggcagggccccctgtgcgaccagtgcgtgaccagccccggctgcctgcacggcctgtgcggcgagcccggccagtgcatctgcaccgacggctgggacggcgagctgtgcgacagagacgtgagagcctgcagcagcgccccctgcgccaacaacagaacctgcgtgagcctggacgacggcctgtacgagtgcagctgcgcccccggctacagcggcaaggactgccagaagaaggacggcccctgcgtgatcaacggcagcccctgccagcacggcggcacctgcgtggacgacgagggcagagccagccacgccagctgcctgtgcccccccggcttcagcggcaacttctgcgagatcgtggccaacagctgcacccccaacccctgcgagaacgacggcgtgtgcaccgacatcggcggcgacttcagatgcagatgccccgccggcttcatcgacaagacctgcagcagacccgtgaccaactgcgccagcagcccctgccagaacggcggcacctgcctgcagcacacccagggccaggccatctgcttcaccatcctgggcgtgctgaccagcctggtggtgctgggcaccgtgggcatcgtgttcctgaacaagtgcgagacctgggtgagcaacctgagatacaaccacatgctgagaaagaagaagaacctgctgctgcagtacaacagcggcgaggacctggccgtgaacatcatcttccccgagaagatcgacatgaccaccttcagcaaggaggccggcgacgaggagatctag

SEQ ID NO: 78959 - DNA, 1152 bp, synthetic construct
  misc_feature 1..1152: note = Description of Artificial Sequence: Synthetic coding sequence
  source 1..1152: mol_type = other DNA
atgaccgccaccgaggccctgctgagagtgctgctgctgctgctggccttcggccacagcacctacggcgccgagtgcttccccgcctgcaacccccagaacggcttctgcgaggacgacaacgtgtgcagatgccagcccggctggcagggccccctgtgcgaccagtgcgtgaccagccccggctgcctgcacggcctgtgcggcgagcccggccagtgcatctgcaccgacggctgggacggcgagctgtgcgacagagacgtgagagcctgcagcagcgccccctgcgccaacaacagaacctgcgtgagcctggacgacggcctgtacgagtgcagctgcgcccccggctacagcggcaaggactgccagaagaaggacggcccctgcgtgatcaacggcagcccctgccagcacggcggcacctgcgtggacgacgagggcagagccagccacgccagctgcctgtgcccccccggcttcagcggcaacttctgcgagatcgtggccaacagctgcacccccaacccctgcgagaacgacggcgtgtgcaccgacatcggcggcgacttcagatgcagatgccccgccggcttcatcgacaagacctgcagcagacccgtgaccaactgcgccagcagcccctgccagaacggcggcacctgcctgcagcacacccaggtgagctacgagtgcctgtgcaagcccgagttcaccggcctgacctgcgtgaagaagagagccctgagcccccagcaggtgaccagactgcccagcggctacggcctggcctacagactgacccccggcgtgcacgagctgcccgtgcagcagcccgagcacagaatcctgaaggtgagcatgaaggagctgaacaagaagacccccctgctgaccgagggccaggccatctgcttcaccatcctgggcgtgctgaccagcctggtggtgctgggcaccgtgggcatcgtgttcctgaacaagtgcgagacctgggtgagcaacctgagatacaaccacatgctgagaaagaagaagaacctgctgctgcagtacaacagcggcgaggacctggccgtgaacatcatcttccccgagaagatcgacatgaccaccttcagcaaggaggccggcgacgaggagatctag

SEQ ID NO: 78960 - DNA, 294 bp, synthetic construct
  misc_feature 1..294: note = Description of Artificial Sequence: Synthetic coding sequence
  source 1..294: mol_type = other DNA
atgaccgccaccgaggccctgctgagagtgctgctgctgctgctggccttcggccacagcacctacggcgccgagtgcttccccgcctgcaacccccagaacggcttctgcgaggacgacaacgtgtgcagatgccagcccggctggcagggccccctgtgcgaccagtgcgtgaccagccccggctgcctgcacggcctgtgcggcgagcccggccagtgcatctgcaccgacggctgggacggcgagctgtgcgacagagacgtgagagcctgcagcagcgccccctgctag

SEQ ID NO: 78961 - DNA, 3612 bp, synthetic construct
  misc_feature 1..3612: note = Description of Artificial Sequence: Synthetic coding sequence
  source 1..3612: mol_type = other DNA
atggccgcctgcggcagagtgagaagaatgttcagactgagcgccgccctgcacctgctgctgctgttcgccgccggcgccgagaagctgcccggccagggcgtgcacagccagggccagggccccggcgccaacttcgtgagcttcgtgggccaggccggcggcggcggccccgccggccagcagctgccccagctgccccagagcagccagctgcagcagcagcagcagcagcagcagcagcagcagcagccccagcccccccagccccccttccccgccggcggcccccccgccagaagaggcggcgccggcgccggcggcggctggaagctggccgaggaggagagctgcagagaggacgtgaccagagtgtgccccaagcacacctggagcaacaacctggccgtgctggagtgcctgcaggacgtgagagagcccgagaacgagatcagcagcgactgcaaccacctgctgtggaactacaagctgaacctgaccaccgaccccaagttcgagagcgtggccagagaggtgtgcaagagcaccatcaccgagatcaaggagtgcgccgacgagcccgtgggcaagggctacatggtgagctgcctggtggaccacagaggcaacatcaccgagtaccagtgccaccagtacatcaccaagatgaccgccatcatcttcagcgactacagactgatctgcggcttcatggacgactgcaagaacgacatcaacatcctgaagtgcggcagcatcagactgggcgagaaggacgcccacagccagggcgaggtggtgagctgcctggagaagggcctggtgaaggaggccgaggagagagagcccaagatccaggtgagcgagctgtgcaagaaggccatcctgagagtggccgagctgagcagcgacgacttccacctggacagacacctgtacttcgcctgcagagacgacagagagagattctgcgagaacacccaggccggcgagggcagagtgtacaagtgcctgttcaaccacaagttcgaggagagcatgagcgagaagtgcagagaggccctgaccaccagacagaagctgatcgcccaggactacaaggtgagctacagcctggccaagagctgcaagagcgacctgaagaagtacagatgcaacgtggagaacctgcccagaagcagagaggccagactgagctacctgctgatgtgcctggagagcgccgtgcacagaggcagacaggtgagcagcgagtgccagggcgagatgctggactacagaagaatgctgatggaggacttcagcctgagccccgagatcatcctgagctgcagaggcgagatcgagcaccactgcagcggcctgcacagaaagggcagaaccctgcactgcctgatgaaggtggtgagaggcgagaagggcaacctgggcatgaactgccagcaggccctgcagaccctgatccaggagaccgaccccggcgccgactacagaatcgacagagccctgaacgaggcctgcgagagcgtgatccagaccgcctgcaagcacatcagaagcggcgaccccatgatcctgagctgcctgatggagcacctgtacaccgagaagatggtggaggactgcgagcacagactgctggagctgcagtacttcatcagcagagactggaagctggaccccgtgctgtacagaaagtgccagggcgacgccagcagactgtgccacacccacggctggaacgagaccagcgagttcatgccccagggcgccgtgttcagctgcctgtacagacacgcctacagaaccgaggagcagggcagaagactgagcagagagtgcagagccgaggtgcagagaatcctgcaccagagagccatggacgtgaagctggaccccgccctgcaggacaagtgcctgatcgacctgggcaagtggtgcagcgagaagaccgagaccggccaggagctggagtgcctgcaggaccacctggacgacctggtggtggagtgcagagacatcgtgggcaacctgaccgagctggagagcgaggacatccagatcgaggccctgctgatgagagcctgcgagcccatcatccagaacttctgccacgacgtggccgacaaccagatcgacagcggcgacctgatggagtgcctgatccagaacaagcaccagaaggacatgaacgagaagtgcgccatcggcgtgacccacttccagctggtgcagatgaaggacttcagattcagctacaagttcaagatggcctgcaaggaggacgtgctgaagctgtgccccaacatcaagaagaaggtggacgtggtgatctgcctgagcaccaccgtgagaaacgacaccctgcaggaggccaaggagcacagagtgagcctgaagtgcagaagacagctgagagtggaggagctggagatgaccgaggacatcagactggagcccgacctgtacgaggcctgcaagagcgacatcaagaacttctgcagcgccgtgcagtacggcaacgcccagatcatcgagtgcctgaaggagaacaagaagcagctgagcaccagatgccaccagaaggtgttcaagctgcaggagaccgagatgatggaccccgagctggactacaccctgatgagagtgtgcaagcagatgatcaagagattctgccccgaggccgacagcaagaccatgctgcagtgcctgaagcagaacaagaacagcgagctgatggaccccaagtgcaagcagatgatcaccaagagacagatcacccagaacaccgactacagactgaaccccatgctgagaaaggcctgcaaggccgacatccccaagttctgccacggcatcctgaccaaggccaaggacgacagcgagctggagggccaggtgatcagctgcctgaagctgagatacgccgaccagagactgagcagcgactgcgaggaccagatcagaatcatcatccaggagagcgccctggactacagactggacccccagctgcagctgcactgcagcgacgagatcagcagcctgtgcgccgaggaggccgccgcccaggagcagaccggccaggtggaggagtgcctgaaggtgaacctgctgaagatcaagaccgagctgtgcaagaaggaggtgctgaacatgctgaaggagagcaaggccgacatcttcgtggaccccgtgctgcacaccgcctgcgccctggacatcaagcaccactgcgccgccatcacccccggcagaggcagacagatgagctgcctgatggaggccctggaggacaagagagtgagactgcagcccgagtgcaagaagagactgaacgacagaatcgagatgtggagctacgccgccaaggtggcccccgccgacggcttcagcgacctggccatgcaggtgatgaccagccccagcaagaactacatcctgagcgtgatcagcggcagcatctgcatcctgttcctgatcggcctgatgtgcggcagaatcaccaagagagtgaccagagagctgaaggacagactgcagtacagaagcgagaccatggcctacaagggcctggtgtggagccaggacgtgaccggcagccccgcctag

SEQ ID NO: 78962 - DNA, 1764 bp, synthetic construct
  misc_feature 1..1764: note = Description of Artificial Sequence: Synthetic coding sequence
  source 1..1764: mol_type = other DNA
atggtgagccccagaatgagcggcctgctgagccagaccgtgatcctggccctgatcttcctgccccagaccagacccgccggcgtgttcgagctgcagatccacagcttcggccccggccccggccccggcgcccccagaagcccctgcagcgccagactgccctgcagactgttcttcagagtgtgcctgaagcccggcctgagcgaggaggccgccgagagcccctgcgccctgggcgccgccctgagcgccagaggccccgtgtacaccgagcagcccggcgcccccgcccccgacctgcccctgcccgacggcctgctgcaggtgcccttcagagacgcctggcccggcaccttcagcttcatcatcgagacctggagagaggagctgggcgaccagatcggcggccccgcctggagcctgctggccagagtggccggcagaagaagactggccgccggcggcccctgggccagagacatccagagagccggcgcctgggagctgagattcagctacagagccagatgcgagccccccgccgtgggcaccgcctgcaccagactgtgcagacccagaagcgcccccagcagatgcggccccggcctgagaccctgcgcccccctggaggacgagtgcgaggcccccctggtgtgcagagccggctgcagccccgagcacggcttctgcgagcagcccggcgagtgcagatgcctggagggctggaccggccccctgtgcaccgtgcccgtgagcaccagcagctgcctgagccccagaggccccagcagcgccaccaccggctgcctggtgcccggccccggcccctgcgacggcaacccctgcgccaacggcggcagctgcagcgagacccccagaagcttcgagtgcacctgccccagaggcttctacggcctgagatgcgaggtgagcggcgtgacctgcgccgacggcccctgcttcaacggcggcctgtgcgtgggcggcgccgaccccgacagcgcctacatctgccactgcccccccggcttccagggcagcaactgcgagaagagagtggacagatgcagcctgcagccctgcagaaacggcggcctgtgcctggacctgggccacgccctgagatgcagatgcagagccggcttcgccggccccagatgcgagcacgacctggacgactgcgccggcagagcctgcgccaacggcggcacctgcgtggagggcggcggcgcccacagatgcagctgcgccctgggcttcggcggcagagactgcagagagagagccgacccctgcgccgccagaccctgcgcccacggcggcagatgctacgcccacttcagcggcctggtgtgcgcctgcgcccccggctacatgggcgccagatgcgagttccccgtgcaccccgacggcgccagcgccctgcccgccgccccccccggcctgagacccggcgacccccagagatacctgctgccccccgccctgggcctgctggtggccgccggcgtggccggcgccgccctgctgctggtgcacgtgagaagaagaggccacagccaggacgccggcagcagactgctggccggcacccccgagcccagcgtgcacgccctgcccgacgccctgaacaacctgagaacccaggagggcagcggcgacggccccagcagcagcgtggactggaacagacccgaggacgtggacccccagggcatctacgtgatcagcgcccccagcatctacgccagagaggcctag

SEQ ID NO: 78963 - DNA, 2058 bp, synthetic construct
  misc_feature 1..2058: note = Description of Artificial Sequence: Synthetic coding sequence
  source 1..2058: mol_type = other DNA
atggccgccgccagcagaagcgccagcggctgggccctgctgctgctggtggccctgtggcagcagagagccgccggcagcggcgtgttccagctgcagctgcaggagttcatcaacgagagaggcgtgctggccagcggcagaccctgcgagcccggctgcagaaccttcttcagagtgtgcctgaagcacttccaggccgtggtgagccccggcccctgcaccttcggcaccgtgagcacccccgtgctgggcaccaacagcttcgccgtgagagacgacagcagcggcggcggcagaaaccccctgcagctgcccttcaacttcacctggcccggcaccttcagcctgatcatcgaggcctggcacgcccccggcgacgacctgagacccgaggccctgccccccgacgccctgatcagcaagatcgccatccagggcagcctggccgtgggccagaactggctgctggacgagcagaccagcaccctgaccagactgagatacagctacagagtgatctgcagcgacaactactacggcgacaactgcagcagactgtgcaagaagagaaacgaccacttcggccactacgtgtgccagcccgacggcaacctgagctgcctgcccggctggaccggcgagtactgccagcagcccatctgcctgagcggctgccacgagcagaacggctactgcagcaagcccgccgagtgcctgtgcagacccggctggcagggcagactgtgcaacgagtgcatcccccacaacggctgcagacacggcacctgcagcaccccctggcagtgcacctgcgacgagggctggggcggcctgttctgcgaccaggacctgaactactgcacccaccacagcccctgcaagaacggcgccacctgcagcaacagcggccagagaagctacacctgcacctgcagacccggctacaccggcgtggactgcgagctggagctgagcgagtgcgacagcaacccctgcagaaacggcggcagctgcaaggaccaggaggacggctaccactgcctgtgcccccccggctactacggcctgcactgcgagcacagcaccctgagctgcgccgacagcccctgcttcaacggcggcagctgcagagagagaaaccagggcgccaactacgcctgcgagtgcccccccaacttcaccggcagcaactgcgagaagaaggtggacagatgcaccagcaacccctgcgccaacggcggccagtgcctgaacagaggccccagcagaatgtgcagatgcagacccggcttcaccggcacctactgcgagctgcacgtgagcgactgcgccagaaacccctgcgcccacggcggcacctgccacgacctggagaacggcctgatgtgcacctgccccgccggcttcagcggcagaagatgcgaggtgagaaccagcatcgacgcctgcgccagcagcccctgcttcaacagagccacctgctacaccgacctgagcaccgacaccttcgtgtgcaactgcccctacggcttcgtgggcagcagatgcgagttccccgtgggcctgccccccagcttcccctgggtggccgtgagcctgggcgtgggcctggccgtgctgctggtgctgctgggcatggtggccgtggccgtgagacagctgagactgagaagacccgacgacggcagcagagaggccatgaacaacctgagcgacttccagaaggacaacctgatccccgccgcccagctgaagaacaccaaccagaagaaggagctggaggtggactgcggcctggacaagagcaactgcggcaagcagcagaaccacaccctggactacaacctggcccccggccccctgggcagaggcaccatgcccggcaagttcccccacagcgacaagagcctgggcgagaaggcccccctgagactgcacagcgagaagcccgagtgcagaatcagcgccatctgcagccccagagacagcatgtaccagagcgtgtgcctgatcagcgaggagagaaacgagtgcgtgatcgccaccgaggtgtag

SEQ ID NO: 78964 - DNA, 2223 bp, synthetic construct
  misc_feature 1..2223: note = Description of Artificial Sequence: Synthetic coding sequence
  source 1..2223: mol_type = other DNA
atggccagccacctgagaccccccagccccctgctggtgagagtgtacaagagcggccccagagtgagaagaaagctggagagctacttccagagcagcaagagcagcggcggcggcgagtgcaccgtgagcacccaggagcacgaggcccccggcaccttcagagtggagttcagcgagagagccgccaaggagagagtgctgaagaagggcgagcaccagatcctggtggacgagaagcccgtgcccatcttcctggtgcccaccgagaacagcatcaagaagaacaccagaccccagatcagcagcctgacccagagccaggccgagacccccagcggcgacatgcaccagcacgagggccacatccccaacgccgtggacagctgcctgcagaagatcttcctgaccgtgaccgccgacctgaactgcaacctgttcagcaaggagcagagagcctacatcaccaccctgtgccccagcatcagaaagatggagggccacgacggcatcgagaaggtgtgcggcgacttccaggacatcgagagaatccaccagttcctgagcgagcagttcctggagagcgagcagaagcagcagttcagccccagcatgaccgagagaaagcccctgagccagcaggagagagacagctgcatcagccccagcgagcccgagaccaaggccgagcagaagagcaactacttcgaggtgcccctgccctacttcgagtacttcaagtacatctgccccgacaagatcaacagcatcgagaagagattcggcgtgaacatcgagatccaggagagcagccccaacatggtgtgcctggacttcaccagcagcagaagcggcgacctggaggccgccagagagagcttcgccagcgagttccagaagaacaccgagcccctgaagcaggagtgcgtgagcctggccgacagcaagcaggccaacaagttcaagcaggagctgaaccaccagttcaccaagctgctgatcaaggagaagggcggcgagctgaccctgctgggcacccaggacgacatcagcgccgccaagcagaagatcagcgaggccttcgtgaagatccccgtgaagctgttcgccgccaactacatgatgaacgtgatcgaggtggacagcgcccactacaagctgctggagaccgagctgctgcaggagatcagcgagatcgagaagagatacgacatctgcagcaaggtgagcgagaagggccagaagacctgcatcctgttcgagagcaaggacagacaggtggacctgagcgtgcacgcctacgccagcttcatcgacgccttccagcacgccagctgccagctgatgagagaggtgctgctgctgaagagcctgggcaaggagagaaagcacctgcaccagaccaagttcgccgacgacttcagaaagagacaccccaacgtgcacttcgtgctgaaccaggagagcatgaccctgaccggcctgcccaaccacctggccaaggccaagcagtacgtgctgaagggcggcggcatgagcagcctggccggcaagaagctgaaggagggccacgagacccccatggacatcgacagcgacgacagcaaggccgccagcccccccctgaagggcagcgtgagcagcgaggccagcgagctggacaagaaggagaagggcatctgcgtgatctgcatggacaccatcagcaacaagaaggtgctgcccaagtgcaagcacgagttctgcgccccctgcatcaacaaggccatgagctacaagcccatctgccccacctgccagaccagctacggcatccagaagggcaaccagcccgagggcagcatggtgttcaccgtgagcagagacagcctgcccggctacgagagcttcggcaccatcgtgatcacctacagcatgaaggccggcatccagaccgaggagcaccccaaccccggcaagagataccccggcatccagagaaccgcctacctgcccgacaacaaggagggcagaaaggtgctgaagctgctgtacagagccttcgaccagaagctgatcttcaccgtgggctacagcagagtgctgggcgtgagcgacgtgatcacctggaacgacatccaccacaagaccagcagattcggcggccccgagatgtacggctaccccgaccccagctacctgaagagagtgaaggaggagctgaaggccaagggcatcgagtag

SEQ ID NO: 78965 - DNA, 1863 bp, synthetic construct
  misc_feature 1..1863: note = Description of Artificial Sequence: Synthetic coding sequence
  source 1..1863: mol_type = other DNA
atgagcagacccggccacggcggcctgatgcccgtgaacggcctgggcttccccccccagaacgtggccagagtggtggtgtgggagtggctgaacgagcacagcagatggagaccctacaccgccaccgtgtgccaccacatcgagaacgtgctgaaggaggacgccagaggcagcgtggtgctgggccaggtggacgcccagctggtgccctacatcatcgacctgcagagcatgcaccagttcagacaggacaccggcaccatgagacccgtgagaagaaacttctacgaccccagcagcgcccccggcaagggcatcgtgtgggagtgggagaacgacggcggcgcctggaccgcctacgacatggacatctgcatcaccatccagaacgcctacgagaagcagcacccctggctggacctgagcagcctgggcttctgctacctgatctacttcaacagcatgagccagatgaacagacagaccagaagaagaagaagactgagaagaagactggacctggcctaccccctgaccgtgggcagcatccccaagagccagagctggcccgtgggcgccagcagcggccagccctgcagctgccagcagtgcctgctggtgaacagcaccagagccgccagcaacgccatcctggccagccagagaagaaaggccccccccgccccccccctgccccccccccccccccccggcggcccccccggcgccctggccgtgagacccagcgccaccttcaccggcgccgccctgtgggccgcccccgccgccggccccgccgagcccgcccccccccccggcgccccccccagaagccccggcgcccccggcggcgccagaacccccggccagaacaacctgaacagacccggcccccagagaaccaccagcgtgagcgccagagccagcatcccccccggcgtgcccgccctgcccgtgaagaacctgaacggcaccggccccgtgcaccccgccctggccggcatgaccggcatcctgctgtgcgccgccggcctgcccgtgtgcctgaccagagcccccaagcccatcctgcaccccccccccgtgagcaagagcgacgtgaagcccgtgcccggcgtgcccggcgtgtgcagaaagaccaagaagaagcacctgaagaagagcaagaaccccgaggacgtggtgagaagatacatgcagaaggtgaagaacccccccgacgaggactgcaccatctgcatggagagactggtgaccgccagcggctacgagggcgtgctgagacacaagggcgtgagacccgagctggtgggcagactgggcagatgcggccacatgtaccacctgctgtgcctggtggccatgtacagcaacggcaacaaggacggcagcctgcagtgccccacctgcaaggccatctacggcgagaagaccggcacccagccccccggcaagatggagttccacctgatcccccacagcctgcccggcttccccgacacccagaccatcagaatcgtgtacgacatccccaccggcatccagggccccgagcaccccaaccccggcaagaagttcaccgccagaggcttccccagacactgctacctgcccaacaacgagaagggcagaaaggtgctgagactgctgatcaccgcctgggagagaagactgatcttcaccatcggcaccagcaacaccaccggcgagagcgacaccgtggtgtggaacgagatccaccacaagaccgagttcggcagcaacctgaccggccacggctaccccgacgccagctacctggacaacgtgctggccgagctgaccgcccagggcgtgagcgaggccgccgccaaggcctag

SEQ ID NO: 78966 - DNA, 1044 bp, synthetic construct
  misc_feature 1..1044: note = Description of Artificial Sequence: Synthetic coding sequence
  source 1..1044: mol_type = other DNA
atgagcttcgtgctgagcagaatggccgcctgcggcggcacctgcaagaacaaggtgaccgtgagcaagcccgtgtgggacttcctgagcaaggagacccccgccagactggccagactgagagaggagcacagagtgagcatcctgatcgacggcgagaccagcgacatctacgtgctgcagctgagcccccagggccccccccccgccccccccaacggcctgtacctggccagaaaggccctgaagggcctgctgaaggaggccgagaaggagctgaagaaggcccagagacagggcgagctgatgggctgcctggccctgggcggcggcggcgagcaccccgagatgcacagagccggccccccccccctgagagccgcccccctgctgccccccggcgccagaggcctgccccccccccccccccccctgcccccccccctgccccccagactgagagaggaggccgaggagcaggagagcacctgccccatctgcctgggcgagatccagaacgccaagaccctggagaagtgcagacacagcttctgcgagggctgcatcaccagagccctgcaggtgaagaaggcctgccccatgtgcggcagattctacggccagctggtgggcaaccagccccagaacggcagaatgctggtgagcaaggacgccaccctgctgctgcccagctacgagaagtacggcaccatcgtgatccagtacgtgttcccccccggcgtgcagggcgccgagcaccccaaccccggcgtgagataccccggcaccaccagagtggcctacctgcccgactgccccgagggcaacaaggtgctgaccctgttcagaaaggccttcgaccagagactgaccttcaccatcggcaccagcatgaccaccggcagacccaacgtgatcacctggaacgacatccaccacaagaccagctgcaccggcggcccccagctgttcggctaccccgaccccacctacctgaccagagtgcaggaggagctgagagccaagggcatcaccgacgactag

SEQ ID NO: 78967 - DNA, 1044 bp, synthetic construct; identical to SEQ ID NO: 78966
  misc_feature 1..1044: note = Description of Artificial Sequence: Synthetic coding sequence
  source 1..1044: mol_type = other DNA

SEQ ID NO: 78968 - DNA, 1044 bp, synthetic construct; identical to SEQ ID NO: 78966
  misc_feature 1..1044: note = Description of Artificial Sequence: Synthetic coding sequence
  source 1..1044: mol_type = other DNA

SEQ ID NO: 78969 - DNA, 615 bp, synthetic construct
  misc_feature 1..615: note = Description of Artificial Sequence: Synthetic coding sequence
  source 1..615: mol_type = other DNA
atgcccatcctgagcagcagcggcagcaagatggccgcctgcggcggcacctgcaagaacaaggtgaccgtgagcaagcccgtgtgggacttcctgagcaaggagacccccgccagactggccagactgagagaggagcacagagtgagcatcctgatcgacggcgagaccagcgacatctacgtgctgcagctgagcccccagggccccccccccgccccccccaacggcctgtacctggccagaaaggccctgaagggcctgctgaaggaggccgagaaggagctgaagaaggcccagagacagggcgagctgatgggctgcctggccctgggcggcggcggcgagcaccccgagatgcacagagccggccccccccccctgagagccgcccccctgctgccccccggcgccagaggcctgccccccccccccccccccctgcccccccccctgccccccagactgagagaggaggccgaggagcaggagagcacctgccccatctgcctgggcgagatccagaacgccaagaccctggagaagtgcagacacagcttctgcgagggctgcatcaccagagccctgcaggtgaagaaggcctgccccatgtag

SEQ ID NO: 78970 - DNA, 24 bp, synthetic construct
  misc_feature 1..24: note = Description of Artificial Sequence: Synthetic coding sequence
  source 1..24: mol_type = other DNA
atgcccatcctgagcagcagctag

SEQ ID NO: 78971 - DNA, 1053 bp, synthetic construct
  misc_feature 1..1053: note = Description of Artificial Sequence: Synthetic coding sequence
  source 1..1053: mol_type = other DNA
atgcccatcctgagcagcagcggcagcaagatggccgcctgcggcggcacctgcaagaacaaggtgaccgtgagcaagcccgtgtgggacttcctgagcaaggagacccccgccagactggccagactgagagaggagcacagagtgagcatcctgatcgacggcgagaccagcgacatctacgtgctgcagctgagcccccagggccccccccccgccccccccaacggcctgtacctggccagaaaggccctgaagggcctgctgaaggaggccgagaaggagctgaagaaggcccagagacagggcgagctgatgggctgcctggccctgggcggcggcggcgagcaccccgagatgcacagagccggccccccccccctgagagccgcccccctgctgccccccggcgccagaggcctgccccccccccccccccccctgcccccccccctgccccccagactgagagaggaggccgaggagcaggagagcacctgccccatctgcctgggcgagatccagaacgccaagaccctggagaagtgcagacacagcttctgcgagggctgcatcaccagagccctgcaggtgaagaaggcctgccccatgtgcggcagattctacggccagctggtgggcaaccagccccagaacggcagaatgctggtgagcaaggacgccaccctgctgctgcccagctacgagaagtacggcaccatcgtgatccagtacgtgttcccccccggcgtgcagggcgccgagcaccccaaccccggcgtgagataccccggcaccaccagagtggcctacctgcccgactgccccgagggcaacaaggtgctgaccctgttcagaaaggccttcgaccagagactgaccttcaccatcggcaccagcatgaccaccggcagacccaacgtgatcacctggaacgacatccaccacaagaccagctgcaccggcggcccccagctgttcggctaccccgaccccacctacctgaccagagtgcaggaggagctgagagccaagggcatcaccgacgactag

SEQ ID NO: 78972 - DNA, 150 bp, synthetic construct
  misc_feature 1..150: note = Description of Artificial Sequence: Synthetic coding sequence
  source 1..150: mol_type = other DNA
atgagcttcgtgctgagcagaatggccgcctgcggcggcacctgcaagaacaaggtgaccgtgagcaagcccgtgtgggacttcctgagcaaggagacccccgccagactggccagactgagagaggagcacagagtgagcatcctgtag

SEQ ID NO: 78973 - DNA, 2136 bp, synthetic construct
  misc_feature 1..2136: note = Description of Artificial Sequence: Synthetic coding sequence
  source 1..2136: mol_type = other DNA
atgctggacggccccctgttcagcgagggccccgacagccccagagagctgcaggacgaggagagcggcagctgcctgtgggtgcagaagagcaagctgctggtgatcgaggtgaagaccatcagctgccactacagcagaagagcccccagcagacagcccatggacttccaggccagccactgggccagaggcttccagaacagaacctgcggccccagacccggcagcccccagcccccccccagaagaccctgggccagcagagtgctgcaggaggccaccaactggagagccggccccctggccgaggtgagagccagagagcaggagaagagaaaggccgccagccaggagagagaggccaaggagaccgagagaaagagaagaaaggccggcggcgccagaagaagcccccccggcagacccagacccgagcccagaaacgcccccagagtggcccagctggccggcctgcccgcccccctgagacccgagagactggcccccgtgggcagagcccccagacccagcgcccagccccagagcgaccccggcagcgcctgggccggcccctggggcggcagaagacccggcccccccagctacgaggcccacctgctgctgagaggcagcgccggcaccgcccccagaagaagatgggacagaccccccccctacgtggccccccccagctacgagggcccccacagaaccctgggcaccaagagaggccccggcaacagccaggtgcccaccagcagcgcccccgccgccacccccgccagaaccgacggcggcagaaccaagaagagactggaccccagaatctacagagacgtgctgggcgcctggggcctgagacagggccagggcctgctgggcggcagccccggctgcggcgccgccagagccagacccgagcccggcaagggcgtggtggagaagagcctgggcctggccgccgccgacctgaacagcggcagcgacagccacccccaggccaaggccaccggcagcgccggcaccgagatcgcccccgccggcagcgccaccgccgccccctgcgccccccaccccgcccccagaagcagacaccacctgaagggcagcagagagggcaaggagggcgagcagatctggttccccaagtgctggatccccagccccaagaagcagccccccagacacagccagaccctgcccagaccctgggcccccggcggcaccggctggagagagagcctgggcctgggcgagggcgccggccccgagaccctggagggctggaaggccaccagaagagcccacaccctgcccagaagcagccagggcctgagcagaggcgagggcgtgttcgtgatcgacgccacctgcgtggtgatcagaagccagtacgtgcccacccccagaacccagcaggtgcagctgctgcccagcggcgtgaccagagtggtgggcgacagccccagccagagcaagcccggcaaggaggagggcgagggcgccaccgtgttccccagcccctgccagaagagactgagcagcagcagactgctgcaccagcccggcggcggcagaggcggcgaggccgagggcggcagacccggcgacagcaccctggaggagagaaccttcagaatcctgggcctgcccgcccccgaggtgaacctgagagacgcccccacccagcccggcagccccgagcaccaggccctgggccccgccgccagcggcgcccagggcagagccgagggcagcgaggtggccgtggtgcagagaagagccggcagaggctgggccagaacccccggcccctacgccggcgccctgagagaggccgtgagcagaatcagaagacacaccgcccccgacagcgacaccgacgaggccgaggagctgagcgtgcacagcggcagcagcgacggcagcgacaccgaggcccccggcgccagctggagaaacgagagaaccctgcccgaggtgggcaacagcagccccgaggaggacggcaagaccgccgagctgagcgacagcgtgggcgagatcctggacgtgatcagccagaccgaggaggtgctgttcggcgtgagagacatcagaggcacccagcagggcaacagaaagagacagtag

SEQ ID NO: 78974 - DNA, 852 bp, synthetic construct
  misc_feature 1..852: note = Description of Artificial Sequence: Synthetic coding sequence
  source 1..852: mol_type = other DNA
atgggcatctggaccagcggcaccgacatcttcctgagcctgtgggagatctacgtgagccccagaagccccggctggatggacttcatccagcacctgggcgtgtgctgcctggtggccctgatcagcgtgggcctgctgagcgtggccgcctgctggttcctgcccagcatcatcgccgccgccgccagctggatcatcacctgcgtgctgctgtgctgcagcaagcacgccagatgcttcatcctgctggtgttcctgagctgcggcctgagagagggcagaaacgccctgatcgccgccggcaccggcatcgtgatcctgggccacgtggagaacatcttccacaacttcaagggcctgctggacggcatgacctgcaacctgagagccaagagcttcagcatccacttccccctgctgaagaagtacatcgaggccatccagtggatctacggcctggccacccccctgagcgtgttcgacgacctggtgagctggaaccagaccctggccgtgagcctgttcagccccagccacgtgctggaggcccagctgaacgacagcaagggcgaggtgctgagcgtgctgtaccagatggccaccaccaccgaggtgctgagcagcctgggccagaagctgctggccttcgccggcctgagcctggtgctgctgggcaccggcctgttcatgaagagattcctgggcccctgcggctggaagtacgagaacatctacatcaccagacagttcgtgcagttcgacgagagagagagacaccagcagagaccctgcgtgctgcccctgaacaaggaggagagaagaaagttcatcagcggcttccagagctag

SEQ ID NO: 78975 - DNA, 1401 bp, synthetic construct
  misc_feature 1..1401: note = Description of Artificial Sequence: Synthetic coding sequence
  source 1..1401: mol_type = other DNA
atgctgaagtggcccatccccggccaggtggccctgttccagatcctgagatgcagaggcaacagcagaagaaccaccgtgaccagcctgaccgtgagccaggtgggccagaacttcaccttcgtgctgaccgacatcgacagcaagcagagattcggcttctgcagactgagcagcggcgccaagagctgcttctgcatcctgagctacctgccctggttcgaggtgttctacaagctgctgaacatcctggccgactacaccaccaagagacaggagaaccagtggaacgagctgctggagaccctgcacaagctgcccatccccgaccccggcgtgagcgtgcacctgagcgtgcacagctacttcaccgtgcccgacaccagagagctgcccagcatccccgagaacagaaacctgaccgagtacttcgtggccgtggacgtgaacaacatgctgcacctgtacgccagcatgctgtacgagagaagaatcctgatcatctgcagcaagctgagcaccctgaccgcctgcatccacggcagcgccgccatgctgtaccccatgtactggcagcacgtgtacatccccgtgctgcccccccacctgctggactactgctgcgcccccatgccctacctgatcggcatccacctgagcctgatggagaaggtgagaaacatggccctggacgacgtggtgatcctgaacgtggacaccaacaccctggagacccccttcgacgacctgcagagcctgcccaacgacgtgatcagcagcctgaagaacagactgaagaaggtgagcaccaccaccggcgacggcgtggccagagccttcctgaaggcccaggccgccttcttcggcagctacagaaacgccctgaagatcgagcccgaggagcccatcaccttctgcgaggaggccttcgtgagccactacagaagcggcgccatgagacagttcctgcagaacgccacccagctgcagctgttcaagcagttcatcgacggcagactggacctgctgaacagcggcgagggcttcagcgacgtgttcgaggaggagatcaacatgggcgagtacgccggcagcgacaagctgtaccaccagtggctgagcaccgtgagaaagggcagcggcgccatcctgaacaccgtgaagaccaaggccaaccccgccatgaagaccgtgtacaagttcgccaaggaccacgccaagatgggcatcaaggaggtgaagaacagactgaagcagaaggacatcgccgagaacggctgcgcccccacccccgaggagcagctgcccaagaccgcccccagccccctggtggaggccaaggaccccaagctgagagaggacagaagacccatcaccgtgcacttcggccaggccctgtag

SEQ ID NO: 78976 - DNA, 1680 bp, synthetic construct
  misc_feature 1..1680: note = Description of Artificial Sequence: Synthetic coding sequence
  source 1..1680: mol_type = other DNA
atgggcagcagaatcaagcagaaccccgagaccaccttcgaggtgtacgtggaggtggcctaccccagaaccggcggcaccctgagcgaccccgaggtgcagagacagttccccgaggactacagcgaccaggaggtgctgcagaccctgaccaagttctgcttccccttctacgtggacagcctgaccgtgagccaggtgggccagaacttcaccttcgtgctgaccgacatcgacagcaagcagagattcggcttctgcagactgagcagcggcgccaagagctgcttctgcatcctgagctacctgccctggttcgaggtgttctacaagctgctgaacatcctggccgactacaccaccaagagacaggagaaccagtggaacgagctgctggagaccctgcacaagctgcccatccccgaccccggcgtgagcgtgcacctgagcgtgcacagctacttcaccgtgcccgacaccagagagctgcccagcatccccgagaacagaaacctgaccgagtacttcgtggccgtggacgtgaacaacatgctgcacctgtacgccagcatgctgtacgagagaagaatcctgatcatctgcagcaagctgagcaccctgaccgcctgcatccacggcagcgccgccatgctgtaccccatgtactggcagcacgtgtacatccccgtgctgcccccccacctgctggactactgctgcgcccccatgccctacctgatcggcatccacctgagcctgatggagaaggtgagaaacatggccctggacgacgtggtgatcctgaacgtggacaccaacaccctggagacccccttcgacgacctgcagagcctgcccaacgacgtgatcagcagcctgaagaacagactgaagaaggtgagcaccaccaccggcgacggcgtggccagagccttcctgaaggcccaggccgccttcttcggcagctacagaaacgccctgaagatcgagcccgaggagcccatcaccttctgcgaggaggccttcgtgagccactacagaagcggcgccatgagacagttcctgcagaacgccacccagctgcagctgttcaagcagttcatcgacggcagactggacctgctgaacagcggcgagggcttcagcgacgtgttcgaggaggagatcaacatgggcgagtacgccggcagcgacaagctgtaccaccagtggctgagcaccgtgagaaagggcagcggcgccatcctgaacaccgtgaagaccaaggccaaccccgccatgaagaccgtgtacaagttcgccaaggaccacgccaagatgggcatcaaggaggtgaagaacagactgaagcagaaggacatcgccgagaacggctgcgcccccacccccgaggagcagctgcccaagaccgcccccagccccctggtggaggccaaggaccccaagctgagagaggacagaagacccatcaccgtgcacttcggccaggtgagaccccccagaccccacgtggtgaagagacccaagagcaacatcgccgtggagggcagaagaaccagcgtgcccagccccgagcagaacaccatcgccacccccgccaccctgcacatcctgcagaagagcatcacccacttcgccgccaagttccccaccagaggctggaccagcagcagccactag

SEQ ID NO: 78977 - DNA, 3030 bp, synthetic construct
  misc_feature 1..3030: note = Description of Artificial Sequence: Synthetic coding sequence
  source 1..3030: mol_type = other DNA
atgggcagcagaatcaagcagaaccccgagaccaccttcgaggtgtacgtggaggtggcctaccccagaaccggcggcaccctgagcgaccccgaggtgcagagacagttccccgaggactacagcgaccaggaggtgctgcagaccctgaccaagttctgcttccccttctacgtggacagcctgaccgtgagccaggtgggccagaacttcaccttcgtgctgaccgacatcgacagcaagcagagattcggcttctgcagactgagcagcggcgccaagagctgcttctgcatcctgagctacctgccctggttcgaggtgttctacaagctgctgaacatcctggccgactacaccaccaagagacaggagaaccagtggaacgagctgctggagaccctgcacaagctgcccatccccgaccccggcgtgagcgtgcacctgagcgtgcacagctacttcaccgtgcccgacaccagagagctgcccagcatccccgagaacagaaacctgaccgagtacttcgtggccgtggacgtgaacaacatgctgcacctgtacgccagcatgctgtacgagagaagaatcctgatcatctgcagcaagctgagcaccctgaccgcctgcatccacggcagcgccgccatgctgtaccccatgtactggcagcacgtgtacatccccgtgctgcccccccacctgctggactactgctgcgcccccatgccctacctgatcggcatccacctgagcctgatggagaaggtgagaaacatggccctggacgacgtggtgatcctgaacgtggacaccaacaccctggagacccccttcgacgacctgcagagcctgcccaacgacgtgatcagcagcctgaagaacagactgaagaaggtgagcaccaccaccggcgacggcgtggccagagccttcctgaaggcccaggccgccttcttcggcagctacagaaacgccctgaagatcgagcccgaggagcccatcaccttctgcgaggaggccttcgtgagccactacagaagcggcgccatgagacagttcctgcagaacgccacccagctgcagctgttcaagcagttcatcgacggcagactggacctgctgaacagcggcgagggcttcagcgacgtgttcgaggaggagatcaacatgggcgagtacgccggcagcgacaagctgtaccaccagtggctgagcaccgtgagaaagggcagcggcgccatcctgaacaccgtgaagaccaaggccaaccccgccatgaagaccgtgtacaagttcgccaaggaccacgccaagatgggcatcaaggaggtgaagaacagactgaagcagaaggacatcgccgagaacggctgcgcccccacccccgaggagcagctgcccaagaccgcccccagccccctggtggaggccaaggaccccaagctgagagaggacagaagacccatcaccgtgcacttcggccaggtgagaccccccagaccccacgtggtgaagagacccaagagcaacatcgccgtggagggcagaagaaccagcgtgcccagccccgagcagccccagccctacagaaccctgagagagagcgacagcgccgagggcgacgaggccgagagccccgagcagcaggtgagaaagagcaccggccccgtgcccgccccccccgacagagccgccagcatcgacctgctggaggacgtgttcagcaacctggacatggaggccgccctgcagcccctgggccaggccaagagcctggaggacctgagagcccccaaggacctgagagagcagcccggcaccttcgactaccagagactggacctgggcggcagcgagagaagcagaggcgtgaccgtggccctgaagctgacccacccctacaacaagctgtggagcctgggccaggacgacatggccatccccagcaagccccccgccgccagccccgagaagcccagcgccctgctgggcaacagcctggccctgcccagaagaccccagaacagagacagcatcctgaaccccagcgacaaggaggaggtgcccacccccaccctgggcagcatcaccatccccagaccccagggcagaaagacccccgagctgggcatcgtgccccccccccccatccccagacccgccaagctgcaggccgccggcgccgccctgggcgacgtgagcgagagactgcagaccgacagagacagaagagccgccctgagccccggcctgctgcccggcgtggtgccccagggccccaccgagctgctgcagcccctgagccccggccccggcgccgccggcaccagcagcgacgccctgctggccctgctggaccccctgagcaccgcctggagcggcagcaccctgcccagcagacccgccacccccaacgtggccacccccttcaccccccagttcagcttcccccccgccggcacccccacccccttcccccagccccccctgaaccccttcgtgcccagcatgcccgccgccccccccaccctgcccctggtgagcacccccgccggccccttcggcgccccccccgccagcctgggccccgccttcgccagcggcctgctgctgagcagcgccggcttctgcgccccccacagaagccagcccaacctgagcgccctgagcatgcccaacctgttcggccagatgcccatgggcacccacaccagccccctgcagcccctgggcccccccgccgtggcccccagcagaatcagaaccctgcccctggccagaagcagcgccagagccgccgagaccaagcagggcctggccctgagacccggcgacccccccctgctgccccccagacccccccagggcctggagcccaccctgcagcccagcgccccccagcaggccagagaccccttcgaggacctgctgcagaagaccaagcaggacgtgagccccagccccgccctggcccccgcccccgacagcgtggagcagctgagaaagcagtgggagaccttcgagtag

SEQ ID NO: 78978 - DNA, 1590 bp, synthetic construct
  misc_feature 1..1590: note = Description of Artificial Sequence: Synthetic coding sequence
  source 1..1590: mol_type = other DNA
atgctgaagtggcccatccccggccaggtggccctgttccaggaggtgctgcagaccctgaccaagttctgcttccccttctacgtggacagcctgaccgtgagccaggtgggccagaacttcaccttcgtgctgaccgacatcgacagcaagcagagattcggcttctgcagactgagcagcggcgccaagagctgcttctgcatcctgagctacctgccctggttcgaggtgttctacaagctgctgaacatcctggccgactacaccaccaagagacaggagaaccagtggaacgagctgctggagaccctgcacaagctgcccatccccgaccccggcgtgagcgtgcacctgagcgtgcacagctacttcaccgtgcccgacaccagagagctgcccagcatccccgagaacagaaacctgaccgagtacttcgtggccgtggacgtgaacaacatgctgcacctgtacgccagcatgctgtacgagagaagaatcctgatcatctgcagcaagctgagcaccctgaccgcctgcatccacggcagcgccgccatgctgtaccccatgtactggcagcacgtgtacatccccgtgctgcccccccacctgctggactactgctgcgcccccatgccctacctgatcggcatccacctgagcctgatggagaaggtgagaaacatggccctggacgacgtggtgatcctgaacgtggacaccaacaccctggagacccccttcgacgacctgcagagcctgcccaacgacgtgatcagcagcctgaagaacagactgaagaaggtgagcaccaccaccggcgacggcgtggccagagccttcctgaaggcccaggccgccttcttcggcagctacagaaacgccctgaagatcgagcccgaggagcccatcaccttctgcgaggaggccttcgtgagccactacagaagcggcgccatgagacagttcctgcagaacgccacccagctgcagctgttcaagcagttcatcgacggcagactggacctgctgaacagcggcgagggcttcagcgacgtgttcgaggaggagatcaacatgggcgagtacgccggcagcgacaagctgtaccaccagtggctgagcaccgtgagaaagggcagcggcgccatcctgaacaccgtgaagaccaaggccaaccccgccatgaagaccgtgtacaagttcgccaaggaccacgccaagatgggcatcaaggaggtgaagaacagactgaagcagaaggacatcgccgagaacggctgcgcccccacccccgaggagcagctgcccaagaccgcccccagccccctggtggaggccaaggaccccaagctgagagaggacagaagacccatcaccgtgcacttcggccaggtgagaccccccagaccccacgtggtgaagagacccaagagcaacatcgccgtggagggcagaagaaccagcgtgcccagccccgagcagaacaccatcgccacccccgccaccctgcacatcctgcagaagagcatcacccacttcgccgccaagttccccaccagaggctggaccagcagcagccactag

SEQ ID NO: 78979 - DNA, 3063 bp, synthetic construct
  misc_feature 1..3063: note = Description of Artificial Sequence: Synthetic coding sequence
  source 1..3063: mol_type = other DNA
atgagaagacccggcgaccacggcctgcaggaccaggaggtgctgcagaccctgaccaagttctgcttccccttctacgtggacagcctgaccgtgagccaggtgggccagaacttcaccttcgtgctgaccgacatcgacagcaagcagagattcggcttctgcagactgagcagcggcgccaagagctgcttctgcatcctgagctacctgccctggttcgaggtgttctacaagctgctgaacatcctggccgactacaccaccaagagacaggagaaccagtggaacgagctgctggagaccctgcacaagctgcccatccccgaccccggcgtgagcgtgcacctgagcgtgcacagctacttcaccgtgcccgacaccagagagctgcccagcatccccgagaacagaaacctgaccgagtacttcgtggccgtggacgtgaacaacatgctgcacctgtacgccagcatgctgtacgagagaagaatcctgatcatctgcagcaagctgagcaccctgaccgcctgcatccacggcagcgccgccatgctgtaccccatgtactggcagcacgtgtacatccccgtgctgcccccccacctgctggactactgctgcgcccccatgccctacctgatcggcatccacctgagcctgatggagaaggtgagaaacatggccctggacgacgtggtgatcctgaacgtggacaccaacaccctggagacccccttcgacgacctgcagagcctgcccaacgacgtgatcagcagcctgaagaacagactgaagaaggtgagcaccaccaccggcgacggcgtggccagagccttcctgaaggcccaggccgccttcttcggcagctacagaaacgccctgaagatcgagcccgaggagcccatcaccttctgcgaggaggccttcgtgagccactacagaagcggcgccatgagacagttcctgcagaacgccacccagctgcagctgttcaagcagttcatcgacggcagactggacctgctgaacagcggcgagggcttcagcgacgtgttcgaggaggagatcaacatgggcgagtacgccggcagcgacaagctgtaccaccagtggctgagcaccgtgagaaagggcagcggcgccatcctgaacaccgtgaagaccaaggccaaccccgccatgaagaccgtgtacaagttcgccaaggaccacgccaagatgggcatcaaggaggtgaagaacagactgaagcagaaggacatcgccgagaacggctgcgcccccacccccgaggagcagctgcccaagaccgcccccagccccctggtggaggccaaggaccccaagctgagagaggacagaagacccatcaccgtgcacttcggccaggtgagaccccccagaccccacgtggtgaagagacccaagagcaacatcgccgtggagggcagaagaaccagcgtgcccagccccgagcacctggtgaagcccctgagacactacgccgtgttcctgagcgaggacagcagcgacgacgagtgccagagagaggagggccccagcagcggcttcaccgagagcttcttcttcagcgcccccttcgagtggccccagccctacagaaccctgagagagagcgacagcgccgagggcgacgaggccgagagccccgagcagcaggtgagaaagagcaccggccccgtgcccgccccccccgacagagccgccagcatcgacctgctggaggacgtgttcagcaacctggacatggaggccgccctgcagcccctgggccaggccaagagcctggaggacctgagagcccccaaggacctgagagagcagcccggcaccttcgactaccagagactggacctgggcggcagcgagagaagcagaggcgtgaccgtggccctgaagctgacccacccctacaacaagctgtggagcctgggccaggacgacatggccatccccagcaagccccccgccgccagccccgagaagcccagcgccctgctgggcaacagcctggccctgcccagaagaccccagaacagagacagcatcctgaaccccagcgacaaggaggaggtgcccacccccaccctgggcagcatcaccatccccagaccccagggcagaaagacccccgagctgggcatcgtgccccccccccccatccccagacccgccaagctgcaggccgccggcgccgccctgggcgacgtgagcgagagactgcagaccgacagagacagaagagccgccctgagccccggcctgctgcccggcgtggtgccccagggccccaccgagctgctgcagcccctgagccccggccccggcgccgccggcaccagcagcgacgccctgctggccctgctggaccccctgagcaccgcctggagcggcagcaccctgcccagcagacccgccacccccaacgtggccacccccttcaccccccagttcagcttcccccccgccggcacccccacccccttcccccagccccccctgaaccccttcgtgcccagcatgcccgccgccccccccaccctgcccctggtgagcacccccgccggccccttcggcgccccccccgccagcctgggccccgccttcgccagcggcctgctgctgagcagcgccggcttctgcgccccccacagaagccagcccaacctgagcgccctgagcatgcccaacctgttcggccagatgcccatgggcacccacaccagccccctgcagcccctgggcccccccgccgtggcccccagcagaatcagaaccctgcccctggccagaagcagcgccagagccgccgagaccaagcagggcctggccctgagacccggcgacccccccctgctgccccccagacccccccagggcctggagcccaccctgcagcccagcgccccccagcaggccagagaccccttcgaggacctgctgcagaagaccaagcaggacgtgagccccagccccgccctggcccccgcccccgacagcgtggagcagctgagaaagcagtgggagaccttcgagtag

SEQ ID NO: 78980 - DNA, 2385 bp, synthetic construct
  misc_feature 1..2385: note = Description of Artificial Sequence: Synthetic coding sequence
  source 1..2385: mol_type = other DNA
atgctgtaccccatgtactggcagcacgtgtacatccccgtgctgcccccccacctgctggactactgctgcgcccccatgccctacctgatcggcatccacctgagcctgatggagaaggtgagaaacatggccctggacgacgtggtgatcctgaacgtggacaccaacaccctggagacccccttcgacgacctgcagagcctgcccaacgacgtggaggagcccatcaccttctgcgaggaggccttcgtgagccactacagaagcggcgccatgagacagttcctgcagaacgccacccagctgcagctgttcaagcagttcatcgacggcagactggacctgctgaacagcggcgagggcttcagcgacgtgttcgaggaggagatcaacatgggcgagtacgccggcagcgacaagctgtaccaccagtggctgagcaccgtgagaaagggcagcggcgccatcctgaacaccgtgaagaccaaggccaaccccgccatgaagaccgtgtacaagttcgccaaggaccacgccaagatgggcatcaaggaggtgaagaacagactgaagcagaaggacatcgccgagaacggctgcgcccccacccccgaggagcagctgcccaagaccgcccccagccccctggtggaggccaaggaccccaagctgagagaggacagaagacccatcaccgtgcacttcggccaggtgagaccccccagaccccacgtggtgaagagacccaagagcaacatcgccgtggagggcagaagaaccagcgtgcccagccccgagcacctggtgaagcccctgagacactacgccgtgttcctgagcgaggacagcagcgacgacgagtgccagagagaggagggccccagcagcggcttcaccgagagcttcttcttcagcgcccccttcgagtggccccagccctacagaaccctgagagagagcgacagcgccgagggcgacgaggccgagagccccgagcagcaggtgagaaagagcaccggccccgtgcccgccccccccgacagagccgccagcatcgacctgctggaggacgtgttcagcaacctggacatggaggccgccctgcagcccctgggccaggccaagagcctggaggacctgagagcccccaaggacctgagagagcagcccggcaccttcgactaccagagactggacctgggcggcagcgagagaagcagaggcgtgaccgtggccctgaagctgacccacccctacaacaagctgtggagcctgggccaggacgacatggccatccccagcaagccccccgccgccagccccgagaagcccagcgccctgctgggcaacagcctggccctgcccagaagaccccagaacagagacagcatcctgaaccccagcgacaaggaggaggtgcccacccccaccctgggcagcatcaccatccccagaccccagggcagaaagacccccgagctgggcatcgtgccccccccccccatccccagacccgccaagctgcaggccgccggcgccgccctgggcgacgtgagcgagagactgcagaccgacagagacagaagagccgccctgagccccggcctgctgcccggcgtggtgccccagggccccaccgagctgctgcagcccctgagccccggccccggcgccgccggcaccagcagcgacgccctgctggccctgctggaccccctgagcaccgcctggagcggcagcaccctgcccagcagacccgccacccccaacgtggccacccccttcaccccccagttcagcttcccccccgccggcacccccacccccttcccccagccccccctgaaccccttcgtgcccagcatgcccgccgccccccccaccctgcccctggtgagcacccccgccggccccttcggcgccccccccgccagcctgggccccgccttcgccagcggcctgctgctgagcagcgccggcttctgcgccccccacagaagccagcccaacctgagcgccctgagcatgcccaacctgttcggccagatgcccatgggcacccacaccagccccctgcagcccctgggcccccccgccgtggcccccagcagaatcagaaccctgcccctggccagaagcagcgccagagccgccgagaccaagcagggcctggccctgagacccggcgacccccccctgctgccccccagacccccccagggcctggagcccaccctgcagcccagcgccccccagcaggccagagaccccttcgaggacctgctgcagaagaccaagcaggacgtgagccccagccccgccctggcccccgcccccgacagcgtggagcagctgagaaagcagtgggagaccttcgagtag

SEQ ID NO: 78981 - DNA, 1191 bp, synthetic construct
  misc_feature 1..1191: note = Description of Artificial Sequence: Synthetic coding sequence
  source 1..1191: mol_type = other DNA
atggccgccgcccccagagaggagaagagatggccccagcccgtgttcagcaaccccgtggtgctgtggaagttccccgaggacttcggcgaccaggagatcctgcagagcgtgcccaagttctgcttccccttcgacgtggagagagtgagccagaaccaggtgggccagcacttcaccttcgtgctgaccgacatcgagagcaagcagagattcggcttctgcagactgaccagcggcggcaccatctgcctgtgcatcctgagctacctgccctggttcgaggtgtactacaagctgctgaacaccctggccgactacctggccaaggagctggagaacgacctgaacgagaccctgagaagcctgtacaaccaccccgtgcccaaggccaacacccccgtgaacctgagcgtgcacagctacttcatcgcccccgacgtgaccggcctgcccaccatccccgagagcagaaacctgaccgagtacttcgtggccgtggacgtgaacaacatgctgcagctgtacgccagcatgctgcacgagagaagaatcgtgatcatcagcagcaagctgagcaccctgaccgcctgcatccacggcagcgccgccctgctgtaccccatgtactggcagcacatctacatccccgtgctgcccccccacctgctggactactgctgcgcccccatgccctacctgatcggcatccacagcagcctgatcgagagagtgaagaacaagagcctggaggacgtggtgatgctgaacgtggacaccaacaccctggagagccccttcagcgacctgaacaacctgcccagcgacgtggtgagcgccctgaagaacaagctgaagaagcagagcaccgccaccggcgacggcgtggccagagccttcctgagagcccaggccgccctgttcggcagctacagagacgccctgagatacaagcccggcgagcccatcaccttctgcgaggagagcttcgtgaagcacagaagcagcgtgatgaagcagttcctggagaccgccatcaacctgcagctgttcaagcagttcatcgacggcagactggccaagctgaacgccggcagaggcttcagcgacgtgttcgaggaggagatcaccagcggcggcttctgcggcggcaaggacaagctgcagtacgactaccccttcagccagtag

SEQ ID NO: 78982 - DNA, 1281 bp, synthetic construct
  misc_feature 1..1281: note = Description of Artificial Sequence: Synthetic coding sequence
  source 1..1281: mol_type = other DNA
atggactgcagaaccaaggccaaccccgacagaaccttcgacctggtgctgaaggtgaagtgccacgccagcgagaacgaggaccccgtggtgctgtggaagttccccgaggacttcggcgaccaggagatcctgcagagcgtgcccaagttctgcttccccttcgacgtggagagagtgagccagaaccaggtgggccagcacttcaccttcgtgctgaccgacatcgagagcaagcagagattcggcttctgcagactgaccagcggcggcaccatctgcctgtgcatcctgagctacctgccctggttcgaggtgtactacaagctgctgaacaccctggccgactacctggccaaggagctggagaacgacctgaacgagaccctgagaagcctgtacaaccaccccgtgcccaaggccaacacccccgtgaacctgagcgtgaaccaggagatcttcatcgcctgcgagcaggtgctgaaggaccagcccgccctggtgccccacagctacttcatcgcccccgacgtgaccggcctgcccaccatccccgagagcagaaacctgaccgagtacttcgtggccgtggacgtgaacaacatgctgcagctgtacgccagcatgctgcacgagagaagaatcgtgatcatcagcagcaagctgagcaccctgaccgcctgcatccacggcagcgccgccctgctgtaccccatgtactggcagcacatctacatccccgtgctgcccccccacctgctggactactgctgcgcccccatgccctacctgatcggcatccacagcagcctgatcgagagagtgaagaacaagagcctggaggacgtggtgatgctgaacgtggacaccaacaccctggagagccccttcagcgacctgaacaacctgcccagcgacgtggtgagcgccctgaagaacaagctgaagaagcagagcaccgccaccggcgacggcgtggccagagccttcctgagagcccaggccgccctgttcggcagctacagagacgccctgagatacaagcccggcgagcccatcaccttctgcgaggagagcttcgtgaagcacagaagcagcgtgatgaagcagttcctggagaccgccatcaacctgcagctgttcaagcagttcatcgacggcagactggccaagctgaacgccggcagaggcttcagcgacgtgttcgaggaggagatcaccagcggcggcttctgcggcggcaaggacaagctgcagtacgactaccccttcagccagtag

SEQ ID NO: 78983 - DNA, 1191 bp, synthetic construct; identical to SEQ ID NO: 78981
  misc_feature 1..1191: note = Description of Artificial Sequence: Synthetic coding sequence
  source 1..1191: mol_type = other DNA

SEQ ID NO: 78984 - DNA, 2268 bp, synthetic construct
  misc_feature 1..2268: note = Description of Artificial Sequence: Synthetic coding sequence
  source 1..2268: mol_type = other DNA
atcgagaccaagaccagagccaaccccgacagaaccttcgacctggtgctgaaggtgaagtgccacgccagcgagaacgaggaccccgtggtgctgtggaagttccccgaggacttcggcgaccaggagatcctgcagagcgtgcccaagttctgcttccccttcgacgtggagagagtgagccagaaccaggtgggccagcacttcaccttcgtgctgaccgacatcgagagcaagcagagattcggcttctgcagactgaccagcggcggcaccatctgcctgtgcatcctgagctacctgccctggttcgaggtgtactacaagctgctgaacaccctggccgactacctggccaaggagctggagaacgacctgaacgagaccctgagaagcctgtacaaccaccccgtgcccaaggccaacacccccgtgaacctgagcgtgcacagctacttcatcgcccccgacgtgaccggcctgcccaccatccccgagagcagaaacctgaccgagtacttcgtggccgtggacgtgaacaacatgctgcagctgtacgccagcatgctgcacgagagaagaatcgtgatcatcagcagcaagctgagcaccctgaccgcctgcatccacggcagcgccgccctgctgtaccccatgtactggcagcacatctacatccccgtgctgcccccccacctgctggactactgctgcgcccccatgccctacctgatcggcatccacagcagcctgatcgagagagtgaagaacaagagcctggaggacgtggtgatgctgaacgtggacaccaacaccctggagagccccttcagcgacctgaacaacctgcccagcgacgtggtgagcgccctgaagaacaagctgaagaagcagagcaccgccaccggcgacggcgtggccagagccttcctgagagcccaggccgccctgttcggcagctacagagacgccctgagatacaagcccggcgagcccatcaccttctgcgaggagagcttcgtgaagcacagaagcagcgtgatgaagcagttcctggagaccgccatcaacctgcagctgttcaagcagttcatcgacggcagactggccaagctgaacgccggcagaggcttcagcgacgtgttcgaggaggagatcaccagcggcggcttctgcggcggcaaccccagaagctaccagcagtgggtgcacaccgtgaagaagggcggcgccctgttcaacaccgccatgaccaaggccacccccgccgtgagaaccgcctacaagttcgccaagaaccacgccaagctgggcctgaaggaggtgaagagcaagctgaagcacaaggagaacgaggaggactacggcacctgcagcagcagcgtgcagtacacccccgtgtacaagctgcacaacgagaagggcggcaacagcgagaagagaaagctggcccaggccagactgaagagacccctgaagagcctggacggcgccctgtacgacgacgaggacgacgacgacatcgagagagccagcaagctgagcagcgaggacggcgaggaggccagcgcctacctgtacgagagcgacgacagcgtggagaccagagtgaagaccccctacagcggcgagatggacctgctgggcgagatcctggacaccctgagcacccacagcagcgaccagggcaagctggccgccgccaagagcctggacttcttcagaagcatggacgacatcgactacaagcccaccaacaagagcaacgcccccagcgagaacaacctggccttcctgtgcggcggcagcggcgaccaggccgagtggaacctgggccaggacgacagcgccctgcacggcaagcacctgccccccagccccagaaagagagtgagcagcagcggcctgaccgacagcctgttcatcctgaaggaggagaacagcaacaagcacctgggcgccgacaacgtgagcgaccccaccagcggcctggacttccagctgaccagccccgaggtgagccagaccgacaagggcaagaccgagaagagagagaccctgagccagatcagcgacgacctgctgatccccggcctgggcagacacagcagcaccttcgtgccctgggagaaggagggcaaggaggccaaggagaccagcgaggacatcggcctgctgcacgaggtggtgagcctgtgccacatgaccagcgacttccagcagagcctgaacatcagcgacaagaacaccaacggcaaccagacctag

SEQ ID NO: 78985 - DNA, 2328 bp, synthetic construct
  misc_feature 1..2328: note = Description of Artificial Sequence: Synthetic coding sequence
  source 1..2328: mol_type = other DNA
atcgagaccaagaccagagccaaccccgacagaaccttcgacctggtgctgaaggtgaagtgccacgccagcgagaacgaggaccccgtggtgctgtggaagttccccgaggacttcggcgaccaggagatcctgcagagcgtgcccaagttctgcttccccttcgacgtggagagagtgagccagaaccaggtgggccagcacttcaccttcgtgctgaccgacatcgagagcaagcagagattcggcttctgcagactgaccagcggcggcaccatctgcctgtgcatcctgagctacctgccctggttcgaggtgtactacaagctgctgaacaccctggccgactacctggccaaggagctggagaacgacctgaacgagaccctgagaagcctgtacaaccaccccgtgcccaaggccaacacccccgtgaacctgagcgtgaaccaggagatcttcatcgcctgcgagcaggtgctgaaggaccagcccgccctggtgccccacagctacttcatcgcccccgacgtgaccggcctgcccaccatccccgagagcagaaacctgaccgagtacttcgtggccgtggacgtgaacaacatgctgcagctgtacgccagcatgctgcacgagagaagaatcgtgatcatcagcagcaagctgagcaccctgaccgcctgcatccacggcagcgccgccctgctgtaccccatgtactggcagcacatctacatccccgtgctgcccccccacctgctggactactgctgcgcccccatgccctacctgatcggcatccacagcagcctgatcgagagagtgaagaacaagagcctggaggacgtggtgatgctgaacgtggacaccaacaccctggagagccccttcagcgacctgaacaacctgcccagcgacgtggtgagcgccctgaagaacaagctgaagaagcagagcaccgccaccggcgacggcgtggccagagccttcctgagagcccaggccgccctgttcggcagctacagagacgccctgagatacaagcccggcgagcccatcaccttctgcgaggagagcttcgtgaagcacagaagcagcgtgatgaagcagttcctggagaccgccatcaacctgcagctgttcaagcagttcatcgacggcagactggccaagctgaacgccggcagaggcttcagcgacgtgttcgaggaggagatcaccagcggcggcttctgcggcggcaaccccagaagctaccagcagtgggtgcacaccgtgaagaagggcggcgccctgttcaacaccgccatgaccaaggccacccccgccgtgagaaccgcctacaagttcgccaagaaccacgccaagctgggcctgaaggaggtgaagagcaagctgaagcacaaggagaacgaggaggactacggcacctgcagcagcagcgtgcagtacacccccgtgtacaagctgcacaacgagaagggcggcaacagcgagaagagaaagctggcccaggccagactgaagagacccctgaagagcctggacggcgccctgtacgacgacgaggacgacgacgacatcgagagagccagcaagctgagcagcgaggacggcgaggaggccagcgcctacctgtacgagagcgacgacagcgtggagaccagagtgaagaccccctacagcggcgagatggacctgctgggcgagatcctggacaccctgagcacccacagcagcgaccagggcaagctggccgccgccaagagcctggacttcttcagaagcatggacgacatcgactacaagcccaccaacaagagcaacgcccccagcgagaacaacctggccttcctgtgcggcggcagcggcgaccaggccgagtggaacctgggccaggacgacagcgccctgcacggcaagcacctgccccccagccccagaaagagagtgagcagcagcggcctgaccgacagcctgttcatcctgaaggaggagaacagcaacaagcacctgggcgccgacaacgtgagcgaccccaccagcggcctggacttccagctgaccagccccgaggtgagccagaccgacaagggcaagaccgagaagagagagaccctgagccagatcagcgacgacctgctgatccccggcctgggcagacacagcagcaccttcgtgccctgggagaaggagggcaaggaggccaaggagaccagcgaggacatcggcctgctgcacgaggtggtgagcctgtgccacatgaccagcgacttccagcagagcctgaacatcagcgacaagaacaccaacggcaaccagacctag

SEQ ID NO: 78986 - DNA, 1248 bp, synthetic construct
  misc_feature 1..1248: note = Description of Artificial Sequence: Synthetic coding sequence
  source 1..1248: mol_type = other DNA
gtgaagcacagaagcagcgtgatgaagcagttcctggagaccgccatcaacctgcagctgttcaagcagttcatcgacggcagactggccaagctgaacgccggcagaggcttcagcgacgtgttcgaggaggagatcaccagcggcggcttctgcggcggcaaccccagaagctaccagcagtgggtgcacaccgtgaagaagggcggcgccctgttcaacaccgccatgaccaaggccacccccgccgtgagaaccgcctacaagttcgccaagaaccacgccaagctgggcctgaaggaggtgaagagcaagctgaagcacaaggagaacgaggaggactacggcacctgcagcagcagcgtgcagtacacccccgtgtacaagctgcacaacgagaagggcggcaacagcgagaagagaaagctggcccaggccagactgaagagacccctgaagagcctggacggcgccctgtacgacgacgaggacgacgacgacatcgagagagccagcaagctgagcagcgaggacggcgaggaggccagcgcctacctgtacgagagcgacgacagcgtggagaccagagtgaagaccccctacagcggcgagatggacctgctgggcgagatcctggacaccctgagcacccacagcagcgaccagggcaagctggccgccgccaagagcctggacttcttcagaagcatggacgacatcgactacaagcccaccaacaagagcaacgcccccagcgagaacaacctggccttcctgtgcggcggcagcggcgaccaggccgagtggaacctgggccaggacgacagcgccctgcacggcaagcacctgccccccagccccagaaagagagtgagcagcagcggcctgaccgacagcctgttcatcctgaaggaggagaacagcaacaagcacctgggcgccgacaacgtgagcgaccccaccagcggcctggacttccagctgaccagccccgaggtgagccagaccgacaagggcaagaccgagaagagagagaccctgagccagatcagcgacgacctgctgatccccggcctgggcagacacagcagcaccttcgtgccctgggagaaggagggcaaggaggccaaggagaccagcgaggacatcggcctgctgcacgaggtggtgagcctgtgccacatgaccagcgacttccagcagagcctgaacatcagcgacaagaacaccaacggcaaccagacctag

SEQ ID NO: 78987 - DNA, 2406 bp, synthetic construct
  misc_feature 1..2406: note = Description of Artificial Sequence: Synthetic coding sequence
  source 1..2406: mol_type = other DNA
atggagagcagagccgagggcggcagccccgccgtgttcgactggttcttcgaggccgcctgccccgccagcctgcaggaggacccccccatcctgagacagttcccccccgacttcagagaccaggaggccatgcagatggtgcccaagttctgcttccccttcgacgtggagagagagccccccagccccgccgtgcagcacttcaccttcgccctgaccgacctggccggcaacagaagattcggcttctgcagactgagagccggcacccagagctgcctgtgcatcctgagccacctgccctggttcgaggtgttctacaagctgctgaacaccgtgggcgacctgctggcccaggaccaggtgaccgaggccgaggagctgctgcagaacctgttccagcagagcctgagcggcccccaggccagcgtgggcctggagctgggcagcggcgtgaccgtgagcagcggccagggcatccccccccccaccagaggcaacagcaagcccctgagctgcttcgtggcccccgacagcggcagactgcccagcatccccgagaacagaaacctgaccgagctggtggtggccgtgaccgacgagaacatcgtgggcctgttcgccgccctgctggccgagagaagagtgctgctgaccgccagcaagctgagcaccctgaccagctgcgtgcacgccagctgcgccctgctgtaccccatgagatgggagcacgtgctgatccccaccctgcccccccacctgctggactactgctgcgcccccatgccctacctgatcggcgtgcacgccagcctggccgagagagtgagagagaaggccctggaggacgtggtggtgctgaacgtggacgccaacaccctggagaccaccttcaacgacgtgcaggccctgccccccgacgtggtgagcctgctgagactgagactgagaaaggtggccctggcccccggcgagggcgtgagcagactgttcctgaaggcccaggccctgctgttcggcggctacagagacgccctggtgtgcagccccggccagcccgtgaccttcagcgaggaggtgttcctggcccagaagcccggcgcccccctgcaggccttccacagaagagccgtgcacctgcagctgttcaagcagttcatcgaggccagactggagaagctgaacaagggcgagggcttcagcgaccagttcgagcaggagatcaccggctgcggcgccagcagcggcgccctgagaagctaccagctgtgggccgacaacctgaagaagggcggcggcgccctgctgcacagcgtgaaggccaagacccagcccgccgtgaagaacatgtacagaagcgccaagagcggcctgaagggcgtgcagagcctgctgatgtacaaggacggcgacagcgtgctgcagagaggcggcagcctgagagcccccgccctgcccagcagaagcgacagactgcagcagagactgcccatcacccagcacttcggcaagaacagacccctgagacccagcagaagaagacagctggaggagggcaccagcgagccccccggcgccggcaccccccccctgagccccgaggacgagggctgcccctgggccgaggaggccctggacagcagcttcctgggcagcggcgaggagctggacctgctgagcgagatcctggacagcctgagcatgggcgccaagagcgccggcagcctgagacccagccagagcctggactgctgccacagaggcgacctggacagctgcttcagcctgcccaacatccccagatggcagcccgacgacaagaagctgcccgagcccgagccccagcccctgagcctgcccagcctgcagaacgccagcagcctggacgccaccagcagcagcaaggacagcagaagccagctgatccccagcgagagcgaccaggaggtgaccagccccagccagagcagcaccgccagcgccgaccccagcatctggggcgaccccaagcccagccccctgaccgagcccctgatcctgcacctgacccccagccacaaggccgccgaggacagcaccgcccaggagaaccccaccccctggctgagcaccgcccccaccgagcccagcccccccgagagcccccagatcctggcccccaccaagcccaacttcgacatcgcctggaccagccagcccctggaccccagcagcgaccccagcagcctggaggaccccagagccagaccccccaaggccctgctggccgagagagcccacctgcagcccagagaggagcccggcgccctgaacagccccgccacccccaccagcaactgccagaagagccagcccagcagcagacccagagtggccgacctgaagaagtgcttcgagggctag

SEQ ID NO: 78988 - DNA, 2274 bp, synthetic construct
  misc_feature 1..2274: note = Description of Artificial Sequence: Synthetic coding sequence
  source 1..2274: mol_type = other DNA
atgcagatggtgcccaagttctgcttccccttcgacgtggagagagagccccccagccccgccgtgcagcacttcaccttcgccctgaccgacctggccggcaacagaagattcggcttctgcagactgagagccggcacccagagctgcctgtgcatcctgagccacctgccctggttcgaggtgttctacaagctgctgaacaccgtgggcgacctgctggcccaggaccaggtgaccgaggccgaggagctgctgcagaacctgttccagcagagcctgagcggcccccaggccagcgtgggcctggagctgggcagcggcgtgaccgtgagcagcggccagggcatccccccccccaccagaggcaacagcaagcccctgagctgcttcgtggcccccgacagcggcagactgcccagcatccccgagaacagaaacctgaccgagctggtggtggccgtgaccgacgagaacatcgtgggcctgttcgccgccctgctggccgagagaagagtgctgctgaccgccagcaagctgagcaccctgaccagctgcgtgcacgccagctgcgccctgctgtaccccatgagatgggagcacgtgctgatccccaccctgcccccccacctgctggactactgctgcgcccccatgccctacctgatcggcgtgcacgccagcctggccgagagagtgagagagaaggccctggaggacgtggtggtgctgaacgtggacgccaacaccctggagaccaccttcaacgacgtgcaggccctgccccccgacgtggtgagcctgctgagactgagactgagaaaggtggccctggcccccggcgagggcgtgagcagactgttcctgaaggcccaggccctgctgttcggcggctacagagacgccctggtgtgcagccccggccagcccgtgaccttcagcgaggaggtgttcctggcccagaagcccggcgcccccctgcaggccttccacagaagagccgtgcacctgcagctgttcaagcagttcatcgaggccagactggagaagctgaacaagggcgagggcttcagcgaccagttcgagcaggagatcaccggctgcggcgccagcagcggcgccctgagaagctaccagctgtgggccgacaacctgaagaagggcggcggcgccctgctgcacagcgtgaaggccaagacccagcccgccgtgaagaacatgtacagaagcgccaagagcggcctgaagggcgtgcagagcctgctgatgtacaaggacggcgacagcgtgctgcagagaggcggcagcctgagagcccccgccctgcccagcagaagcgacagactgcagcagagactgcccatcacccagcacttcggcaagaacagacccctgagacccagcagaagaagacagctggaggagggcaccagcgagccccccggcgccggcaccccccccctgagccccgaggacgagggctgcccctgggccgaggaggccctggacagcagcttcctgggcagcggcgaggagctggacctgctgagcgagatcctggacagcctgagcatgggcgccaagagcgccggcagcctgagacccagccagagcctggactgctgccacagaggcgacctggacagctgcttcagcctgcccaacatccccagatggcagcccgacgacaagaagctgcccgagcccgagccccagcccctgagcctgcccagcctgcagaacgccagcagcctggacgccaccagcagcagcaaggacagcagaagccagctgatccccagcgagagcgaccaggaggtgaccagccccagccagagcagcaccgccagcgccgaccccagcatctggggcgaccccaagcccagccccctgaccgagcccctgatcctgcacctgacccccagccacaaggccgccgaggacagcaccgcccaggagaaccccaccccctggctgagcaccgcccccaccgagcccagcccccccgagagcccccagatcctggcccccaccaagcccaacttcgacatcgcctggaccagccagcccctggaccccagcagcgaccccagcagcctggaggaccccagagccagaccccccaaggccctgctggccgagagagcccacctgcagcccagagaggagcccggcgccctgaacagccccgccacccccaccagcaactgccagaagagccagcccagcagcagacccagagtggccgacctgaagaagtgcttcgagggctag

SEQ ID NO: 78989 - DNA, 2193 bp, synthetic construct
  misc_feature 1..2193: note = Description of Artificial Sequence: Synthetic coding sequence
  source 1..2193: mol_type = other DNA
atgctgttcaacagcgtgctgagacagccccagctgggcgtgctgagaaacggctggagcagccagtaccccctgcagagcctgctgaccggctaccagtgcagcggcaacgacgagcacaccagctacggcgagaccggcgtgcccgtgccccccttcggctgcaccttcagcagcgcccccaacatggagcacgtgctggccgtggccaacgaggagggcttcgtgagactgtacaacaccgagagccagagcttcagaaagaagtgcttcaaggagtggatggcccactggaacgccgtgttcgacctggcctgggtgcccggcgagctgaagctggtgaccgccgccggcgaccagaccgccaagttctgggacgtgaaggccggcgagctgatcggcacctgcaagggccaccagtgcagcctgaagagcgtggccttcagcaagttcgagaaggccgtgttctgcaccggcggcagagacggcaacatcatggtgtgggacaccagatgcaacaagaaggacggcttctacagacaggtgaaccagatcagcggcgcccacaacaccagcgacaagcagacccccagcaagcccaagaagaagcagaacagcaagggcctggcccccagcgtggacttccagcagagcgtgaccgtggtgctgttccaggacgagaacaccctggtgagcgccggcgccgtggacggcatcatcaaggtgtgggacctgagaaagaactacaccgcctacagacaggagcccatcgccagcaagagcttcctgtaccccggcagcagcaccagaaagctgggctacagcagcctgatcctggacagcaccggcagcaccctgttcgccaactgcaccgacgacaacatctacatgttcaacatgaccggcctgaagaccagccccgtggccatcttcaacggccaccagaacagcaccttctacgtgaagagcagcctgagccccgacgaccagttcctggtgagcggcagcagcgacgaggccgcctacatctggaaggtgagcaccccctggcagccccccaccgtgctgctgggccacagccaggaggtgaccagcgtgtgctggtgccccagcgacttcaccaagatcgccacctgcagcgacgacaacaccctgaagatctggagactgaacagaggcctggaggagaagcccggcggcgacaagctgagcaccgtgggctgggccagccagaagaagaaggagagcagacccggcctggtgaccgtgaccagcagccagagcacccccgccaaggcccccagagccaagtgcaaccccagcaacagcagccccagcagcgccgcctgcgcccccagctgcgccggcgacctgcccctgcccagcaacacccccaccttcagcatcaagaccagccccgccaaggccagaagccccatcaacagaagaggcagcgtgagcagcgtgagccccaagccccccagcagcttcaagatgagcatcagaaactgggtgaccagaacccccagcagcagcccccccatcaccccccccgccagcgagaccaagatcatgagccccagaaaggccctgatccccgtgagccagaagagcagccaggccgaggcctgcagcgagagcagaaacagagtgaagagaagactggacagcagctgcctggagagcgtgaagcagaagtgcgtgaagagctgcaactgcgtgaccgagctggacggccaggtggagaacctgcacctggacctgtgctgcctggccggcaaccaggaggacctgagcaaggacagcctgggccccaccaagagcagcaagatcgagggcgccggcaccagcatcagcgagccccccagccccatcagcccctacgccagcgagagctgcggcaccctgcccctgcccctgagaccctgcggcgagggcagcgagatggtgggcaaggagaacagcagccccgagaacaagaactggctgctggccatggccgccaagagaaaggccgagaaccccagccccagaagccccagcagccagacccccaacagcagaagacagagcggcaagaagctgcccagccccgtgaccatcacccccagcagcatgagaaagatctgcacctacttccacagaaagagccaggaggacttctgcggccccgagcacagcaccgagctgtag

SEQ ID NO: 78990 - DNA, 1230 bp, synthetic construct
  misc_feature 1..1230: note = Description of Artificial Sequence: Synthetic coding sequence
  source 1..1230: mol_type = other DNA
atgctgttcaacagcgtgctgagacagccccagctgggcgtgctgagaaacggctggagcagccagtaccccctgcagagcctgctgaccggctaccagtgcagcggcaacgacgagcacaccagctacggcgagaccggcgtgcccgtgccccccttcggctgcaccttcagcagcgacgacaacaccctgaagatctggagactgaacagaggcctggaggagaagcccggcggcgacaagctgagcaccgtgggctgggccagccagaagaagaaggagagcagacccggcctggtgaccgtgaccagcagccagagcacccccgccaaggcccccagagccaagtgcaaccccagcaacagcagccccagcagcgccgcctgcgcccccagctgcgccggcgacctgcccctgcccagcaacacccccaccttcagcatcaagaccagccccgccaaggccagaagccccatcaacagaagaggcagcgtgagcagcgtgagccccaagccccccagcagcttcaagatgagcatcagaaactgggtgaccagaacccccagcagcagcccccccatcaccccccccgccagcgagaccaagatcatgagccccagaaaggccctgatccccgtgagccagaagagcagccaggccgaggcctgcagcgagagcagaaacagagtgaagagaagactggacagcagctgcctggagagcgtgaagcagaagtgcgtgaagagctgcaactgcgtgaccgagctggacggccaggtggagaacctgcacctggacctgtgctgcctggccggcaaccaggaggacctgagcaaggacagcctgggccccaccaagagcagcaagatcgagggcgccggcaccagcatcagcgagccccccagccccatcagcccctacgccagcgagagctgcggcaccctgcccctgcccctgagaccctgcggcgagggcagcgagatggtgggcaaggagaacagcagccccgagaacaagaactggctgctggccatggccgccaagagaaaggccgagaaccccagccccagaagccccagcagccagacccccaacagcagaagacagagcggcaagaagctgcccagccccgtgaccatcacccccagcagcatgagaaagatctgcacctacttccacagaaagagccaggaggacttctgcggccccgagcacagcaccgagctgtag

SEQ ID NO: 78991 - DNA, 2067 bp, synthetic construct
  misc_feature 1..2067: note = Description of Artificial Sequence: Synthetic coding sequence
  source 1..2067: mol_type = other DNA
atgctgttcaacagcgtgctgagacagccccagctgggcgtgctgagaaacgcccccaacatggagcacgtgctggccgtggccaacgaggagggcttcgtgagactgtacaacaccgagagccagagcttcagaaagaagtgcttcaaggagtggatggcccactggaacgccgtgttcgacctggcctgggtgcccggcgagctgaagctggtgaccgccgccggcgaccagaccgccaagttctgggacgtgaaggccggcgagctgatcggcacctgcaagggccaccagtgcagcctgaagagcgtggccttcagcaagttcgagaaggccgtgttctgcaccggcggcagagacggcaacatcatggtgtgggacaccagatgcaacaagaaggacggcttctacagacaggtgaaccagatcagcggcgcccacaacaccagcgacaagcagacccccagcaagcccaagaagaagcagaacagcaagggcctggcccccagcgtggacttccagcagagcgtgaccgtggtgctgttccaggacgagaacaccctggtgagcgccggcgccgtggacggcatcatcaaggtgtgggacctgagaaagaactacaccgcctacagacaggagcccatcgccagcaagagcttcctgtaccccggcagcagcaccagaaagctgggctacagcagcctgatcctggacagcaccggcagcaccctgttcgccaactgcaccgacgacaacatctacatgttcaacatgaccggcctgaagaccagccccgtggccatcttcaacggccaccagaacagcaccttctacgtgaagagcagcctgagccccgacgaccagttcctggtgagcggcagcagcgacgaggccgcctacatctggaaggtgagcaccccctggcagccccccaccgtgctgctgggccacagccaggaggtgaccagcgtgtgctggtgccccagcgacttcaccaagatcgccacctgcagcgacgacaacaccctgaagatctggagactgaacagaggcctggaggagaagcccggcggcgacaagctgagcaccgtgggctgggccagccagaagaagaaggagagcagacccggcctggtgaccgtgaccagcagccagagcacccccgccaaggcccccagagccaagtgcaaccccagcaacagcagccccagcagcgccgcctgcgcccccagctgcgccggcgacctgcccctgcccagcaacacccccaccttcagcatcaagaccagccccgccaaggccagaagccccatcaacagaagaggcagcgtgagcagcgtgagccccaagccccccagcagcttcaagatgagcatcagaaactgggtgaccagaacccccagcagcagcccccccatcaccccccccgccagcgagaccaagatcatgagccccagaaaggccctgatccccgtgagccagaagagcagccaggccgaggcctgcagcgagagcagaaacagagtgaagagaagactggacagcagctgcctggagagcgtgaagcagaagtgcgtgaagagctgcaactgcgtgaccgagctggacggccaggtggagaacctgcacctggacctgtgctgcctggccggcaaccaggaggacctgagcaaggacagcctgggccccaccaagagcagcaagatcgagggcgccggcaccagcatcagcgagccccccagccccatcagcccctacgccagcgagagctgcggcaccctgcccctgcccctgagaccctgcggcgagggcagcgagatggtgggcaaggagaacagcagccccgagaacaagaactggctgctggccatggccgccaagagaaaggccgagaaccccagccccagaagccccagcagccagacccccaacagcagaagacagagcggcaagaagctgcccagccccgtgaccatcacccccagcagcatgagaaagatctgcacctacttccacagaaagagccaggaggacttctgcggccccgagcacagcaccgagctgtag

SEQ ID NO: 78992 - DNA, 1494 bp, synthetic construct
  misc_feature 1..1494: note = Description of Artificial Sequence: Synthetic coding sequence
  source 1..1494: mol_type = other DNA
atgaagatcagcatcctgctgatgttcctgtggggcctgagctgcgccctgcccgtgaccagataccagaacaacgagagcgaggacagcgaggagtggaagggccacctggcccaggcccccaccccccccctggccaacgaggaccccagcgacagcacccagagcgaggagggcctgggcagcgacgaccaccagtacatctacagactggccggcggcttcagcagaagcaccggcaagggcggcgacgacaaggacgacgacgaggacgacagcggcgacgacaccttcggcgacgacgacagcggccccggccccaaggacagacaggagggcggcaacagcagactgggcagcgacgaggacagcgacgacaccatccaggccagcgaggagagcgccccccagggccaggacagcgcccaggacaccaccagcgagagcagagagctggacaacgaggacagagtggacagcaagcccgagggcggcgacagcacccaggagagcgagagcgaggagcactgggtgggcggcggcagcgacggcgagagcagccacggcgacggcagcgagctggacgacgagggcatgcagagcgacgaccccgagagcatcagaagcgagagaggcaacagcagaatgaacagcgccggcatgaagagcaaggagagcggcgagaacagcgagcaggccaacacccaggacagcggcggcagccagctgctggagcaccccagcagaaagatcttcagaaagagcagaatcagcgaggaggacgacagaagcgagctggacgacaacaacaccatggaggaggtgaagagcgacagcaccgagaacagcaacagcagagacaccggcctgagccagcccagaagagacagcaagggcgacagccaggaggacagcaaggagaacctgagccaggaggagagccagaacgtggacggccccagcagcgagagcagccaggaggccaacctgagcagccaggagaacagcagcgagagccaggaggaggtggtgagcgagagcagaggcgacaaccccgaccccaccaccagctacgtggaggaccaggaggacagcgacagcagcgaggaggacagcagccacaccctgagccacagcaagagcgagagcagagaggagcaggccgacagcgagagcagcgagagcctgaacttcagcgaggagagccccgagagccccgaggacgagaacagcagcagccaggagggcctgcagagccacagcagcagcgccgagagccagagcgaggagagccacagcgaggaggacgacagcgacagccaggacagcagcagaagcaaggaggacagcaacagcaccgagagcaagagcagcagcgaggaggacggccagctgaagaacatcgagatcgagagcagaaagctgaccgtggacgcctaccacaacaagcccatcggcgaccaggacgacaacgactgccaggacggctactag

SEQ ID NO: 78993 - DNA, 1542 bp, synthetic construct
  misc_feature 1..1542: note = Description of Artificial Sequence: Synthetic coding sequence
  source 1..1542: mol_type = other DNA
atgaagatcagcatcctgctgatgttcctgtggggcctgagctgcgccctgcccgtgaccagataccagaacaacgagagcgaggacagcgaggagtggaagggccacctggcccaggcccccaccccccccctggagagcagcgagagcagcgagggcagcaaggtgagcagcgaggagcaggccaacgaggaccccagcgacagcacccagagcgaggagggcctgggcagcgacgaccaccagtacatctacagactggccggcggcttcagcagaagcaccggcaagggcggcgacgacaaggacgacgacgaggacgacagcggcgacgacaccttcggcgacgacgacagcggccccggccccaaggacagacaggagggcggcaacagcagactgggcagcgacgaggacagcgacgacaccatccaggccagcgaggagagcgccccccagggccaggacagcgcccaggacaccaccagcgagagcagagagctggacaacgaggacagagtggacagcaagcccgagggcggcgacagcacccaggagagcgagagcgaggagcactgggtgggcggcggcagcgacggcgagagcagccacggcgacggcagcgagctggacgacgagggcatgcagagcgacgaccccgagagcatcagaagcgagagaggcaacagcagaatgaacagcgccggcatgaagagcaaggagagcggcgagaacagcgagcaggccaacacccaggacagcggcggcagccagctgctggagcaccccagcagaaagatcttcagaaagagcagaatcagcgaggaggacgacagaagcgagctggacgacaacaacaccatggaggaggtgaagagcgacagcaccgagaacagcaacagcagagacaccggcctgagccagcccagaagagacagcaagggcgacagccaggaggacagcaaggagaacctgagccaggaggagagccagaacgtggacggccccagcagcgagagcagccaggaggccaacctgagcagccaggagaacagcagcgagagccaggaggaggtggtgagcgagagcagaggcgacaaccccgaccccaccaccagctacgtggaggaccaggaggacagcgacagcagcgaggaggacagcagccacaccctgagccacagcaagagcgagagcagagaggagcaggccgacagcgagagcagcgagagcctgaacttcagcgaggagagccccgagagccccgaggacgagaacagcagcagccaggagggcctgcagagccacagcagcagcgccgagagccagagcgaggagagccacagcgaggaggacgacagcgacagccaggacagcagcagaagcaaggaggacagcaacagcaccgagagcaagagcagcagcgaggaggacggccagctgaagaacatcgagatcgagagcagaaagctgaccgtggacgcctaccacaacaagcccatcggcgaccaggacgacaacgactgccaggacggctactag

SEQ ID NO: 78994 - DNA, 3906 bp, synthetic construct
  misc_feature 1..3906: note = Description of Artificial Sequence: Synthetic coding sequence
  source 1..3906: mol_type = other DNA
atgaagatcatcacctacttctgcatctgggccgtggcctgggccatccccgtgccccagagcaagcccctggagagacacgtggagaagagcatgaacctgcacctgctggccagaagcaacgtgagcgtgcaggacgagctgaacgccagcggcaccatcaaggagagcggcgtgctggtgcacgagggcgacagaggcagacaggagaacacccaggacggccacaagggcgagggcaacggcagcaagtgggccgaggtgggcggcaagagcttcagcacctacagcaccctggccaacgaggagggcaacatcgagggctggaacggcgacaccggcaaggccgagacctacggccacgacggcatccacggcaaggaggagaacatcaccgccaacggcatccagggccaggtgagcatcatcgacaacgccggcgccaccaacagaagcaacaccaacggcaacaccgacaagaacacccagaacggcgacgtgggcgacgccggccacaacgaggacgtggccgtggtgcaggaggacggcccccaggtggccggcagcaacaacagcaccgacaacgaggacgagatcatcgagaacagctgcagaaacgagggcaacaccagcgagatcaccccccagatcaacagcaagagaaacggcaccaaggaggccgaggtgacccccggcaccggcgaggacgccggcctggacaacagcgacggcagccccagcggcaacggcgccgacgaggacgaggacgagggcagcggcgacgacgaggacgaggaggccggcaacggcaaggacagcagcaacaacagcaagggccaggagggccaggaccacggcaaggaggacgaccacgacagcagcatcggccagaacagcgacagcaaggagtactacgaccccgagggcaaggaggacccccacaacgaggtggacggcgacaagaccagcaagagcgaggagaacagcgccggcatccccgaggacaacggcagccagagaatcgaggacacccagaagctgaaccacagagagagcaagagagtggagaacagaatcaccaaggagagcgagacccacgccgtgggcaagagccaggacaagggcatcgagatcaagggccccagcagcggcaacagaaacatcaccaaggaggtgggcaagggcaacgagggcaaggaggacaagggccagcacggcatgatcctgggcaagggcaacgtgaagacccagggcgaggtggtgaacatcgagggccccggccagaagagcgagcccggcaacaaggtgggccacagcaacaccggcagcgacagcaacagcgacggctacgacagctacgacttcgacgacaagagcatgcagggcgacgaccccaacagcagcgacgagagcaacggcaacgacgacgccaacagcgagagcgacaacaacagcagcagcagaggcgacgccagctacaacagcgacgagagcaaggacaacggcaacggcagcgacagcaagggcgccgaggacgacgacagcgacagcaccagcgacaccaacaacagcgacagcaacggcaacggcaacaacggcaacgacgacaacgacaagagcgacagcggcaagggcaagagcgacagcagcgacagcgacagcagcgacagcagcaacagcagcgacagcagcgacagcagcgacagcgacagcagcgacagcaacagcagcagcgacagcgacagcagcgacagcgacagcagcgacagcagcgacagcgacagcagcgacagcagcaacagcagcgacagcagcgacagcagcgacagcagcgacagcagcgacagcagcgacagcagcgacagcaagagcgacagcagcaagagcgagagcgacagcagcgacagcgacagcaagagcgacagcagcgacagcaacagcagcgacagcagcgacaacagcgacagcagcgacagcagcaacagcagcaacagcagcgacagcagcgacagcagcgacagcagcgacagcagcagcagcagcgacagcagcaacagcagcgacagcagcgacagcagcgacagcagcaacagcagcgagagcagcgacagcagcgacagcagcgacagcgacagcagcgacagcagcgacagcagcaacagcaacagcagcgacagcgacagcagcaacagcagcgacagcagcgacagcagcaacagcagcgacagcagcgacagcagcgacagcagcaacagcagcgacagcagcgacagcagcgacagcagcaacagcagcgacagcagcgacagcagcgacagcagcgacagcagcgacagcagcaacagcagcgacagcaacgacagcagcaacagcagcgacagcagcgacagcagcaacagcagcgacagcagcaacagcagcgacagcagcgacagcagcgacagcagcgacagcgacagcagcaacagcagcgacagcagcaacagcagcgacagcagcgacagcagcaacagcagcgacagcagcgacagcagcgacagcagcgacggcagcgacagcgacagcagcaacagaagcgacagcagcaacagcagcgacagcagcgacagcagcgacagcagcaacagcagcgacagcagcgacagcagcgacagcaacgagagcagcaacagcagcgacagcagcgacagcagcaacagcagcgacagcgacagcagcgacagcagcaacagcagcgacagcagcgacagcagcaacagcagcgacagcagcgagagcagcaacagcagcgacaacagcaacagcagcgacagcagcaacagcagcgacagcagcgacagcagcgacagcagcaacagcagcgacagcagcaacagcagcgacagcagcaacagcagcgacagcagcgacagcaacagcagcgacagcagcgacagcagcaacagcagcgacagcagcgacagcagcgacagcagcgacagcagcgacagcagcgacagcagcaacagcagcgacagcagcgacagcagcgacagcagcgacagcagcaacagcagcgacagcagcaacagcagcgacagcagcaacagcagcgacagcagcgacagcagcgacagcagcgacagcagcgacagcagcgacagcagcgacagcagcgacagcagcaacagcagcgacagcagcgacagcagcgacagcagcgacagcagcgacagcagcgacagcagcgacagcagcgacagcagcgagagcagcgacagcagcgacagcagcaacagcagcgacagcagcgacagcagcgacagcagcgacagcagcgacagcagcgacagcagcgacagcagcgacagcagcgacagcagcaacagcagcgacagcagcgacagcagcgacagcagcgacagcagcgacagcagcaacagcagcgacagcagcgacagcagcgagagcagcgacagcagcgacagcagcgacagcagcgacagcagcgacagcagcgacagcagcgacagcagcgacagcagcgacagcagcaacagcagcgacagcagcgacagcagcgacagcagcgacagcagcgacagcagcgacagcagcgacagcagcgacagcagcgacagcagcgacagcagcgacagcagcgacagcagcgacagcagcgacagcagcgacagcagcgacagcagcgacagcaacgagagcagcgacagcagcgacagcagcgacagcagcgacagcagcaacagcagcgacagcagcgacagcagcgacagcagcgacagcaccagcgacagcaacgacgagagcgacagccagagcaagagcggcaacggcaacaacaacggcagcgacagcgacagcgacagcgagggcagcgacagcaaccacagcaccagcgacgactag

SEQ ID NO: 78995 - DNA, 3906 bp, synthetic construct; identical to SEQ ID NO: 78994
  misc_feature 1..3906: note = Description of Artificial Sequence: Synthetic coding sequence
  source 1..3906: mol_type = other DNA

SEQ ID NO: 78996 - DNA, 783 bp, synthetic construct
  misc_feature 1..783: note = Description of Artificial Sequence: Synthetic coding sequence
  source 1..783: mol_type = other DNA
atggccaccccccccaagagaagctgccccagcttcagcgccagcagcgagggcaccagaatcaagaagatcagcatcgagggcaacatcgccgccggcaagagcaccttcgtgaacatcctgaagcagctgtgcgaggactgggaggtggtgcccgagcccgtggccagatggtgcaacgtgcagagcacccaggacgagttcgaggagctgaccatgagccagaagaacggcggcaacgtgctgcagatgatgtacgagaagcccgagagatggagcttcaccttccagacctacgcctgcctgagcagaatcagagcccagctggccagcctgaacggcaagctgaaggacgccgagaagcccgtgctgttcttcgagagaagcgtgtacagcgacagatacatcttcgccagcaacctgtacgagagcgagtgcatgaacgagaccgagtggaccatctaccaggactggcacgactggatgaacaaccagttcggccagagcctggagctggacggcatcatctacctgcaggccacccccgagacctgcctgcacagaatctacctgagaggcagaaacgaggagcagggcatccccctggagtacctggagaagctgcactacaagcacgagagctggctgctgcacagaaccctgaagaccaacttcgactacctgcaggaggtgcccatcctgaccctggacgtgaacgaggacttcaaggacaagtacgagagcctggtggagaaggtgaaggagttcctgagcaccctgtag

SEQ ID NO: 78997 - DNA, 48 bp, synthetic construct
  misc_feature 1..48: note = Description of Artificial Sequence: Synthetic coding sequence
  source 1..48: mol_type = other DNA
atggccaccccccccaagagaagctgccccagcttcagcgccagctag

SEQ ID NO: 78998 - DNA, 834 bp, synthetic construct
  misc_feature 1..834: note = Description of Artificial Sequence: Synthetic coding sequence
  source 1..834: mol_type = other DNA
atggccgccggcagactgttcctgagcagactgagagcccccttcagcagcatggccaagagccccctggagggcgtgagcagcagcagaggcctgcacgccggcagaggccccagaagactgagcatcgagggcaacatcgccgtgggcaagagcaccttcgtgaagctgctgaccaagacctaccccgagtggcacgtggccaccgagcccgtggccacctggcagaacatccaggccgccggcacccagaaggcctgcaccgcccagagcctgggcaacctgctggacatgatgtacagagagcccgccagatggagctacaccttccagaccttcagcttcctgagcagactgaaggtgcagctggagcccttccccgagaagctgctgcaggccagaaagcccgtgcagatcttcgagagaagcgtgtacagcgacagatacatcttcgccaagaacctgttcgagaacggcagcctgagcgacatcgagtggcacatctaccaggactggcacagcttcctgctgtgggagttcgccagcagaatcaccctgcacggcttcatctacctgcaggccagcccccaggtgtgcctgaagagactgtaccagagagccagagaggaggagaagggcatcgagctggcctacctggagcagctgcacggccagcacgaggcctggctgatccacaagaccaccaagctgcacttcgaggccctgatgaacatccccgtgctggtgctggacgtgaacgacgacttcagcgaggaggtgaccaagcaggaggacctgatgagagaggtgaacaccttcgtgaagaacctgtag

SEQ ID NO: 78999 - DNA, 720 bp, synthetic construct
  misc_feature 1..720: note = Description of Artificial Sequence: Synthetic coding sequence
  source 1..720: mol_type = other DNA
atggccgccggcagactgttcctgagcagactgagagcccccttcagcagcatggccaagagccccctggagggcgtgagcagcagcagaggcctgcacgccggcagaggccccagaagactgagcatcgagggcaacatcgcctgcaccgcccagagcctgggcaacctgctggacatgatgtacagagagcccgccagatggagctacaccttccagaccttcagcttcctgagcagactgaaggtgcagctggagcccttccccgagaagctgctgcaggccagaaagcccgtgcagatcttcgagagaagcgtgtacagcgacagatacatcttcgccaagaacctgttcgagaacggcagcctgagcgacatcgagtggcacatctaccaggactggcacagcttcctgctgtgggagttcgccagcagaatcaccctgcacggcttcatctacctgcaggccagcccccaggtgtgcctgaagagactgtaccagagagccagagaggaggagaagggcatcgagctggcctacctggagcagctgcacggccagcacgaggcctggctgatccacaagaccaccaagctgcacttcgaggccctgatgaacatccccgtgctggtgctggacgtgaacgacgacttcagcgaggaggtgaccaagcaggaggacctgatgagagaggtgaacaccttcgtgaagaacctgtag

SEQ ID NO: 79000 - DNA, 570 bp, synthetic construct
  misc_feature 1..570: note = Description of Artificial Sequence: Synthetic coding sequence
  source 1..570: mol_type = other DNA
atggccgccggcagactgttcctgagcagactgagagcccccttcagcagcatggccaagagccccctggagggcgtgagcagcagcagaggcctgcacgccggcagaggccccagaagactgagcatcgagggcaacatcgccgtgggcaagagcaccttcgtgaagctgctgaccaagacctaccccgagtggcacgtggccaccgagcccgtggccacctggcagaacatccaggccgccggcacccagaaggcctgcaccgcccagagcctgggcaacctgctggacatgatgtacagagagcccgccagatggagctacaccttccagaccttcagcttcctgagcagactgaaggtgcagctggagcccttccccgagaagctgctgcaggccagaaagcccgtgcagatcttcgagagaagcgtgtacagcgacagactgcacttcgaggccctgatgaacatccccgtgctggtgctggacgtgaacgacgacttcagcgaggaggtgaccaagcaggaggacctgatgagagaggtgaacaccttcgtgaagaacctgtag

SEQ ID NO: 79001 - DNA, 768 bp, synthetic construct
  misc_feature 1..768: note = Description of Artificial Sequence: Synthetic coding sequence
  source 1..768: mol_type = other DNA
atggccgccggcagactgttcctgagcagactgagagcccccttcagcagcatggccaagagccccctggagggcgtgagcagcagcagaggcctgcacgccggcagaggccccagaagactgagcatcgagggcaacatcggcaacatcctgaagcagatcagaatgagagcccccatccaggagaccgcctgcaccgcccagagcctgggcaacctgctggacatgatgtacagagagcccgccagatggagctacaccttccagaccttcagcttcctgagcagactgaaggtgcagctggagcccttccccgagaagctgctgcaggccagaaagcccgtgcagatcttcgagagaagcgtgtacagcgacagatacatcttcgccaagaacctgttcgagaacggcagcctgagcgacatcgagtggcacatctaccaggactggcacagcttcctgctgtgggagttcgccagcagaatcaccctgcacggcttcatctacctgcaggccagcccccaggtgtgcctgaagagactgtaccagagagccagagaggaggagaagggcatcgagctggcctacctggagcagctgcacggccagcacgaggcctggctgatccacaagaccaccaagctgcacttcgaggccctgatgaacatccccgtgctggtgctggacgtgaacgacgacttcagcgaggaggtgaccaagcaggaggacctgatgagagaggtgaacaccttcgtgaagaacctgtag

SEQ ID NO: 79002 - DNA, 1416 bp, synthetic construct
  misc_feature 1..1416: note = Description of Artificial Sequence: Synthetic coding sequence
  source 1..1416: mol_type = other DNA
atggccaagaaggtggccgtgatcggcgccggcgtgagcggcctgatcagcctgaagtgctgcgtggacgagggcctggagcccacctgcttcgagagaaccgaggacatcggcggcgtgtggagattcaaggagaacgtggaggacggcagagccagcatctaccagagcgtggtgaccaacaccagcaaggagatgagctgcttcagcgacttccccatgcccgaggacttccccaacttcctgcacaacagcaagctgctggagtacttcagaatcttcgccaagaagttcgacctgctgaagtacatccagttccagaccaccgtgctgagcgtgagaaagtgccccgacttcagcagcagcggccagtggaaggtggtgacccagagcaacggcaaggagcagagcgccgtgttcgacgccgtgatggtgtgcagcggccaccacatcctgccccacatccccctgaagagcttccccggcatggagagattcaagggccagtacttccacagcagacagtacaagcaccccgacggcttcgagggcaagagaatcctggtgatcggcatgggcaacagcggcagcgacatcgccgtggagctgagcaagaacgccgcccaggtgttcatcagcaccagacacggcacctgggtgatgagcagaatcagcgaggacggctacccctgggacagcgtgttccacaccagattcagaagcatgctgagaaacgtgctgcccagaaccgccgtgaagtggatgatcgagcagcagatgaacagatggttcaaccacgagaactacggcctggagccccagaacaagtacatcatgaaggagcccgtgctgaacgacgacgtgcccagcagactgctgtgcggcgccatcaaggtgaagagcaccgtgaaggagctgaccgagaccagcgccatcttcgaggacggcaccgtggaggagaacatcgacgtgatcatcttcgccaccggctacagcttcagcttccccttcctggaggacagcctggtgaaggtggagaacaacatggtgagcctgtacaagtacatcttccccgcccacctggacaagagcaccctggcctgcatcggcctgatccagcccctgggcagcatcttccccaccgccgagctgcaggccagatgggtgaccagagtgttcaagggcctgtgcagcctgcccagcgagagaaccatgatgatggacatcatcaagagaaacgagaagagaatcgacctgttcggcgagagccagagccagaccctgcagaccaactacgtggactacctggacgagctggccctggagatcggcgccaagcccgacttctgcagcctgctgttcaaggaccccaagctggccgtgagactgtacttcggcccctgcaacagctactag

SEQ ID NO: 79003 - DNA, 969 bp, synthetic construct
  misc_feature 1..969: note = Description of Artificial Sequence: Synthetic coding sequence
  source 1..969: mol_type = other DNA
atggagggcagcctggagagagaggcccccgccggcgccctggccgccgtgctgaagcacagcagcaccctgccccccgagagcacccaggtgagaggctacgacttcaacagaggcgtgaactacagagccctgctggaggccttcggcaccaccggcttccaggccaccaacttcggcagagccgtgcagcaggtgaacgccatgatcgagaagaagctggagcccctgagccaggacgaggaccagcacgccgacctgacccagagcagaagacccctgaccagctgcaccatcttcctgggctacaccagcaacctgatcagcagcggcatcagagagaccatcagatacctggtgcagcacaacatggtggacgtgctggtgaccaccgccggcggcgtggaggaggacctgatcaagtgcctggcccccacctacctgggcgagttcagcctgagaggcaaggagctgagagagaacggcatcaacagaatcggcaacctgctggtgcccaacgagaactactgcaagttcgaggactggctgatgcccatcctggaccagatggtgatggagcagaacaccgagggcgtgaagtggacccccagcaagatgatcgccagactgggcaaggagatcaacaaccccgagagcgtgtactactgggcccagaagaaccacatccccgtgttcagccccgccctgaccgacggcagcctgggcgacatgatcttcttccacagctacaagaaccccggcctggtgctggacatcgtggaggcccaggagttcgacggcagcgacagcggcgccagacccgacgaggccgtgagctggggcaagatcagagtggacgcccagcccgtgaaggtgtacgccgacgccagcctggtgttccccctgctggtggccgagaccttcgcccagaagatggacgccttcatgcacgagaagaacgaggactag

SEQ ID NO: 79004 - DNA, 984 bp, synthetic construct
  misc_feature 1..984: note = Description of Artificial Sequence: Synthetic coding sequence
  source 1..984: mol_type = other DNA
atgcccatcatccccgccttctgggaggccgaggccggcggcagcagagaggaggagttcgagaccagcctggccaacatgatcgagaagaagctggagcccctgagccaggacgaggaccagcacgccgacctgacccagagcagaagacccctgaccagctgcaccatcttcctgggctacaccagcaacctgatcagcagcggcatcagagagaccatcagatacctggtgcagcacaacatggtggacgtgctggtgaccaccgccggcggcgtggaggaggacctgatcaagtgcctggcccccacctacctgggcgagttcagcctgagaggcaaggagctgagagagaacggcatcaacagaatcggcaacctgctggtgcccaacgagaactactgcaagttcgaggactggctgatgcccatcctggaccagatggtgatggagcagaacaccgagggcgtgaagtggacccccagcaagatgatcgccagactgggcaaggagatcaacaaccccgagagcgtgtactactgggcccagaagaaccacatccccgtgttcagccccgccctgaccgacggcagcctgggcgacatgatcttcttccacagctacaagaaccccggcctggtgctggacatcgtggaggacctgagactgatcaacacccaggccatcttcgccaagtgcaccggcatgatcatcctgggcggcggcgtggtgaagcaccacatcgccaacgccaacctgatgagaaacggcgccgactacgccgtgtacatcaacaccgcccaggagttcgacggcagcgacagcggcgccagacccgacgaggccgtgagctggggcaagatcagagtggacgcccagcccgtgaaggtgtacgccgacgccagcctggtgttccccctgctggtggccgagaccttcgcccagaagatggacgccttcatgcacgagaagaacgaggactag

SEQ ID NO: 79005 - DNA, 462 bp, synthetic construct
  misc_feature 1..462: note = Description of Artificial Sequence: Synthetic coding sequence
  source 1..462: mol_type = other DNA
atgccccagctgtgcaccagagccagcagcagcgagatccccggcagactgctgaccaccctgcagagcgcccagggccagaagttcctgcacttcgccaagagcgacagcttcctggacgacatcttcgccgcctggatggcccagagactgaagacccacctgctgaccgagacctggcagagaaagagacaggagctgcccagcaactgcagcctgccctaccacgtgtacaacatcaaggccatcaagctgagcagacacagctacttcagcagctaccaggaccacgccaagtggtgcatcagccagaagggcaccaagaacagatggacctgcatcggcgacctgaacagaagcccccaccaggccttcagaagcggcggcttcatctgcacccagaactggcagatctaccaggccttccagggcctggtgctgtactacgagagctgcaagtag

SEQ ID NO: 79006 - DNA, 1086 bp, synthetic construct
  misc_feature 1..1086: note = Description of Artificial Sequence: Synthetic coding sequence
  source 1..1086: mol_type = other DNA
atgaagcagaagatgatggccagactgctgagaaccagcttcgccctgctgttcctgggcctgttcggcgtgctgggcgccgccaccatcagctgcagaaacgaggagggcaaggccgtggactggttcaccttctacaagctgcccaagagacagaacaaggagagcggcgagaccggcctggagtacctgtacctggacagcaccaccagaagctggagaaagagcgagcagctgatgaacgacaccaagagcgtgctgggcagaaccctgcagcagctgtacgaggcctacgccagcaagagcaacaacaccgcctacctgatctacaacgacggcgtgcccaagcccgtgaactacagcagaaagtacggccacaccaagggcctgctgctgtggaacagagtgcagggcttctggctgatccacagcatcccccagttcccccccatccccgaggagggctacgactacccccccaccggcagaagaaacggccagagcggcatctgcatcaccttcaagtacaaccagtacgaggccatcgacagccagctgctggtgtgcaaccccaacgtgtacagctgcagcatccccgccaccttccaccaggagctgatccacatgccccagctgtgcaccagagccagcagcagcgagatccccggcagactgctgaccaccctgcagagcgcccagggccagaagttcctgcacttcgccaagagcgacagcttcctggacgacatcttcgccgcctggatggcccagagactgaagacccacctgctgaccgagacctggcagagaaagagacaggagctgcccagcaactgcagcctgccctaccacgtgtacaacatcaaggccatcaagctgagcagacacagctacttcagcagctaccaggaccacgccaagtggtgcatcagccagaagggcaccaagaacagatggacctgcatcggcgacctgaacagaagcccccaccaggccttcagaagcggcggcttcatctgcacccagaactggcagatctaccaggccttccagggcctggtgctgtactacgagagctgcaagtag

SEQ ID NO: 79007 - DNA, 1317 bp, synthetic construct
  misc_feature 1..1317: note = Description of Artificial Sequence: Synthetic coding sequence
  source 1..1317: mol_type = other DNA
atggccctgagaggcgtgagcgtgagactgctgagcagaggccccggcctgcacgtgctgagaacctgggtgagcagcgccgcccagaccgagaagggcggcagaacccagagccagctggccaagagcagcagacccgagttcgactggcaggaccccctggtgctggaggagcagctgaccaccgacgagatcctgatcagagacaccttcagaacctactgccaggagagactgatgcccagaatcctgctggccaacagaaacgaggtgttccacagagagatcatcagcgagatgggcgagctgggcgtgctgggccccaccatcaagggctacggctgcgccggcgtgagcagcgtggcctacggcctgctggccagagagctggagagagtggacagcggctacagaagcgccatgagcgtgcagagcagcctggtgatgcaccccatctacgcctacggcagcgaggagcagagacagaagtacctgccccagctggccaagggcgagctgctgggctgcttcggcctgaccgagcccaacagcggcagcgaccccagcagcatggagaccagagcccactacaacagcagcaacaagagctacaccctgaacggcaccaagacctggatcaccaacagccccatggccgacctgttcgtggtgtgggccagatgcgaggacggctgcatcagaggcttcctgctggagaagggcatgagaggcctgagcgcccccagaatccagggcaagttcagcctgagagccagcgccaccggcatgatcatcatggacggcgtggaggtgcccgaggagaacgtgctgcccggcgccagcagcctgggcggccccttcggctgcctgaacaacgccagatacggcatcgcctggggcgtgctgggcgccagcgagttctgcctgcacaccgccagacagtacgccctggacagaatgcagttcggcgtgcccctggccagaaaccagctgatccagaagaagctggccgacatgctgaccgagatcaccctgggcctgcacgcctgcctgcagctgggcagactgaaggaccaggacaaggccgcccccgagatggtgagcctgctgaagagaaacaactgcggcaaggccctggacatcgccagacaggccagagacatgctgggcggcaacggcatcagcgacgagtaccacgtgatcagacacgccatgaacctggaggccgtgaacacctacgagggcacccacgacatccacgccctgatcctgggcagagccatcaccggcatccaggccttcaccgccagcaagtag

SEQ ID NO: 79008 - DNA, 918 bp, synthetic construct
  misc_feature 1..918: note = Description of Artificial Sequence: Synthetic coding sequence
  source 1..918: mol_type = other DNA
atgatccccctgctgctggccgccctgctgtgcgtgcccgccggcgccctgacctgctacggcgacagcggccagcccgtggactggttcgtggtgtacaagctgcccgccctgagaggcagcggcgaggccgcccagagaggcctgcagtacaagtacctggacgagagcagcggcggctggagagacggcagagccctgatcaacagccccgagggcgccgtgggcagaagcctgcagcccctgtacagaagcaacaccagccagctggccttcctgctgtacaacgaccagcccccccagcccagcaaggcccaggacagcagcatgagaggccacaccaagggcaagcagctgacctacacctacccctgggtgtacaactaccagctggagggcatcttcgcccaggagttccccgacctggagaacgtggtgaagggccaccacgtgagccaggagccctggaacagcagcatcaccctgaccagccaggccggcgccgtgttccagagcttcgccaagttcagcaagttcggcgacgacctgtacagcggctggctggccgccgccctgggcaccaacctgcaggtgcagttctggcacaagaccgtgggcatcctgcccagcaactgcagcgacatctggcaggtgctgaacgtgaaccagatcgccttccccggccccgccggccccagcttcaacagcaccgaggaccacagcaagtggtgcgtgagccccaagggcccctggacctgcgtgggcgacatgaacagaaaccagggcgaggagcagagaggcggcggcaccctgtgcgcccagctgcccgccctgtggaaggccttccagcccctggtgaagaactaccagccctgcaacggcatggccagaaagcccagcagagcctacaagatctag

SEQ ID NO: 79009 - DNA, 909 bp, synthetic construct
  misc_feature 1..909: note = Description of Artificial Sequence: Synthetic coding sequence
  source 1..909: mol_type = other DNA
atgcactaccccaccgccctgctgttcctgatcctggccaacggcgcccaggccttcagaatctgcgccttcaacgcccagagactgaccctggccaaggtggccagagagcaggtgatggacaccctggtgagaatcctggccagatgcgacatcatggtgctgcaggaggtggtggacagcagcggcagcgccatccccctgctgctgagagagctgaacagattcgacggcagcggcccctacagcaccctgagcagcccccagctgggcagaagcacctacatggagacctacgtgtacttctacagaagccacaagacccaggtgctgagcagctacgtgtacaacgacgaggacgacgtgttcgccagagagcccttcgtggcccagttcagcctgcccagcaacgtgctgcccagcctggtgctggtgcccctgcacaccacccccaaggccgtggagaaggagctgaacgccctgtacgacgtgttcctggaggtgagccagcactggcagagcaaggacgtgatcctgctgggcgacttcaacgccgactgcgccagcctgaccaagaagagactggacaagctggagctgagaaccgagcccggcttccactgggtgatcgccgacggcgaggacaccaccgtgagagccagcacccactgcacctacgacagagtggtgctgcacggcgagagatgcagaagcctgctgcacaccgccgccgccttcgacttccccaccagcttccagctgaccgaggaggaggccctgaacatcagcgaccactaccccgtggaggtggagctgaagctgagccaggcccacagcgtgcagcccctgagcctgaccgtgctgctgctgctgagcctgctgagcccccagctgtgccccgccgcctag

SEQ ID NO: 79010 - DNA, 909 bp, synthetic construct; identical to SEQ ID NO: 79009
  misc_feature 1..909: note = Description of Artificial Sequence: Synthetic coding sequence
  source 1..909: mol_type = other DNA

SEQ ID NO: 79011 - DNA, 909 bp, synthetic construct; identical to SEQ ID NO: 79009
  misc_feature 1..909: note = Description of Artificial Sequence: Synthetic coding sequence
  source 1..909: mol_type = other DNA

SEQ ID NO: 79012 - DNA, 909 bp, synthetic construct; identical to SEQ ID NO: 79009
  misc_feature 1..909: note = Description of Artificial Sequence: Synthetic coding sequence
  source 1..909: mol_type = other DNA

SEQ ID NO: 79013 - DNA, 909 bp, synthetic construct; identical to SEQ ID NO: 79009
  misc_feature 1..909: note = Description of Artificial Sequence: Synthetic coding sequence
  source 1..909: mol_type = other DNA

SEQ ID NO: 79014 - DNA, 909 bp, synthetic construct; identical to SEQ ID NO: 79009
  misc_feature 1..909: note = Description of Artificial Sequence: Synthetic coding sequence
  source 1..909: mol_type = other DNA

SEQ ID NO: 79015 - DNA, 315 bp, synthetic construct
  misc_feature 1..315: note = Description of Artificial Sequence: Synthetic coding sequence
  source 1..315: mol_type = other DNA
atgcactaccccaccgccctgctgttcctgatcctggccaacggcgcccaggccttcagaatctgcgccttcaacgcccagagactgaccctggccaaggtggccagagagcaggtgatggacaccctggtgagaatcctggccagatgcgacatcatggtgctgcaggaggtggtggacagcagcggcagcgccatccccctgctgctgagagagctgaacagattcgacggcagcggcccctacagcaccctgagcagcccccagctgggcagaagcacctacatggagacctacgtgtacttctacagatag

SEQ ID NO: 79016 - DNA, 81 bp, synthetic construct
  misc_feature 1..81: note = Description of Artificial Sequence: Synthetic coding sequence
  source 1..81: mol_type = other DNA
atgcactaccccaccgccctgctgttcctgatcctggccaacggcgcccaggccttcagaatctgcgccttcaacgcctag

SEQ ID NO: 79017 - DNA, 627 bp, synthetic construct
  misc_feature 1..627: note = Description of Artificial Sequence: Synthetic coding sequence
  source 1..627: mol_type = other DNA
atgcactaccccaccgccctgctgttcctgatcctggccaacggcgcccaggccttcagaatctgcgccttcaacgcccagagactgaccctggccaaggtggccagagagcaggtgatggacaccctggtgagaatcctggccagatgcgacatcatggtgctgcaggaggtggtggacagcagcggcagcgccatccccctgctgctgagagagctgaacagattcgacggcagcggcccctacagcaccctgagcagcccccagctgggcagaagcacctacatggagacctacgtgtacttctacagaagccacaagacccaggtgctgagcagctacgtgtacaacgacgaggacgacgtgttcgccagagagcccttcgtggcccagttcagcctgcccagcaacgtgctgcccagcctggtgctggtgcccctgcacaccacccccaaggccgtggagaaggagctgaacgccctgtacgacgtgttcctggaggtgagccagcactggcagagcaaggacgtgatcctgctgggcgacttcaacgccgactgcgccagcctgaccaagaagagactggacaagctggagctgagaaccgagcccggcttccactggtag

SEQ ID NO: 79018 - DNA, 918 bp, synthetic construct
  misc_feature 1..918: note = Description of Artificial Sequence: Synthetic coding sequence
  source 1..918: mol_type = other DNA
atgagcagagagctggcccccctgctgctgctgctgctgagcatccacagcgccctggccatgagaatctgcagcttcaacgtgagaagcttcggcgagagcaagcaggaggacaagaacgccatggacgtgatcgtgaaggtgatcaagagatgcgacatcatcctggtgatggagatcaaggacagcaacaacagaatctgccccatcctgatggagaagctgaacagaaacagcagaagaggcatcacctacaactacgtgatcagcagcagactgggcagaaacacctacaaggagcagtacgccttcctgtacaaggagaagctggtgagcgtgaagagaagctaccactaccacgactaccaggacggcgacgccgacgtgttcagcagagagcccttcgtggtgtggttccagagcccccacaccgccgtgaaggacttcgtgatcatccccctgcacaccacccccgagaccagcgtgaaggagatcgacgagctggtggaggtgtacaccgacgtgaagcacagatggaaggccgagaacttcatcttcatgggcgacttcaacgccggctgcagctacgtgcccaagaaggcctggaagaacatcagactgagaaccgaccccagattcgtgtggctgatcggcgaccaggaggacaccaccgtgaagaagagcaccaactgcgcctacgacagaatcgtgctgagaggccaggagatcgtgagcagcgtggtgcccaagagcaacagcgtgttcgacttccagaaggcctacaagctgaccgaggaggaggccctggacgtgagcgaccacttccccgtggagttcaagctgcagagcagcagagccttcaccaacagcaagaagagcgtgaccctgagaaagaagaccaagagcaagagaagctag

SEQ ID NO: 79019 - DNA, 918 bp, synthetic construct; identical to SEQ ID NO: 79018
  misc_feature 1..918: note = Description of Artificial Sequence: Synthetic coding sequence
  source 1..918: mol_type = other DNA

SEQ ID NO: 79020 - DNA, 867 bp, synthetic construct
  misc_feature 1..867: note = Description of Artificial Sequence: Synthetic coding sequence
  source 1..867: mol_type = other DNA
atgagcagagagctggcccccctgctgctgctgctgctgagcatccacagcgccctggccatgagaatctgcagcttcaacgtgagaagcttcggcgagagcaagcaggaggacaagaacgccatggacgtgatcgtgaaggtgatcaagagatgcgacatcatcctggtgatggagatcaaggacagcaacaacagaatctgccccatcctgatggagaagctgaacagaaacagcagaagaggcatcacctacaactacgtgatcagcagcagactgggcagaaacacctacaaggagcagtacgccttcctgtacaaggagaagctggtgagcgtgaagagaagctaccactaccacgactaccaggacggcgacgccgacgtgttcagcagagagcccttcgtggtgtggttccagagcccccacaccgccgtgaaggacttcgtgatcatccccctgcacaccacccccgagaccagcgtgaaggagatcgacgagctggtggaggtgtacaccgacgtgaagcacagatggaaggccgagaacttcatcttcatgggcgacttcaacgccggctgcagctacgtgcccaagaaggcctggaagaacatcagactgagaaccgaccccagattcgtgtggctgatcggcgaccaggaggacaccaccgtgaagaagagcaccaactgcgcctacgacagaatcgtgctgagaggccaggagatcgtgagcagcgtggtgcccaagagcaacagcgtgttcgacttccagaaggcctacaagctgaccgaggaggaggtgagactgcccagctgcctgagcatgcccctgagctggaaggacgagctggcctgggccacctag

SEQ ID NO: 79021 - DNA, 303 bp, synthetic construct
  misc_feature 1..303: note = Description of Artificial Sequence: Synthetic coding sequence
  source 1..303: mol_type = other DNA
atgagcagagagctggcccccctgctgctgctgctgctgagcatccacagcgccctggccatgagaatctgcagcttcaacgtgagaagcttcggcgagagcaagcaggaggacaagaacgccatggacgtgatcgtgaaggtgatcaagagatgcgacatcatcctggtgatggagatcaaggacagcaacaacagaatctgccccatcctgatggagaagctgaacagaaacagcagaagaggcatcacctacaactacgtgatcagcagcagactgggcagaaacacctacaaggagtag

SEQ ID NO: 79022 - DNA, 828 bp, synthetic construct
  misc_feature 1..828: note = Description of Artificial Sequence: Synthetic coding sequence
  source 1..828: mol_type = other DNA
atgagcagagagctggcccccctgctgctgctgctgctgagcatccacagcgccctggccatgagaatctgcagcttcaacgtgagaagcttcggcgagagcaagcaggaggacaagaacgccatggacgtgatcgtgaaggtgatcaagagatgcgacatcatcctggtgatggagatcaaggacagcaacaacagaatctgccccatcctgatggagaagctgaacagagagaagctggtgagcgtgaagagaagctaccactaccacgactaccaggacggcgacgccgacgtgttcagcagagagcccttcgtggtgtggttccagagcccccacaccgccgtgaaggacttcgtgatcatccccctgcacaccacccccgagaccagcgtgaaggagatcgacgagctggtggaggtgtacaccgacgtgaagcacagatggaaggccgagaacttcatcttcatgggcgacttcaacgccggctgcagctacgtgcccaagaaggcctggaagaacatcagactgagaaccgaccccagattcgtgtggctgatcggcgaccaggaggacaccaccgtgaagaagagcaccaactgcgcctacgacagaatcgtgctgagaggccaggagatcgtgagcagcgtggtgcccaagagcaacagcgtgttcgacttccagaaggcctacaagctgaccgaggaggaggccctggacgtgagcgaccacttccccgtggagttcaagctgcagagcagcagagccttcaccaacagcaagaagagcgtgaccctgagaaagaagaccaagagcaagagaagctag

SEQ ID NO: 79023 - DNA, 753 bp, synthetic construct
  misc_feature 1..753: note = Description of Artificial Sequence: Synthetic coding sequence
  source 1..753: mol_type = other DNA
atgacccccctgtgccccagacccgccctgtgctaccacttcctgaccagcctgctgagaagcgccatgcagaacgccagaaccgccgagggcagaagcagaggcaccctgagagccagacccgcccccagacccgccgcccagcacggcatccccagacccctgagcagcgccggcagactgagccagggctgcagaggcgccagcaccgtgggcgccgccggctggaagggcgagctgcccaaggccggcggcagccccgcccccggccccgagacccccgccatcagccccagcaagagagccagacccgccgaggtgggcggcatgcagctgagattcgccagactgagcgagcacgccaccgcccccaccagaggcagcgccagagccgccggctacgacctgtacagcgcctacgactacaccatcccccccatggagaaggccgtggtgaagaccgacatccagatcgccctgcccagcggctgctacggcagagtggcccccagaagcggcctggccgccaagcacttcatcgacgtgggcgccggcgtgatcgacgaggactacagaggcaacgtgggcgtggtgctgttcaacttcggcaaggagaagttcgaggtgaagaagggcgacagaatcgcccagctgatctgcgagagaatcttctaccccgagatcgaggaggtgcaggccctggacgacaccgagagaggcagcggcggcttcggcagcaccggcaagaactag

SEQ ID NO: 79024 - DNA, 759 bp, synthetic construct
  misc_feature 1..759: note = Description of Artificial Sequence: Synthetic coding sequence
  source 1..759: mol_type = other DNA
atgacccccctgtgccccagacccgccctgtgctaccacttcctgaccagcctgctgagaagcgccatgcagaacgccagaggcgccagacagagagccgaggccgccgtgctgagcggccccggcccccccctgggcagagccgcccagcacggcatccccagacccctgagcagcgccggcagactgagccagggctgcagaggcgccagcaccgtgggcgccgccggctggaagggcgagctgcccaaggccggcggcagccccgcccccggccccgagacccccgccatcagccccagcaagagagccagacccgccgaggtgggcggcatgcagctgagattcgccagactgagcgagcacgccaccgcccccaccagaggcagcgccagagccgccggctacgacctgtacagcgcctacgactacaccatcccccccatggagaaggccgtggtgaagaccgacatccagatcgccctgcccagcggctgctacggcagagtggcccccagaagcggcctggccgccaagcacttcatcgacgtgggcgccggcgtgatcgacgaggactacagaggcaacgtgggcgtggtgctgttcaacttcggcaaggagaagttcgaggtgaagaagggcgacagaatcgcccagctgatctgcgagagaatcttctaccccgagatcgaggaggtgcaggccctggacgacaccgagagaggcagcggcggcttcggcagcaccggcaagaactag

SEQ ID NO: 79025 - DNA, 495 bp, synthetic construct
  misc_feature 1..495: note = Description of Artificial Sequence: Synthetic coding sequence
  source 1..495: mol_type = other DNA
atgccctgcagcgaggagacccccgccatcagccccagcaagagagccagacccgccgaggtgggcggcatgcagctgagattcgccagactgagcgagcacgccaccgcccccaccagaggcagcgccagagccgccggctacgacctgtacagcgcctacgactacaccatcccccccatggagaaggccgtggtgaagaccgacatccagatcgccctgcccagcggctgctacggcagagtggcccccagaagcggcctggccgccaagcacttcatcgacgtgggcgccggcgtgatcgacgaggactacagaggcaacgtgggcgtggtgctgttcaacttcggcaaggagaagttcgaggtgaagaagggcgacagaatcgcccagctgatctgcgagagaatcttctaccccgagatcgaggaggtgcaggccctggacgacaccgagagaggcagcggcggcttcggcagcaccggcaagaactag

SEQ ID NO: 79026 - DNA, 426 bp, synthetic construct
  misc_feature 1..426: note = Description of Artificial Sequence: Synthetic coding sequence
  source 1..426: mol_type = other DNA
atgcagctgagattcgccagactgagcgagcacgccaccgcccccaccagaggcagcgccagagccgccggctacgacctgtacagcgcctacgactacaccatcccccccatggagaaggccgtggtgaagaccgacatccagatcgccctgcccagcggctgctacggcagagtggcccccagaagcggcctggccgccaagcacttcatcgacgtgggcgccggcgtgatcgacgaggactacagaggcaacgtgggcgtggtgctgttcaacttcggcaaggagaagttcgaggtgaagaagggcgacagaatcgcccagctgatctgcgagagaatcttctaccccgagatcgaggaggtgcaggccctggacgacaccgagagaggcagcggcggcttcggcagcaccggcaagaactag

SEQ ID NO: 79027 - DNA, 1056 bp, synthetic construct
  misc_feature 1..1056: note = Description of Artificial Sequence: Synthetic coding sequence
  source 1..1056: mol_type = other DNA
atgcccctgagaaagcacagacagcacttcaagaagtacggcaactgcttcaccgccggcgaggccgtggactggctgtacgacctgctgagaaacaacagcaacttcggccccgaggtgaccagacagcagaccatccagctgctgagaaagttcctgaagaaccacgtgatcgaggacatcaagggcagatggggcagcgagaacgtggacgacaacaaccagctgttcagattccccgccaccagccccctgaagaccctgcccagaagaacccccaagagacacggcctgcacctgagccaggagaacggcgagaagatcaagcacgagatcatcaacgaggaccaggagaacgccatcgacaacagagagctgagccaggaggacgtggaggaggtgtggagatacgtgatcctgatctacctgcagaccatcctgggcgtgcccagcctggaggaggtgatcaaccccaagcaggtgatcccccagtacatcatgtacaacatggccaacaccagcaagagaggcgtggtgatcctgcagaacaagagcgacgacctgccccactgggtgctgagcgccatgaagtgcctggccaactggcccagaagcaacgacatgaacaaccccacctacgtgggcttcgagagagacgtgttcagaaccatcgccgactacttcctggacctgcccgagcccctgctgaccttcgagtactacgagctgttcgtgaacatcctgggcaacttcaaggacttcagaagcagcatccccgtggtgtgcggctacatcaccgtgagcgacagaagcagcggcatccacaagatccaggacgacccccagagcagcaagttcctgcacctgaacaacctgaacagcttcaagagcaccgagtgcctgctgctgagcctgctgcacagagagaagaacaaggaggagagcgacagcaccgagagactgcagatcagcaaccccggcttccaggagagatgcgccaagaagatgcagctggtgaacctgagaaacagaagagcctgctgcaacctgatctag

SEQ ID NO: 79028 - DNA, 1584 bp, synthetic construct
  misc_feature 1..1584: note = Description of Artificial Sequence: Synthetic coding sequence
  source 1..1584: mol_type = other DNA
atggagagccagggcgtgccccccggcccctacagagccaccaagctgtggaacgaggtgaccaccagcttcagagccggcatgcccctgagaaagcacagacagcacttcaagaagtacggcaactgcttcaccgccggcgaggccgtggactggctgtacgacctgctgagaaacaacagcaacttcggccccgaggtgaccagacagcagaccatccagctgctgagaaagttcctgaagaaccacgtgatcgaggacatcaagggcagatggggcagcgagaacgtggacgacaacaaccagctgttcagattccccgccaccagccccctgaagaccctgcccagaagataccccgagctgagaaagaacaacatcgagaacttcagcaaggacaaggacagcatcttcaagctgagaaacctgagcagaagaacccccaagagacacggcctgcacctgagccaggagaacggcgagaagatcaagcacgagatcatcaacgaggaccaggagaacgccatcgacaacagagagctgagccaggaggacgtggaggaggtgtggagatacgtgatcctgatctacctgcagaccatcctgggcgtgcccagcctggaggaggtgatcaaccccaagcaggtgatcccccagtacatcatgtacaacatggccaacaccagcaagagaggcgtggtgatcctgcagaacaagagcgacgacctgccccactgggtgctgagcgccatgaagtgcctggccaactggcccagaagcaacgacatgaacaaccccacctacgtgggcttcgagagagacgtgttcagaaccatcgccgactacttcctggacctgcccgagcccctgctgaccttcgagtactacgagctgttcgtgaacatcctgggcctgctgcagccccacctggagagagtggccatcgacgccctgcagctgtgctgcctgctgctgcccccccccaacagaagaaagctgcagctgctgatgagaatgatcagcagaatgagccagaacgtggacatgcccaagctgcacgacgccatgggcaccagaagcctgatgatccacaccttcagcagatgcgtgctgtgctgcgccgaggaggtggacctggacgagctgctggccggcagactggtgagcttcctgatggaccaccaccaggagatcctgcaggtgcccagctacctgcagaccgccgtggagaagcacctggactacctgaagaagggccacatcgagaaccccggcgacggcctgttcgcccccctgcccacctacagctactgcaagcagatcagcgcccaggagttcgacgagcagaaggtgagcaccagccaggccgccatcgccgagctgctggagaacatcatcaagaacagaagcctgcccctgaaggagaagagaaagaagctgaagcagttccagaaggagtaccccctgatctaccagaagagattccccaccaccgagagcgaggccgccctgttcggcgacaagcccaccatcaagcagcccatgctgatcctgagaaagcccaagttcagaagcctgagatag

SEQ ID NO: 79029 - DNA, 2436 bp, synthetic construct
  misc_feature 1..2436: note = Description of Artificial Sequence: Synthetic coding sequence
  source 1..2436: mol_type = other DNA
atggagagccagggcgtgccccccggcccctacagagccaccaagctgtggaacgaggtgaccaccagcttcagagccggcatgcccctgagaaagcacagacagcacttcaagaagtacggcaactgcttcaccgccggcgaggccgtggactggctgtacgacctgctgagaaacaacagcaacttcggccccgaggtgaccagacagcagaccatccagctgctgagaaagttcctgaagaaccacgtgatcgaggacatcaagggcagatggggcagcgagaacgtggacgacaacaaccagctgttcagattccccgccaccagccccctgaagaccctgcccagaagataccccgagctgagaaagaacaacatcgagaacttcagcaaggacaaggacagcatcttcaagctgagaaacctgagcagaagaacccccaagagacacggcctgcacctgagccaggagaacggcgagaagatcaagcacgagatcatcaacgaggaccaggagaacgccatcgacaacagagagctgagccaggaggacgtggaggaggtgtggagatacgtgatcctgatctacctgcagaccatcctgggcgtgcccagcctggaggaggtgatcaaccccaagcaggtgatcccccagtacatcatgtacaacatggccaacaccagcaagagaggcgtggtgatcctgcagaacaagagcgacgacctgccccactgggtgctgagcgccatgaagtgcctggccaactggcccagaagcaacgacatgaacaaccccacctacgtgggcttcgagagagacgtgttcagaaccatcgccgactacttcctggacctgcccgagcccctgctgaccttcgagtactacgagctgttcgtgaacatcctggtggtgtgcggctacatcaccgtgagcgacagaagcagcggcatccacaagatccaggacgacccccagagcagcaagttcctgcacctgaacaacctgaacagcttcaagagcaccgagtgcctgctgctgagcctgctgcacagagagaagaacaaggaggagagcgacagcaccgagagactgcagatcagcaaccccggcttccaggagagatgcgccaagaagatgcagctggtgaacctgagaaacagaagagtgagcgccaacgacatcatgggcggcagctgccacaacctgatcggcctgagcaacatgcacgacctgagcagcaacagcaagcccagatgctgcagcctggagggcatcgtggacgtgcccggcaacagcagcaaggaggccagcagcgtgttccaccagagcttccccaacatcgagggccagaacaacaagctgttcctggagagcaagcccaagcaggagttcctgctgaacctgcacagcgaggagaacatccagaagcccttcagcgccggcttcaagagaaccagcaccctgaccgtgcaggaccaggaggagctgtgcaacggcaagtgcaagagcaagcagctgtgcagaagccagagcctgctgctgagaagcagcaccagaagaaacagctacatcaacacccccgtggccgagatcatcatgaagcccaacgtgggccagggcagcaccagcgtgcagaccgccatggagagcgagctgggcgagagcagcgccaccatcaacaagagactgtgcaagagcaccatcgagctgagcgagaacagcctgctgcccgccagcagcatgctgaccggcacccagagcctgctgcagccccacctggagagagtggccatcgacgccctgcagctgtgctgcctgctgctgcccccccccaacagaagaaagctgcagctgctgatgagaatgatcagcagaatgagccagaacgtggacatgcccaagctgcacgacgccatgggcaccagaagcctgatgatccacaccttcagcagatgcgtgctgtgctgcgccgaggaggtggacctggacgagctgctggccggcagactggtgagcttcctgatggaccaccaccaggagatcctgcaggtgcccagctacctgcagaccgccgtggagaagcacctggactacctgaagaagggccacatcgagaaccccggcgacggcctgttcgcccccctgcccacctacagctactgcaagcagatcagcgcccaggagttcgacgagcagaaggtgagcaccagccaggccgccatcgccgagctgctggagaacatcatcaagaacagaagcctgcccctgaaggagaagagaaagaagctgaagcagttccagaaggagtaccccctgatctaccagaagagattccccaccaccgagagcgaggccgccctgttcggcgacaagcccaccatcaagcagcccatgctgatcctgagaaagcccaagttcagaagcctgagatag

SEQ ID NO: 79030 - DNA, 1590 bp, synthetic construct
  misc_feature 1..1590: note = Description of Artificial Sequence: Synthetic coding sequence
  source 1..1590: mol_type = other DNA
atggagcacagaatcgtgggccccggcccctacagagccaccagactgtggaacgagaccgtggagctgttcagagccaagatgcccctgagaaagcacagatgcagattcaagagctacgagcactgcttcaccgccgccgaggccgtggactggctgcacgagctgctgagatgcagccagaacttcggccccgaggtgaccagaaagcagaccgtgcagctgctgaagaagttcctgaagaaccacgtgatcgaggacatcaagggcaagtggggcgaggaggacttcgaggacaacagacacctgtacagattcccccccagcagccccctgaagccctaccccaagaagccccccaaccagaaggacgtgatcaagttccccgagtggaacgacctgccccccggcaccagccaggagaacatccccgtgagacccgtggtgatgaacagcgagatgtggtacaagagacacagcatcgccatcggcgaggtgcccgcctgcagactggtgcacagaagacagctgaccgaggccaacgtggaggagatctggaagagcatgaccctgagctacctgcagaagatcctgggcctggacagcctggaggaggtgctggacgtgaagctggtgaacagcaagttcatcatccacaacgtgtacagcgtgagcaagcagggcgtggtgatcctggacgacaagagcaaggagctgccccactgggtgctgagcgccatgaagtgcctggccaactggcccaactgcagcgacctgaagcagcccatgtacctgggcttcgagaaggacgtgttcaagaccatcgccgactactacggccacctgaaggagcccctgctgaccttccacctgttcgacgccttcgtgagcgtgctgggcctgctgcagaaggagaaggtggccgtggaggccttccagatctgctgcctgctgctgccccccgagaacagaagaaagctgcagctgctgatgagaatgatggccagaatctgcctgaacaaggagatgccccccctgtgcgacggcttcggcaccagaaccctgatggtgcagaccttcagcagatgcatcctgtgcagcaaggacgaggtggacctggacgagctgctggccgccagactggtgaccttcctgatggacaactaccaggagatcctgaaggtgcccctggccctgcagaccagcatcgaggagagagtggcccacctgagaagagtgcagatcaagtaccccggcgccgacatggacatcaccctgagcgcccccagcttctgcagacagatcagccccgaggagttcgagtaccagagaagctacggcagccaggagcccctggccgccctgctggaggaggtgatcaccgacgccaagctgagcaacaaggagaagaagaagaagctgaagcagttccagaagagctaccccgaggtgtaccaggagagattccccacccccgagagcgccgccctgctgttccccgagaagcccaagcccaagccccagctgctgatgtgggccctgaagaagcccttccagcccttccagagaaccagaagcttcagaatgtag

SEQ ID NO: 79031 - DNA, 1404 bp, synthetic construct
  misc_feature 1..1404: note = Description of Artificial Sequence: Synthetic coding sequence
  source 1..1404: mol_type = other DNA
atggagcacagaatcgtgggccccggcccctacagagccaccagactgtggaacgagaccgtggagctgttcagagccaagatgcccctgagaaagcacagatgcagattcaagagctacgagcactgcttcaccgccgccgaggccgtggactggctgcacgagctgctgagatgcagccagaacttcggccccgaggtgaccagaaagcagaccgtgcagctgctgaagaagttcctgaagaaccacgtgatcgaggacatcaagggcaagtggggcgaggaggacttcgaggacaacagacacctgtacagattcccccccagcagccccctgaagccctaccccaagaagccccccaaccagaaggacgtgatcaagttccccgagtggaacgacctgccccccggcaccagccaggagaacatccccgtgagacccgtggtgatgaacagcgagatgtggtacaagagacacagcatcgccatcggcgaggtgcccgcctgcagactggtgcacagaagacagctgaccgaggccaacgtggaggagatctggaagagcatgaccctgagctacctgcagaagatcctgggcctggacagcctggaggaggtgctggacgtgaagctggtgaacagcaagttcatcatccacaacgtgtacagcgtgagcaagcagggcgtggtgatcctggacgacaagagcaaggagctgccccactgggtgctgagcgccatgaagtgcctggccaactggcccaactgcagcgacctgaagcagcccatgtacctgggcttcgagaaggacgtgttcaagaccatcgccgactactacggccacctgaaggagcccctgctgaccttccacctgttcgacgccttcgtgagcgtgctgggcctgctgcagaaggagaaggtggccgtggaggccttccagatctgctgcctgctgctgccccccgagaacagaagaaagctgcagctgctgatgagaatgatggccagaatctgcctgaacaaggagatgccccccctgtgcgacggcttcggcaccagaaccctgatggtgcagaccttcagcagatgcatcctgtgcagcaaggacgaggtggacctggacgagctgctggccgccagactggtgaccttcctgatggacaactaccaggagatcctgaaggtgcccctggccctgcagaccagcatcgaggagagagtggcccacctgagaagagtgcagttccagaagagctaccccgaggtgtaccaggagagattccccacccccgagagcgccgccctgctgttccccgagaagcccaagcccaagccccagctgctgatgtgggccctgaagaagcccttccagcccttccagagaaccagaagcttcagaatgtag

SEQ ID NO: 79032 - DNA, 1323 bp, synthetic construct
  misc_feature 1..1323: note = Description of Artificial Sequence: Synthetic coding sequence
  source 1..1323: mol_type = other DNA
atgcccctgagaaagcacagatgcagattcaagagctacgagcactgcttcaccgccgccgaggccgtggactggctgcacgagctgctgagatgcagccagaacttcggccccgaggtgaccagaaagcagaccgtgcagctgctgaagaagttcctgaagaaccacgtgatcgaggacatcaagggcaagtggggcgaggaggacttcgaggacaacagacacctgtacagattcccccccagcagccccctgaagccctaccccaagaagccccccaaccagaaggacgtgatcaagttccccgagtggaacgacctgccccccggcaccagccaggagaacatccccgtgagacccgtggtgatgaacagcgagatgtggtacaagagacacagcatcgccatcggcgaggtgcccgcctgcagactggtgcacagaagacagctgaccgaggccaacgtggaggagatctggaagagcatgaccctgagctacctgcagaagatcctgggcctggacagcctggaggaggtgctggacgtgaagctggtgaacagcaagttcatcatccacaacgtgtacagcgtgagcaagcagggcgtggtgatcctggacgacaagagcaaggagctgccccactgggtgctgagcgccatgaagtgcctggccaactggcccaactgcagcgacctgaagcagcccatgtacctgggcttcgagaaggacgtgttcaagaccatcgccgactactacggccacctgaaggagcccctgctgaccttccacctgttcgacgccttcgtgagcgtgctgggcctgctgcagaaggagaaggtggccgtggaggccttccagatctgctgcctgctgctgccccccgagaacagaagaaagctgcagctgctgatgagaatgatggccagaatctgcctgaacaaggagatgccccccctgtgcgacggcttcggcaccagaaccctgatggtgcagaccttcagcagatgcatcctgtgcagcaaggacgaggtggacctggacgagctgctggccgccagactggtgaccttcctgatggacaactaccaggagatcctgaaggtgcccctggccctgcagaccagcatcgaggagagagtggcccacctgagaagagtgcagttccagaagagctaccccgaggtgtaccaggagagattccccacccccgagagcgccgccctgctgttccccgagaagcccaagcccaagccccagctgctgatgtgggccctgaagaagcccttccagcccttccagagaaccagaagcttcagaatgtag

SEQ ID NO: 79033 - DNA, 4746 bp, synthetic construct
  misc_feature 1..4746: note = Description of Artificial Sequence: Synthetic coding sequence
  source 1..4746: mol_type = other DNA
atgagaaccaccaaggtgtacaagctggtgatccacaagaagggcttcggcggcagcgacgacgagctggtggtgaaccccaaggtgttcccccacatcaagctgggcgacatcgtggagatcgcccaccccaacgacgagtacagccccctgctgctgcaggtgaagagcctgaaggaggacctgcagaaggagaccatcagcgtggaccagaccgtgacccaggtgttcagactgagaccctaccaggacgtgtacgtgaacgtggtggaccccaaggacgtgaccctggacctggtggagctgaccttcaaggaccagtacatcggcagaggcgacatgtggagactgaagaagagcctggtgagcacctgcgcctacatcacccagaaggtggagttcgccggcatcagagcccaggccggcgagctgtgggtgaagaacgagaaggtgatgtgcggctacatcagcgaggacaccagagtggtgttcagaagcaccagcgccatggtgtacatcttcatccagatgagctgcgagatgtgggacttcgacatctacggcgacctgtacttcgagaaggccgtgaacggcttcctggccgacctgttcaccaagtggaaggagaagaactgcagccacgaggtgaccgtggtgctgttcagcagaaccttctacgacgccaagagcgtggacgagttccccgagatcaacagagccagcatcagacaggaccacaagggcagattctacgaggacttctacaaggtggtggtgcagaacgagagaagagaggagtggaccagcctgctggtgaccatcaagaagctgttcatccagtaccccgtgctggtgagactggagcaggccgagggcttcccccagggcgacaacagcaccagcgcccagggcaactacctggaggccatcaacctgagcttcaacgtgttcgacaagcactacatcaacagaaacttcgacagaaccggccagatgagcgtggtgatcacccccggcgtgggcgtgttcgaggtggacagactgctgatgatcctgaccaagcagagaatgatcgacaacggcatcggcgtggacctggtgtgcatgggcgagcagcccctgcacgccgtgcccctgttcaagctgcacaacagaagcgcccccagagacagcagactgggcgacgactacaacatcccccactggatcaaccacagcttctacaccagcaagagccagctgttctgcaacagcttcacccccagaatcaagctggccggcaagaagcccgccagcgagaaggccaagaacggcagagacaccagcctgggcagccccaaggagagcgagaacgccctgcccatccaggtggactacgacgcctacgacgcccaggtgttcagactgcccggccccagcagagcccagtgcctgaccacctgcagaagcgtgagagagagagagagccacagcagaaagagcgccagcagctgcgacgtgagcagcagccccagcctgcccagcagaaccctgcccaccgaggaggtgagaagccaggccagcgacgacagcagcctgggcaagagcgccaacatcctgatgatcccccacccccacctgcaccagtacgaggtgagcagcagcctgggctacaccagcaccagagacgtgctggagaacatgatggagcccccccagagagacagcagcgcccccggcagattccacgtgggcagcgccgagagcatgctgcacgtgagacccggcggctacaccccccagagagccctgatcaaccccttcgcccccagcagaatgcccatgaagctgaccagcaacagaagaagatggatgcacaccttccccgtgggccccagcggcgaggccatccagatccaccaccagaccagacagaacatggccgagctgcagggcagcggccagagagaccccacccacagcagcgccgagctgctggagctggcctaccacgaggccgccggcagacacagcaacagcagacagcccggcgacggcatgagcttcctgaacttcagcggcaccgaggagctgagcgtgggcctgctgagcaacagcggcgccggcatgaaccccagaacccagaacaaggacagcctggaggacagcgtgagcaccagccccgaccccatcctgaccctgagcgccccccccgtggtgcccggcttctgctgcaccgtgggcgtggactggaagagcctgaccacccccgcctgcctgcccctgaccaccgactacttccccgacagacagggcctgcagaacgactacaccgagggctgctacgacctgctgcccgaggccgacatcgacagaagagacgaggacggcgtgcagatgaccgcccagcaggtgttcgaggagttcatctgccagagactgatgcagggctaccagatcatcgtgcagcccaagacccagaagcccaaccccgccgtgcccccccccctgagcagcagccccctgtacagcagaggcctggtgagcagaaacagacccgaggaggaggaccagtactggctgagcatgggcagaaccttccacaaggtgaccctgaaggacaagatgatcaccgtgaccagatacctgcccaagtacccctacgagagcgcccagatccactacacctacagcctgtgccccagccacagcgacagcgagttcgtgagctgctgggtggagttcagccacgagagactggaggagtacaagtggaactacctggaccagtacatctgcagcgccggcagcgaggacttcagcctgatcgagagcctgaagttctggagaaccagattcctgctgctgcccgcctgcgtgaccgccaccaagagaatcaccgagggcgaggcccactgcgacatctacggcgacagacccagagccgacgaggacgagtggcagctgctggacggcttcgtgagattcgtggagggcctgaacagaatcagaagaagacacagaagcgacagaatgatgagaaagggcaccgccatgaagggcctgcagatgaccggccccatcagcacccacagcctggagagcaccgccccccccgtgggcaagaagggcaccagcgccctgagcgccctgctggagatggaggccagccagaagtgcctgggcgagcagcaggccgccgtgcacggcggcaagagcagcgcccagagcgccgagagcagcagcgtggccatgacccccacctacatggacagccccagaaaggtgagcgtggaccagaccgccacccccatgctggacggcaccagcctgggcatctgcaccggccagagcatggacagaggcaacagccagaccttcggcaacagccagaacatcggcgagcagggctacagcagcaccaacagcagcgacagcagcagccagcagctggtggccagcagcctgaccagcagcagcaccctgaccgagatcctggaggccatgaagcaccccagcaccggcgtgcagctgctgagcgagcagaagggcctgagcccctactgcttcatcagcgccgaggtggtgcactggctggtgaaccacgtggagggcatccagacccaggccatggccatcgacatcatgcagaagatgctggaggagcagctgatcacccacgccagcggcgaggcctggagaaccttcatctacggcttctacttctacaagatcgtgaccgacaaggagcccgacagagtggccatgcagcagcccgccaccacctggcacaccgccggcgtggacgacttcgccagcttccagagaaagtggttcgaggtggccttcgtggccgaggagctggtgcacagcgagatccccgccttcctgctgccctggctgcccagcagacccgccagctacgccagcagacacagcagcttcagcagaagcttcggcggcagaagccaggccgccgccctgctggccgccaccgtgcccgagcagagaaccgtgaccctggacgtggacgtgaacaacagaaccgacagactggagtggtgcagctgctactaccacggcaacttcagcctgaacgccgccttcgagatcaagctgcactggatggccgtgaccgccgccgtgctgttcgagatggtgcagggctggcacagaaaggccaccagctgcggcttcctgctggtgcccgtgctggagggccccttcgccctgcccagctacctgtacggcgaccccctgagagcccagctgttcatccccctgaacatcagctgcctgctgaaggagggcagcgagcacctgttcgacagcttcgagcccgagacctactgggacagaatgcacctgttccaggaggccatcgcccacagattcggcttcgtgcaggacaagtacagcgccagcgccttcaacttccccgccgagaacaagccccagtacatccacgtgaccggcaccgtgttcctgcagctgccctacagcaagagaaagttcagcggccagcagagaagaagaagaaacagcaccagcagcaccaaccagaacatgttctgcgaggagagagtgggctacaactgggcctacaacaccatgctgaccaagacctggagaagcagcgccaccggcgacgagaagttcgccgacagactgctgaaggacttcaccgacttctgcatcaacagagacaacagactggtgaccttctggaccagctgcctggagaagatgcacgccagcgccccctag

SEQ ID NO: 79034 - DNA, 3690 bp, synthetic construct
  misc_feature 1..3690: note = Description of Artificial Sequence: Synthetic coding sequence
  source 1..3690: mol_type = other DNA
atgagaaccaccaaggtgtacaagctggtgatccacaagaagggcttcggcggcagcgacgacgagctggtggtgaaccccaaggtgttcccccacatcaagctgggcgacatcgtggagatcgcccaccccaacgacgagtacagccccctgctgctgcaggtgaagagcctgaaggaggacctgcagaaggagaccatcagcgtggaccagaccgtgacccaggtgttcagactgagaccctaccaggacgtgtacgtgaacgtggtggaccccaaggacgtgaccctggacctggtggagctgaccttcaaggaccagtacatcggcagaggcgacatgtggagactgaagaagagcctggtgagcacctgcgcctacatcacccagaaggtggagttcgccggcatcagagcccaggccggcgagctgtgggtgaagaacgagaaggtgatgtgcggctacatcagcgaggacaccagagtggtgttcagaagcaccagcgccatggtgtacatcttcatccagatgagctgcgagatgtgggacttcgacatctacggcgacctgtacttcgagaaggccgtgaacggcttcctggccgacctgttcaccaagtggaaggagaagaactgcagccacgaggtgaccgtggtgctgttcagcagaaccttctacgacgccaagagcgtggacgagttccccgagatcaacagagccagcatcagacaggaccacaagggcagattctacgaggacttctacaaggtggtggtgcagaacgagagaagagaggagtggaccagcctgctggtgaccatcaagaagctgttcatccagtaccccgtgctggtgagactggagcaggccgagggcttcccccagggcgacaacagcaccagcgcccagggcaactacctggaggccatcaacctgagcttcaacgtgttcgacaagcactacatcaacagaaacttcgacagaaccggccagatgagcgtggtgatcacccccggcgtgggcgtgttcgaggtggacagactgctgatgatcctgaccaagcagagaatgatcgacaacggcatcggcgtggacctggtgtgcatgggcgagcagcccctgcacgccgtgcccctgttcaagctgcacaacagaagcgcccccagagacagcagactgggcgacgactacaacatcccccactggatcaaccacagcttctacaccagcaagagccagctgttctgcaacagcttcacccccagaatcaagctggccggcaagaagcccgccagcgagaaggccaagaacggcagagacaccagcctgggcagccccaaggagagcgagaacgccctgcccatccaggtggactacgacgcctacgacgcccaggtgttcagactgcccggccccagcagagcccagtgcctgaccacctgcagaagcgtgagagagagagagagccacagcagaaagagcgccagcagctgcgacgtgagcagcagccccagcctgcccagcagaaccctgcccaccgaggaggtgagaagccaggccagcgacgacagcagcctgggcaagagcgccaacatcctgatgatcccccacccccacctgcaccagtacgaggtgagcagcagcctgggctacaccagcaccagagacgtgctggagaacatgatggagcccccccagagagacagcagcgcccccggcagattccacgtgggcagcgccgagagcatgctgcacgtgagacccggcggctacaccccccagagagccctgatcaaccccttcgcccccagcagaatgcccatgaagctgaccagcaacagaagaagatggatgcacaccttccccgtgggcatgaaccccagaacccagaacaaggacagcctggaggacagcgtgagcaccagccccgaccccatcctgaccctgagcgccccccccgtggtgcccggcttctgctgcaccgtgggcgtggactggaagagcctgaccacccccgcctgcctgcccctgaccaccgactacttccccgacagacagggcctgcagaacgactacaccgagggctgctacgacctgctgcccgaggccgacatcgacagaagagacgaggacggcgtgcagatgaccgcccagcaggtgttcgaggagttcatctgccagagactgatgcagggctaccagatcatcgtgcagcccaagacccagaagcccaaccccgccgtgcccccccccctgagcagcagccccctgtacagcagaggcctggtgagcagaaacagacccgaggaggaggaccagtactggctgagcatgggcagaaccttccacaaggtgaccctgaaggacaagatgatcaccgtgaccagatacctgcccaagtacccctacgagagcgcccagatccactacacctacagcctgtgccccagccacagcgacagcgagttcgtgagctgctgggtggagttcagccacgagagactggaggagtacaagtggaactacctggaccagtacatctgcagcgccggcagcgaggacttcagcctgatcgagagcctgaagttctggagaaccagattcctgctgctgcccgcctgcgtgaccgccaccaagagaatcaccgagggcgaggcccactgcgacatctacggcgacagacccagagccgacgaggacgagtggcagctgctggacggcttcgtgagattcgtggagggcctgaacagaatcagaagaagacacagaagcgacagaatgatgagaaagggcaccgccatgaagggcctgcagatgaccggccccatcagcacccacagcctggagagcaccgccccccccgtgggcaagaagggcaccagcgccctgagcgccctgctggagatggaggccagccagaagtgcctgggcgagcagcaggccgccgtgcacggcggcaagagcagcgcccagagcgccgagagcagcagcgtggccatgacccccacctacatggacagccccagaaaggacggcgccttcttcatggagttcgtgagaagccccagaaccgccagcagcgccttctacccccaggtgagcgtggaccagaccgccacccccatgctggacggcaccagcctgggcatctgcaccggccagagcatggacagaggcaacagccagaccttcggcaacagccagaacatcggcgagcagggctacagcagcaccaacagcagcgacagcagcagccagcagctggtggccagcagcctgaccagcagcagcaccctgaccgagatcctggaggccatgaagcaccccagcaccggcgtgcagctgctgagcgagcagaagggcctgagcccctactgcttcatcagcgccgaggtggtgcactggctggtgaaccacgtggagggcatccagacccaggccatggccatcgacatcatgcagtggccctgcagcagcccccccccccccggcacccagcaggagtggaccaccagccccgccagcagcgccagcggcctgagatggcccctgtggcagaagagcagctgcaccctgagattcctgcccttcagctgccccggctgcctggccggccagccccccatgcaggtgggcaccgcccccctggccgaggtgctggaggacggcgccagaagacagcacttctag

SEQ ID NO: 79035 - DNA, 4512 bp, synthetic construct
  misc_feature 1..4512: note = Description of Artificial Sequence: Synthetic coding sequence
  source 1..4512: mol_type = other DNA
atgagaaccaccaaggtgtacaagctggtgatccacaagaagggcttcggcggcagcgacgacgagctggtggtgaaccccaaggtgttcccccacatcaagctgggcgacatcgtggagatcgcccaccccaacgacgagtacagccccctgctgctgcaggtgaagagcctgaaggaggacctgcagaaggagaccatcagcgtggaccagaccgtgacccaggtgttcagactgagaccctaccaggacgtgtacgtgaacgtggtggaccccaaggacgtgaccctggacctggtggagctgaccttcaaggaccagtacatcggcagaggcgacatgtggagactgaagaagagcctggtgagcacctgcgcctacatcacccagaaggtggagttcgccggcatcagagcccaggccggcgagctgtgggtgaagaacgagaaggtgatgtgcggctacatcagcgaggacaccagagtggtgttcagaagcaccagcgccatggtgtacatcttcatccagatgagctgcgagatgtgggacttcgacatctacggcgacctgtacttcgagaaggccgtgaacggcttcctggccgacctgttcaccaagtggaaggagaagaactgcagccacgaggtgaccgtggtgctgttcagcagaaccttctacgacgccaagagcgtggacgagttccccgagatcaacagagccagcatcagacaggaccacaagggcagattctacgaggacttctacaaggtggtggtgcagaacgagagaagagaggagtggaccagcctgctggtgaccatcaagaagctgttcatccagtaccccgtgctggtgagactggagcaggccgagggcttcccccagggcgacaacagcaccagcgcccagggcaactacctggaggccatcaacctgagcttcaacgtgttcgacaagcactacatcaacagaaacttcgacagaaccggccagatgagcgtggtgatcacccccggcgtgggcgtgttcgaggtggacagactgctgatgatcctgaccaagcagagaatgatcgacaacggcatcggcgtggacctggtgtgcatgggcgagcagcccctgcacgccgtgcccctgttcaagctgcacaacagaagcgcccccagagacagcagactgggcgacgactacaacatcccccactggatcaaccacagcttctacaccagcaagagccagctgttctgcaacagcttcacccccagaatcaagctggccggcaagaagcccgccagcgagaaggccaagaacggcagagacaccagcctgggcagccccaaggagagcgagaacgccctgcccatccaggtggactacgacgcctacgacgcccaggtgttcagactgcccggccccagcagagcccagtgcctgaccacctgcagaagcgtgagagagagagagagccacagcagaaagagcgccagcagctgcgacgtgagcagcagccccagcctgcccagcagaaccctgcccaccgaggaggtgagaagccaggccagcgacgacagcagcctgggcaagagcgccaacatcctgatgatcccccacccccacctgcaccagtacgaggtgagcagcagcctgggctacaccagcaccagagacgtgctggagaacatgatggagcccccccagagagacagcagcgcccccggcagattccacgtgggcagcgccgagagcatgctgcacgtgagacccggcggctacaccccccagagagccctgatcaaccccttcgcccccagcagaatgcccatgaagctgaccagcaacagaagaagatggatgcacaccttccccgtggagaccagctgcttctacctgagcatcggcatgaaccccagaacccagaacaaggacagcctggaggacagcgtgagcaccagccccgaccccatgcccggcttctgctgcaccgtgggcgtggactggaagagcctgaccacccccgcctgcctgcccctgaccaccgactacttccccgacagacagggcctgcagaacgactacaccgagggctgctacgacctgctgcccgaggccgacatcgacagaagagacgaggacggcgtgcagatgaccgcccagcaggtgttcgaggagttcatctgccagagactgatgcagggctaccagatcatcgtgcagcccaagacccagaagcccaaccccgccgtgcccccccccctgagcagcagccccctgtacagcagaggcctggtgagcagaaacagacccgaggaggaggaccagtactggctgagcatgggcagaaccttccacaaggtgaccctgaaggacaagatgatcaccgtgaccagatacctgcccaagtacccctacgagagcgcccagatccactacacctacagcctgtgccccagccacagcgacagcgagttcgtgagctgctgggtggagttcagccacgagagactggaggagtacaagtggaactacctggaccagtacatctgcagcgccggcagcgaggacttcagcctgatcgagagcctgaagttctggagaaccagattcctgctgctgcccgcctgcgtgaccgccaccaagagaatcaccgagggcgaggcccactgcgacatctacggcgacagacccagagccgacgaggacgagtggcagctgctggacggcttcgtgagattcgtggagggcctgaacagaatcagaagaagacacagaagcgacagaatgatgagaaagggcaccgccatgaagggcctgcagatgaccggccccatcagcacccacagcctggagagcaccgccccccccgtgggcaagaagggcaccagcgccctgagcgccctgctggagatggaggccagccagaagtgcctgggcgagcagcaggccgccgtgcacggcggcaagagcagcgcccagagcgccgagagcagcagcgtggccatgacccccacctacatggacagccccagaaaggtgagcgtggaccagaccgccacccccatgctggacggcaccagcctgggcatctgcaccggccagagcatggacagaggcaacagccagaccttcggcaacagccagaacatcggcgagcagggctacagcagcaccaacagcagcgacagcagcagccagcagctggtggccagcagcctgaccagcagcagcaccctgaccgagatcctggaggccatgaagcaccccagcaccggcgtgcagctgctgagcgagcagaagggcctgagcccctactgcttcatcagcgccgaggtggtgcactggctggtgaaccacgtggagggcatccagacccaggccatggccatcgacatcatgcagaagatgctggaggagcagctgatcacccacgccagcggcgaggcctggagaaccttcatctacggcttctacttctacaagatcgtgaccgacaaggagcccgacagagtggccatgcagcagcccgccaccacctggcacaccgccggcgtggacgacttcgccagcttccagagaaagtggttcgaggtggccttcgtggccgaggagctggtgcacagcgagatccccgccttcctgctgccctggctgcccagcagacccgccagctacgccagcagacacagcagcttcagcagaagcttcggcggcagaagccaggccgccgccctgctggccgccaccgtgcccgagcagagaaccgtgaccctggacgtggacgtgaacaacagaaccgacagactggagtggtgcagctgctactaccacggcaacttcagcctgaacgccgccttcgagatcaagctgcactggatggccgtgaccgccgccgtgctgttcgagatggtgcagggctggcacagaaaggccaccagctgcggcttcctgctggtgcccgtgctggagggccccttcgccctgcccagctacctgtacggcgaccccctgagagcccagctgttcatccccctgaacatcagctgcctgctgaaggagggcagcgagcacctgttcgacagcttcgagcccgagacctactgggacagaatgcacctgttccaggaggccatcgcccacagattcggcttcgtgcaggacaagtacagcgccagcgccttcaacttccccgccgagaacaagccccagtacatccacgtgaccggcaccgtgttcctgcagctgccctacagcaagagaaagttcagcggccagcagagaagaagaagaaacagcaccagcagcaccaaccagaacatgttctgcgaggagagagtgggctacaactgggcctacaacaccatgctgaccaagacctggagaagcagcgccaccggcgacgagaagttcgccgacagactgctgaaggacttcaccgacttctgcatcaacagagacaacagactggtgaccttctggaccagctgcctggagaagatgcacgccagcgccccctag

SEQ ID NO: 79036 - DNA, 1680 bp, synthetic construct
  misc_feature 1..1680: note = Description of Artificial Sequence: Synthetic coding sequence
  source 1..1680: mol_type = other DNA
atgagaaccaccaaggtgtacaagctggtgatccacaagaagggcttcggcggcagcgacgacgagctggtggtgaaccccaaggtgttcccccacatcaagctgggcgacatcgtggagatcgcccaccccaacgacgagtacagccccctgctgctgcaggtgaagagcctgaaggaggacctgcagaaggagaccatcagcgtggaccagaccgtgacccaggtgttcagactgagaccctaccaggacgtgtacgtgaacgtggtggaccccaaggacgtgaccctggacctggtggagctgaccttcaaggaccagtacatcggcagaggcgacatgtggagactgaagaagagcctggtgagcacctgcgcctacatcacccagaaggtggagttcgccggcatcagagcccaggccggcgagctgtgggtgaagaacgagaaggtgatgtgcggctacatcagcgaggacaccagagtggtgttcagaagcaccagcgccatggtgtacatcttcatccagatgagctgcgagatgtgggacttcgacatctacggcgacctgtacttcgagaaggccgtgaacggcttcctggccgacctgttcaccaagtggaaggagaagaactgcagccacgaggtgaccgtggtgctgttcagcagaaccttctacgacgccaagagcgtggacgagttccccgagatcaacagagccagcatcagacaggaccacaagggcagattctacgaggacttctacaaggtggtggtgcagaacgagagaagagaggagtggaccagcctgctggtgaccatcaagaagctgttcatccagtaccccgtgctggtgagactggagcaggccgagggcttcccccagggcgacaacagcaccagcgcccagggcaactacctggaggccatcaacctgagcttcaacgtgttcgacaagcactacatcaacagaaacttcgacagaaccggccagatgagcgtggtgatcacccccggcgtgggcgtgttcgaggtggacagactgctgatgatcctgaccaagcagagaatgatcgacaacggcatcggcgtggacctggtgtgcatgggcgagcagcccctgcacgccgtgcccctgttcaagctgcacaacagaagcgcccccagagacagcagactgggcgacgactacaacatcccccactggatcaaccacagcttctacaccagcaagagccagctgttctgcaacagcttcacccccagaatcaagctggccggcaagaagcccgccagcgagaaggccaagaacggcagagacaccagcctgggcagccccaaggagagcgagaacgccctgcccatccaggtggactacgacgcctacgacgcccaggtgttcagactgcccggccccagcagagcccagtgcctgaccacctgcagaagcgtgagagagagagagagccacagcagaaagagcgccagcagctgcgacgtgagcagcagccccagcctgcccagcagaaccctgcccaccgaggaggtgagaagccaggccagcgacgacagcagcctgggcaagagcgccaacatcctgatgatcccccacccccacctgcaccagtacgaggtgagcagcagcctgggctacaccagcaccagagagcacctgggctag

SEQ ID NO: 79037 - DNA, 4659 bp, synthetic construct
  misc_feature 1..4659: note = Description of Artificial Sequence: Synthetic coding sequence
  source 1..4659: mol_type = other DNA
atgagaaccaccaaggtgtacaagctggtgatccacaagaagggcttcggcggcagcgacgacgagctggtggtgaaccccaaggtgttcccccacatcaagctgggcgacatcgtggagatcgcccaccccaacgacgagtacagccccctgctgctgcaggtgaagagcctgaaggaggacctgcagaaggagaccatcagcgtggaccagaccgtgacccaggtgttcagactgagaccctaccaggacgtgtacgtgaacgtggtggaccccaaggacgtgaccctggacctggtggagctgaccttcaaggaccagtacatcggcagaggcgacatgtggagactgaagaagagcctggtgagcacctgcgcctacatcacccagaaggtggagttcgccggcatcagagcccaggccggcgagctgtgggtgaagaacgagaaggtgatgtgcggctacatcagcgaggacaccagagtggtgttcagaagcaccagcgccatggtgtacatcttcatccagatgagctgcgagatgtgggacttcgacatctacggcgacctgtacttcgagaaggccgtgaacggcttcctggccgacctgttcaccaagtggaaggagaagaactgcagccacgaggtgaccgtggtgctgttcagcagaaccttctacgacgccaagagcgtggacgagttccccgagatcaacagagccagcatcagacaggaccacaagggcagattctacgaggacttctacaaggtggtggtgcagaacgagagaagagaggagtggaccagcctgctggtgaccatcaagaagctgttcatccagtaccccgtgctggtgagactggagcaggccgagggcttcccccagggcgacaacagcaccagcgcccagggcaactacctggaggccatcaacctgagcttcaacgtgttcgacaagcactacatcaacagaaacttcgacagaaccggccagatgagcgtggtgatcacccccggcgtgggcgtgttcgaggtggacagactgctgatgatcctgaccaagcagagaatgatcgacaacggcatcggcgtggacctggtgtgcatgggcgagcagcccctgcacgccgtgcccctgttcaagctgcacaacagaagcgcccccagagacagcagactgggcgacgactacaacatcccccactggatcaaccacagcttctacaccagcaagagccagctgttctgcaacagcttcacccccagaatcaagctggccggcaagaagcccgccagcgagaaggccaagaacggcagagacaccagcctgggcagccccaaggagagcgagaacgccctgcccatccaggtggactacgacgcctacgacgcccaggtgttcagactgcccggccccagcagagcccagtgcctgaccacctgcagaagcgtgagagagagagagagccacagcagaaagagcgccagcagctgcgacgtgagcagcagccccagcctgcccagcagaaccctgcccaccgaggaggtgagaagccaggccagcgacgacagcagcctgggcaagagcgccaacatcctgatgatcccccacccccacctgcaccagtacgaggtgagcagcagcctgggctacaccagcaccagagacgtgctggagaacatgatggagcccccccagagagacagcagcgcccccggcagattccacgtgggcagcgccgagagcatgctgcacgtgagacccggcggctacaccccccagagagccctgatcaaccccttcgcccccagcagaatgcccatgaagctgaccagcaacagaagaagatggatgcacaccttccccgtgggccccagcggcgaggccatccagatccaccaccagaccagacagaacatggccgagctgcagggcagcggccagagagaccccacccacagcagcgccgagctgctggagctggcctaccacgaggccgccggcagacacagcaacagcagacagcccggcgacggcatgagcttcctgaacttcagcggcaccgaggagctgagcgtgggcctgctgagcaacagcggcgccggcatgaaccccagaacccagaacaaggacagcctggaggacagcgtgagcaccagccccgaccccatcctgaccctgagcgccccccccgtggtgcccggcttctgctgcaccgtgggcgtggactggaagagcctgaccacccccgcctgcctgcccctgaccaccgactacttccccgacagacagggcctgcagaacgactacaccgagggctgctacgacctgctgcccgaggccgacatcgacagaagagacgaggacggcgtgcagatgaccgcccagcaggtgttcgaggagttcatctgccagagactgatgcagggctaccagatcatcgtgcagcccaagacccagaagcccaaccccgccgtgcccccccccctgagcagcagccccctgtacagcagaggcctggtgagcagaaacagacccgaggaggaggaccagtactggctgagcatgggcagaaccttccacaaggtgaccctgaaggacaagatgatcaccgtgaccagatacctgcccaagtacccctacgagagcgcccagatccactacacctacagcctgtgccccagccacagcgacagcgagttcgtgagctgctgggtggagttcagccacgagagactggaggagtacaagtggaactacctggaccagtacatctgcagcgccggcagcgaggacttcagcctgatcgagagcctgaagttctggagaaccagattcctgctgctgcccgcctgcgtgaccgccaccaagagaatcaccgagggcgaggcccactgcgacatctacggcgacagacccagagccgacgaggacgagtggcagctgctggacggcttcgtgagattcgtggagggcctgaacagaatcagaagaagacacagaagcgacagaatgatgagaaagggcaccgccatgaagggcctgcagatgaccggccccatcagcacccacagcctggagagcaccgccccccccgtgggcaagaagggcaccagcgccctgagcgccctgctggagatggaggccagccagaagtgcctgggcgagcagcaggccgccgtgcacggcggcaagagcagcgcccagagcgccgagagcagcagcgtggccatgacccccacctacatggacagccccagaaaggacggcgccttcttcatggagttcgtgagaagccccagaaccgccagcagcgccttctacccccaggtgagcgtggaccagaccgccacccccatgctggacggcaccagcctgggcatctgcaccggccagagcatggacagaggcaacagccagaccttcggcaacagccagaacatcggcgagcagggctacagcagcaccaacagcagcgacagcagcagccagcagctggtggccagcagcctgaccagcagcagcaccctgaccgagatcctggaggccatgaagcaccccagcaccggcgtgcagctgctgagcgagcagaagggcctgagcccctactgcttcatcagcgccgaggtggtgcactggctggtgaaccacgtggagggcatccagacccaggccatggccatcgacatcatgcagaagatgctggaggagcagctgatcacccacgccagcggcgaggcctggagaaccttcatctacggcttctacttctacaagatcgtgaccgacaaggagcccgacagagtggccatgcagcagcccgccaccacctggcacaccgccggcgtggacgacttcgccagcttccagagaaagtggttcgaggtggccttcgtggccgaggagctggtgcacagcgagatccccgccttcctgctgccctggctgcccagcagacccgccagctacgccagcagacacagcagcttcagcagaagcttcggcggcagaagccaggccgccgccctgctggccgccaccgtgcccgagcagagaaccgtgaccctggacgtggacgtgaacaacagaaccgacagactggagtggtgcagctgctactaccacggcaacttcagcctgaacgccgccttcgagatcaagctgcactggatggccgtgaccgccgccgtgctgttcgagatggtgcagggctggcacagaaaggccaccagctgcggcttcctgctggtgcccgtgctggagggccccttcgccctgcccagctacctgtacggcgaccccctgagagcccagctgttcatccccctgaacatcagctgcctgctgaaggagggcagcgagcacctgttcgacagcctgggcctgtacaagatcaacatcctgcccctgctgctgaccagcctgctgagaaccagcctgagcatcagcaccctgcaggagcagtgcttctgcagctgccccacccccagcgccagcagccagggcagcagcggcggcggcggcaccccccccgccccccccaccagaacctgcagcgccagaagcggcagcgccaccaccggccccaccaccccctgcagccccaagcacggcgcccccgccccccagggcatgaagagcctgctgatcggctgctag

SEQ ID NO: 79038 - DNA, 4719 bp, synthetic construct
  misc_feature 1..4719: note = Description of Artificial Sequence: Synthetic coding sequence
  source 1..4719: mol_type = other DNA
atgagaaccaccaaggtgtacaagctggtgatccacaagaagggcttcggcggcagcgacgacgagctggtggtgaaccccaaggtgttcccccacatcaagctgggcgacatcgtggagatcgcccaccccaacgacgagtacagccccctgctgctgcaggtgaagagcctgaaggaggacctgcagaaggagaccatcagcgtggaccagaccgtgacccaggtgttcagactgagaccctaccaggacgtgtacgtgaacgtggtggaccccaaggacgtgaccctggacctggtggagctgaccttcaaggaccagtacatcggcagaggcgacatgtggagactgaagaagagcctggtgagcacctgcgcctacatcacccagaaggtggagttcgccggcatcagagcccaggccggcgagctgtgggtgaagaacgagaaggtgatgtgcggctacatcagcgaggacaccagagtggtgttcagaagcaccagcgccatggtgtacatcttcatccagatgagctgcgagatgtgggacttcgacatctacggcgacctgtacttcgagaaggccgtgaacggcttcctggccgacctgttcaccaagtggaaggagaagaactgcagccacgaggtgaccgtggtgctgttcagcagaaccttctacgacgccaagagcgtggacgagttccccgagatcaacagagccagcatcagacaggaccacaagggcagattctacgaggacttctacaaggtggtggtgcagaacgagagaagagaggagtggaccagcctgctggtgaccatcaagaagctgttcatccagtaccccgtgctggtgagactggagcaggccgagggcttcccccagggcgacaacagcaccagcgcccagggcaactacctggaggccatcaacctgagcttcaacgtgttcgacaagcactacatcaacagaaacttcgacagaaccggccagatgagcgtggtgatcacccccggcgtgggcgtgttcgaggtggacagactgctgatgatcctgaccaagcagagaatgatcgacaacggcatcggcgtggacctggtgtgcatgggcgagcagcccctgcacgccgtgcccctgttcaagctgcacaacagaagcgcccccagagacagcagactgggcgacgactacaacatcccccactggatcaaccacagcttctacaccagcaagagccagctgttctgcaacagcttcacccccagaatcaagctggccggcaagaagcccgccagcgagaaggccaagaacggcagagacaccagcctgggcagccccaaggagagcgagaacgccctgcccatccaggtggactacgacgcctacgacgcccaggtgttcagactgcccggccccagcagagcccagtgcctgaccacctgcagaagcgtgagagagagagagagccacagcagaaagagcgccagcagctgcgacgtgagcagcagccccagcctgcccagcagaaccctgcccaccgaggaggtgagaagccaggccagcgacgacagcagcctgggcaagagcgccaacatcctgatgatcccccacccccacctgcaccagtacgaggtgagcagcagcctgggctacaccagcaccagagacgtgctggagaacatgatggagcccccccagagagacagcagcgcccccggcagattccacgtgggcagcgccgagagcatgctgcacgtgagacccggcggctacaccccccagagagccctgatcaaccccttcgcccccagcagaatgcccatgaagctgaccagcaacagaagaagatggatgcacaccttccccgtgggccccagcggcgaggccatccagatccaccaccagaccagacagaacatggccgagctgcagggcagcggccagagagaccccacccacagcagcgccgagctgctggagctggcctaccacgaggccgccggcagacacagcaacagcagacagcccggcgacggcatgagcttcctgaacttcagcggcaccgaggagctgagcgtgggcctgctgagcaacagcggcgccggcatgaaccccagaacccagaacaaggacagcctggaggacagcgtgagcaccagccccgaccccatgcccggcttctgctgcaccgtgggcgtggactggaagagcctgaccacccccgcctgcctgcccctgaccaccgactacttccccgacagacagggcctgcagaacgactacaccgagggctgctacgacctgctgcccgaggccgacatcgacagaagagacgaggacggcgtgcagatgaccgcccagcaggtgttcgaggagttcatctgccagagactgatgcagggctaccagatcatcgtgcagcccaagacccagaagcccaaccccgccgtgcccccccccctgagcagcagccccctgtacagcagaggcctggtgagcagaaacagacccgaggaggaggaccagtactggctgagcatgggcagaaccttccacaaggtgaccctgaaggacaagatgatcaccgtgaccagatacctgcccaagtacccctacgagagcgcccagatccactacacctacagcctgtgccccagccacagcgacagcgagttcgtgagctgctgggtggagttcagccacgagagactggaggagtacaagtggaactacctggaccagtacatctgcagcgccggcagcgaggacttcagcctgatcgagagcctgaagttctggagaaccagattcctgctgctgcccgcctgcgtgaccgccaccaagagaatcaccgagggcgaggcccactgcgacatctacggcgacagacccagagccgacgaggacgagtggcagctgctggacggcttcgtgagattcgtggagggcctgaacagaatcagaagaagacacagaagcgacagaatgatgagaaagggcaccgccatgaagggcctgcagatgaccggccccatcagcacccacagcctggagagcaccgccccccccgtgggcaagaagggcaccagcgccctgagcgccctgctggagatggaggccagccagaagtgcctgggcgagcagcaggccgccgtgcacggcggcaagagcagcgcccagagcgccgagagcagcagcgtggccatgacccccacctacatggacagccccagaaaggtgagcgtggaccagaccgccacccccatgctggacggcaccagcctgggcatctgcaccggccagagcatggacagaggcaacagccagaccttcggcaacagccagaacatcggcgagcagggctacagcagcaccaacagcagcgacagcagcagccagcagctggtggccagcagcctgaccagcagcagcaccctgaccgagatcctggaggccatgaagcaccccagcaccggcgtgcagctgctgagcgagcagaagggcctgagcccctactgcttcatcagcgccgaggtggtgcactggctggtgaaccacgtggagggcatccagacccaggccatggccatcgacatcatgcagaagatgctggaggagcagctgatcacccacgccagcggcgaggcctggagaaccttcatctacggcttctacttctacaagatcgtgaccgacaaggagcccgacagagtggccatgcagcagcccgccaccacctggcacaccgccggcgtggacgacttcgccagcttccagagaaagtggttcgaggtggccttcgtggccgaggagctggtgcacagcgagatccccgccttcctgctgccctggctgcccagcagacccgccagctacgccagcagacacagcagcttcagcagaagcttcggcggcagaagccaggccgccgccctgctggccgccaccgtgcccgagcagagaaccgtgaccctggacgtggacgtgaacaacagaaccgacagactggagtggtgcagctgctactaccacggcaacttcagcctgaacgccgccttcgagatcaagctgcactggatggccgtgaccgccgccgtgctgttcgagatggtgcagggctggcacagaaaggccaccagctgcggcttcctgctggtgcccgtgctggagggccccttcgccctgcccagctacctgtacggcgaccccctgagagcccagctgttcatccccctgaacatcagctgcctgctgaaggagggcagcgagcacctgttcgacagcttcgagcccgagacctactgggacagaatgcacctgttccaggaggccatcgcccacagattcggcttcgtgcaggacaagtacagcgccagcgccttcaacttccccgccgagaacaagccccagtacatccacgtgaccggcaccgtgttcctgcagctgccctacagcaagagaaagttcagcggccagcagagaagaagaagaaacagcaccagcagcaccaaccagaacatgttctgcgaggagagagtgggctacaactgggcctacaacaccatgctgaccaagacctggagaagcagcgccaccggcgacgagaagttcgccgacagactgctgaaggacttcaccgacttctgcatcaacagagacaacagactggtgaccttctggaccagctgcctggagaagatgcacgccagcgccccctag

SEQ ID NO: 79039 - DNA, 4719 bp, synthetic construct; identical to SEQ ID NO: 79038
  misc_feature 1..4719: note = Description of Artificial Sequence: Synthetic coding sequence
  source 1..4719: mol_type = other DNA

SEQ ID NO: 79040 - DNA, 138 bp, synthetic construct
  misc_feature 1..138: note = Description of Artificial Sequence: Synthetic coding sequence
  source 1..138: mol_type = other DNA
atgagaaccaccaaggtgtacaagctggtgatccacaagaagggcttcggcggcagcgacgacgagctggtggtgaaccccaaggtgttcccccacatcaagctgggcgacatcgtggagatcgcccaccccaactag

SEQ ID NO: 79041 - DNA, 4512 bp, synthetic construct
  misc_feature 1..4512: note = Description of Artificial Sequence: Synthetic coding sequence
  source 1..4512: mol_type = other DNA
atgagaaccaccaaggtgtacaagctggtgatccacaagaagggcttcggcggcagcgacgacgagctggtggtgaaccccaaggtgttcccccacatcaagctgggcgacatcgtggagatcgcccaccccaacgacgagtacagccccctgctgctgcaggtgaagagcctgaaggaggacctgcagaaggagaccatcagcgtggaccagaccgtgacccaggtgttcagactgagaccctaccaggacgtgtacgtgaacgtggtggaccccaaggacgtgaccctggacctggtggagctgaccttcaaggaccagtacatcggcagaggcgacatgtggagactgaagaagagcctggtgagcacctgcgcctacatcacccagaaggtggagttcgccggcatcagagcccaggccggcgagctgtgggtgaagaacgagaaggtgatgtgcggctacatcagcgaggacaccagagtggtgttcagaagcaccagcgccatggtgtacatcttcatccagatgagctgcgagatgtgggacttcgacatctacggcgacctgtacttcgagaaggccgtgaacggcttcctggccgacctgttcaccaagtggaaggagaagaactgcagccacgaggtgaccgtggtgctgttcagcagaaccttctacgacgccaagagcgtggacgagttccccgagatcaacagagccagcatcagacaggaccacaagggcagattctacgaggacttctacaaggtggtggtgcagaacgagagaagagaggagtggaccagcctgctggtgaccatcaagaagctgttcatccagtaccccgtgctggtgagactggagcaggccgagggcttcccccagggcgacaacagcaccagcgcccagggcaactacctggaggccatcaacctgagcttcaacgtgttcgacaagcactacatcaacagaaacttcgacagaaccggccagatgagcgtggtgatcacccccggcgtgggcgtgttcgaggtggacagactgctgatgatcctgaccaagcagagaatgatcgacaacggcatcggcgtggacctggtgtgcatgggcgagcagcccctgcacgccgtgcccctgttcaagctgcacaacagaagcgcccccagagacagcagactgggcgacgactacaacatcccccactggatcaaccacagcttctacaccagcaagagccagctgttctgcaacagcttcacccccagaatcaagctggccggcaagaagcccgccagcgagaaggccaagaacggcagagacaccagcctgggcagccccaaggagagcgagaacgccctgcccatccaggtggactacgacgcctacgacgcccaggtgttcagactgcccggccccagcagagcccagtgcctgaccacctgcagaagcgtgagagagagagagagccacagcagaaagagcgccagcagctgcgacgtgagcagcagccccagcctgcccagcagaaccctgcccaccgaggaggtgagaagccaggccagcgacgacagcagcctgggcaagagcgccaacatcctgatgatcccccacccccacctgcaccagtacgaggtgagcagcagcctgggctacaccagcaccagagacgtgctggagaacatgatggagcccccccagagagacagcagcgcccccggcagattccacgtgggcagcgccgagagcatgctgcacgtgagacccggcggctacaccccccagagagccctgatcaaccccttcgcccccagcagaatgcccatgaagctgaccagcaacagaagaagatggatgcacaccttccccgtgggcatgaaccccagaacccagaacaaggacagcctggaggacagcgtgagcaccagccccgaccccatcctgaccctgagcgccccccccgtggtgcccggcttctgctgcaccgtgggcgtggactggaagagcctgaccacccccgcctgcctgcccctgaccaccgactacttccccgacagacagggcctgcagaacgactacaccgagggctgctacgacctgctgcccgaggccgacatcgacagaagagacgaggacggcgtgcagatgaccgcccagcaggtgttcgaggagttcatctgccagagactgatgcagggctaccagatcatcgtgcagcccaagacccagaagcccaaccccgccgtgcccccccccctgagcagcagccccctgtacagcagaggcctggtgagcagaaacagacccgaggaggaggaccagtactggctgagcatgggcagaaccttccacaaggtgaccctgaaggacaagatgatcaccgtgaccagatacctgcccaagtacccctacgagagcgcccagatccactacacctacagcctgtgccccagccacagcgacagcgagttcgtgagctgctgggtggagttcagccacgagagactggaggagtacaagtggaactacctggaccagtacatctgcagcgccggcagcgaggacttcagcctgatcgagagcctgaagttctggagaaccagattcctgctgctgcccgcctgcgtgaccgccaccaagagaatcaccgagggcgaggcccactgcgacatctacggcgacagacccagagccgacgaggacgagtggcagctgctggacggcttcgtgagattcgtggagggcctgaacagaatcagaagaagacacagaagcgacagaatgatgagaaagggcaccgccatgaagggcctgcagatgaccggccccatcagcacccacagcctggagagcaccgccccccccgtgggcaagaagggcaccagcgccctgagcgccctgctggagatggaggccagccagaagtgcctgggcgagcagcaggccgccgtgcacggcggcaagagcagcgcccagagcgccgagagcagcagcgtggccatgacccccacctacatggacagccccagaaaggtgagcgtggaccagaccgccacccccatgctggacggcaccagcctgggcatctgcaccggccagagcatggacagaggcaacagccagaccttcggcaacagccagaacatcggcgagcagggctacagcagcaccaacagcagcgacagcagcagccagcagctggtggccagcagcctgaccagcagcagcaccctgaccgagatcctggaggccatgaagcaccccagcaccggcgtgcagctgctgagcgagcagaagggcctgagcccctactgcttcatcagcgccgaggtggtgcactggctggtgaaccacgtggagggcatccagacccaggccatggccatcgacatcatgcagaagatgctggaggagcagctgatcacccacgccagcggcgaggcctggagaaccttcatctacggcttctacttctacaagatcgtgaccgacaaggagcccgacagagtggccatgcagcagcccgccaccacctggcacaccgccggcgtggacgacttcgccagcttccagagaaagtggttcgaggtggccttcgtggccgaggagctggtgcacagcgagatccccgccttcctgctgccctggctgcccagcagacccgccagctacgccagcagacacagcagcttcagcagaagcttcggcggcagaagccaggccgccgccctgctggccgccaccgtgcccgagcagagaaccgtgaccctggacgtggacgtgaacaacagaaccgacagactggagtggtgcagctgctactaccacggcaacttcagcctgaacgccgccttcgagatcaagctgcactggatggccgtgaccgccgccgtgctgttcgagatggtgcagggctggcacagaaaggccaccagctgcggcttcctgctggtgcccgtgctggagggccccttcgccctgcccagctacctgtacggcgaccccctgagagcccagctgttcatccccctgaacatcagctgcctgctgaaggagggcagcgagcacctgttcgacagcttcgagcccgagacctactgggacagaatgcacctgttccaggaggccatcgcccacagattcggcttcgtgcaggacaagtacagcgccagcgccttcaacttccccgccgagaacaagccccagtacatccacgtgaccggcaccgtgttcctgcagctgccctacagcaagagaaagttcagcggccagcagagaagaagaagaaacagcaccagcagcaccaaccagaacatgttctgcgaggagagagtgggctacaactgggcctacaacaccatgctgaccaagacctggagaagcagcgccaccggcgacgagaagttcgccgacagactgctgaaggacttcaccgacttctgcatcaacagagacaacagactggtgaccttctggaccagctgcctggagaagatgcacgccagcgccccctag

SEQ ID NO: 79042 - DNA, 1995 bp, synthetic construct
  misc_feature 1..1995: note = Description of Artificial Sequence: Synthetic coding sequence
  source 1..1995: mol_type = other DNA
atgagaaccaccaaggtgtacaagctggtgatccacaagaagggcttcggcggcagcgacgacgagctggtggtgaaccccaaggtgttcccccacatcaagctgggcgacatcgtggagatcgcccaccccaacgacgagtacagccccctgctgctgcaggtgaagagcctgaaggaggacctgcagaaggagaccatcagcgtggaccagaccgtgacccaggtgttcagactgagaccctaccaggacgtgtacgtgaacgtggtggaccccaaggtgagcacctgcgcctacatcacccagaaggtggagttcgccggcatcagagcccaggccggcgagctgtgggtgaagaacgagaaggtgatgtgcggctacatcagcgaggacaccagagtggtgttcagaagcaccagcgccatggtgtacatcttcatccagatgagctgcgagatgtgggacttcgacatctacggcgacctgtacttcgagaaggccgtgaacggcttcctggccgacctgttcaccaagtggaaggagaagaactgcagccacgaggtgaccgtggtgctgttcagcagaaccttctacgacgccaagagcgtggacgagttccccgagatcaacagagccagcatcagacaggaccacaagggcagattctacgaggacttctacaaggtggtggtgcagaacgagagaagagaggagtggaccagcctgctggtgaccatcaagaagctgttcatccagtaccccgtgctggtgagactggagcaggccgagggcttcccccagggcgacaacagcaccagcgcccagggcaactacctggaggccatcaacctgagcttcaacgtgttcgacaagcactacatcaacagaaacttcgacagaaccggccagatgagcgtggtgatcacccccggcgtgggcgtgttcgaggtggacagactgctgatgatcctgaccaagcagagaatgatcgacaacggcatcggcgtggacctggtgtgcatgggcgagcagcccctgcacgccgtgcccctgttcaagctgcacaacagaagcgcccccagagacagcagactgggcgacgactacaacatcccccactggatcaaccacagcttctacaccagcaagagccagctgttctgcaacagcttcacccccagaatcaagctggccggcaagaagcccgccagcgagaaggccaagaacggcagagacaccagcctgggcagccccaaggagagcgagaacgccctgcccatccaggtggactacgacgcctacgacgcccaggtgttcagactgcccggccccagcagagcccagtgcctgaccacctgcagaagcgtgagagagagagagagccacagcagaaagagcgccagcagctgcgacgtgagcagcagccccagcctgcccagcagaaccctgcccaccgaggaggtgagaagccaggccagcgacgacagcagcctgggcaagagcgccaacatcctgatgatcccccacccccacctgcaccagtacgaggtgagcagcagcctgggctacaccagcaccagagacgtgctggagaacatgatggagcccccccagagagacagcagcgcccccggcagattccacgtgggcagcgccgagagcatgctgcacgtgagacccggcggctacaccccccagagagccctgatcaaccccttcgcccccagcagaatgcccatgaagctgaccagcaacagaagaagatggatgcacaccttccccgtgggcatgaaccccagaacccagaacaaggacagcctggaggacagcgtgagcaccagccccgaccccagcaagagaggccagctgaccggcgagagaggcagacagggcgtgtggggcggccagagcatgagaaagcaggaggaggccctgtgggaggtgagcggccccgaggtgcacatccccctgggctacggcaaggccatgtggtag

SEQ ID NO: 79043 - DNA, 1263 bp, synthetic construct
  misc_feature 1..1263: note = Description of Artificial Sequence: Synthetic coding sequence
  source 1..1263: mol_type = other DNA
atgaagcaccccagcaccggcgtgcagctgctgagcgagcagaagggcctgagcccctactgcttcatcagcgccgaggtggtgcactggctggtgaaccacgtggagggcatccagacccaggccatggccatcgacatcatgcagaagatgctggaggagcagctgatcacccacgccagcggcgaggcctggagaaccttcatctacggcttctacttctacaagatcgtgaccgacaaggagcccgacagagtggccatgcagcagcccgccaccacctggcacaccgccggcgtggacgacttcgccagcttccagagaaagtggttcgaggtggccttcgtggccgaggagctggtgcacagcgagatccccgccttcctgctgccctggctgcccagcagacccgccagctacgccagcagacacagcagcttcagcagaagcttcggcggcagaagccaggccgccgccctgctggccgccaccgtgcccgagcagagaaccgtgaccctggacgtggacgtgaacaacagaaccgacagactggagtggtgcagctgctactaccacggcaacttcagcctgaacgccgccttcgagatcaagctgcactggatggccgtgaccgccgccgtgctgttcgagatggtgcagggctggcacagaaaggccaccagctgcggcttcctgctggtgcccgtgctggagggccccttcgccctgcccagctacctgtacggcgaccccctgagagcccagctgttcatccccctgaacatcagctgcctgctgaaggagggcagcgagcacctgttcgacagcttcgagcccgagacctactgggacagaatgcacctgttccaggaggccatcgcccacagattcggcttcgtgcaggacaagtacagcgccagcgccttcaacttccccgccgagaacaagccccagtacatccacgtgaccggcaccgtgttcctgcagctgccctacagcaagagaaagttcagcggccagcagagaagaagaagaaacagcaccagcagcaccaaccagaacatgttctgcgaggagagagtgggctacaactgggcctacaacaccatgctgaccaagacctggagaagcagcgccaccggcgacgagaagttcgccgacagactgctgaaggacttcaccgacttctgcatcaacagagacaacagactggtgaccttctggaccagctgcctggagaagatgcacgccagcgccccctag

SEQ ID NO: 79044 - DNA, 4785 bp, synthetic construct
  misc_feature 1..4785: note = Description of Artificial Sequence: Synthetic coding sequence
  source 1..4785: mol_type = other DNA
atgagaaccaccaaggtgtacaagctggtgatccacaagaagggcttcggcggcagcgacgacgagctggtggtgaaccccaaggtgttcccccacatcaagctgggcgacatcgtggagatcgcccaccccaacgacgagtacagccccctgctgctgcaggtgaagagcctgaaggaggacctgcagaaggagaccatcagcgtggaccagaccgtgacccaggtgttcagactgagaccctaccaggacgtgtacgtgaacgtggtggaccccaaggacgtgaccctggacctggtggagctgaccttcaaggaccagtacatcggcagaggcgacatgtggagactgaagaagagcctggtgagcacctgcgcctacatcacccagaaggtggagttcgccggcatcagagcccaggccggcgagctgtgggtgaagaacgagaaggtgatgtgcggctacatcagcgaggacaccagagtggtgttcagaagcaccagcgccatggtgtacatcttcatccagatgagctgcgagatgtgggacttcgacatctacggcgacctgtacttcgagaaggccgtgaacggcttcctggccgacctgttcaccaagtggaaggagaagaactgcagccacgaggtgaccgtggtgctgttcagcagaaccttctacgacgccaagagcgtggacgagttccccgagatcaacagagccagcatcagacaggaccacaagggcagattctacgaggacttctacaaggtggtggtgcagaacgagagaagagaggagtggaccagcctgctggtgaccatcaagaagctgttcatccagtaccccgtgctggtgagactggagcaggccgagggcttcccccagggcgacaacagcaccagcgcccagggcaactacctggaggccatcaacctgagcttcaacgtgttcgacaagcactacatcaacagaaacttcgacagaaccggccagatgagcgtggtgatcacccccggcgtgggcgtgttcgaggtggacagactgctgatgatcctgaccaagcagagaatgatcgacaacggcatcggcgtggacctggtgtgcatgggcgagcagcccctgcacgccgtgcccctgttcaagctgcacaacagaagcgcccccagagacagcagactgggcgacgactacaacatcccccactggatcaaccacagcttctacaccagcaagagccagctgttctgcaacagcttcacccccagaatcaagctggccggcaagaagcccgccagcgagaaggccaagaacggcagagacaccagcctgggcagccccaaggagagcgagaacgccctgcccatccaggtggactacgacgcctacgacgcccaggtgttcagactgcccggccccagcagagcccagtgcctgaccacctgcagaagcgtgagagagagagagagccacagcagaaagagcgccagcagctgcgacgtgagcagcagccccagcctgcccagcagaaccctgcccaccgaggaggtgagaagccaggccagcgacgacagcagcctgggcaagagcgccaacatcctgatgatcccccacccccacctgcaccagtacgaggtgagcagcagcctgggctacaccagcaccagagacgtgctggagaacatgatggagcccccccagagagacagcagcgcccccggcagattccacgtgggcagcgccgagagcatgctgcacgtgagacccggcggctacaccccccagagagccctgatcaaccccttcgcccccagcagaatgcccatgaagctgaccagcaacagaagaagatggatgcacaccttccccgtgggccccagcggcgaggccatccagatccaccaccagaccagacagaacatggccgagctgcagggcagcggccagagagaccccacccacagcagcgccgagctgctggagctggcctaccacgaggccgccggcagacacagcaacagcagacagcccggcgacggcatgagcttcctgaacttcagcggcaccgaggagctgagcgtgggcctgctgagcaacagcggcgccggcatgaaccccagaacccagaacaaggacagcctggaggacagcgtgagcaccagccccgaccccatgcccggcttctgctgcaccgtgggcgtggactggaagagcctgaccacccccgcctgcctgcccctgaccaccgactacttccccgacagacagggcctgcagaacgactacaccgagggctgctacgacctgctgcccgaggccgacatcgacagaagagacgaggacggcgtgcagatgaccgcccagcaggtgttcgaggagttcatctgccagagactgatgcagggctaccagatcatcgtgcagcccaagacccagaagcccaaccccgccgtgcccccccccctgagcagcagccccctgtacagcagaggcctggtgagcagaaacagacccgaggaggaggaccagtactggctgagcatgggcagaaccttccacaaggtgaccctgaaggacaagatgatcaccgtgaccagatacctgcccaagtacccctacgagagcgcccagatccactacacctacagcctgtgccccagccacagcgacagcgagttcgtgagctgctgggtggagttcagccacgagagactggaggagtacaagtggaactacctggaccagtacatctgcagcgccggcagcgaggacttcagcctgatcgagagcctgaagttctggagaaccagattcctgctgctgcccgcctgcgtgaccgccaccaagagaatcaccgagggcgaggcccactgcgacatctacggcgacagacccagagccgacgaggacgagtggcagctgctggacggcttcgtgagattcgtggagggcctgaacagaatcagaagaagacacagaagcgacagaatgatgagaaagggcaccgccatgaagggcctgcagatgaccggccccatcagcacccacagcctggagagcaccgccccccccgtgggcaagaagggcaccagcgccctgagcgccctgctggagatggaggccagccagaagtgcctgggcgagcagcaggccgccgtgcacggcggcaagagcagcgcccagagcgccgagagcagcagcgtggccatgacccccacctacatggacagccccagaaaggacggcgccttcttcatggagttcgtgagaagccccagaaccgccagcagcgccttctacccccaggtgagcgtggaccagaccgccacccccatgctggacggcaccagcctgggcatctgcaccggccagagcatggacagaggcaacagccagaccttcggcaacagccagaacatcggcgagcagggctacagcagcaccaacagcagcgacagcagcagccagcagctggtggccagcagcctgaccagcagcagcaccctgaccgagatcctggaggccatgaagcaccccagcaccggcgtgcagctgctgagcgagcagaagggcctgagcccctactgcttcatcagcgccgaggtggtgcactggctggtgaaccacgtggagggcatccagacccaggccatggccatcgacatcatgcagaagatgctggaggagcagctgatcacccacgccagcggcgaggcctggagaaccttcatctacggcttctacttctacaagatcgtgaccgacaaggagcccgacagagtggccatgcagcagcccgccaccacctggcacaccgccggcgtggacgacttcgccagcttccagagaaagtggttcgaggtggccttcgtggccgaggagctggtgcacagcgagatccccgccttcctgctgccctggctgcccagcagacccgccagctacgccagcagacacagcagcttcagcagaagcttcggcggcagaagccaggccgccgccctgctggccgccaccgtgcccgagcagagaaccgtgaccctggacgtggacgtgaacaacagaaccgacagactggagtggtgcagctgctactaccacggcaacttcagcctgaacgccgccttcgagatcaagctgcactggatggccgtgaccgccgccgtgctgttcgagatggtgcagggctggcacagaaaggccaccagctgcggcttcctgctggtgcccgtgctggagggccccttcgccctgcccagctacctgtacggcgaccccctgagagcccagctgttcatccccctgaacatcagctgcctgctgaaggagggcagcgagcacctgttcgacagcttcgagcccgagacctactgggacagaatgcacctgttccaggaggccatcgcccacagattcggcttcgtgcaggacaagtacagcgccagcgccttcaacttccccgccgagaacaagccccagtacatccacgtgaccggcaccgtgttcctgcagctgccctacagcaagagaaagttcagcggccagcagagaagaagaagaaacagcaccagcagcaccaaccagaacatgttctgcgaggagagagtgggctacaactgggcctacaacaccatgctgaccaagacctggagaagcagcgccaccggcgacgagaagttcgccgacagactgctgaaggacttcaccgacttctgcatcaacagagacaacagactggtgaccttctggaccagctgcctggagaagatgcacgccagcgccccctag

SEQ ID NO: 79045 - DNA, 1536 bp, synthetic construct
  misc_feature 1..1536: note = Description of Artificial Sequence: Synthetic coding sequence
  source 1..1536: mol_type = other DNA
atggccaccgtgcaggagaaggccgccgccctgaacctgagcgccctgcacagccccgcccacagaccccccggcttcagcgtggcccagaagcccttcggcgccacctacgtgtggagcagcatcatcaacaccctgcagacccaggtggaggtgaagaagagaagacacagactgaagagacacaacgactgcttcgtgggcagcgaggccgtggacgtgatcttcagccacctgatccagaacaagtacttcggcgacgtggacatccccagagccaaggtggtgagagtgtgccaggccctgatggactacaaggtgttcgaggccgtgcccaccaaggtgttcggcaaggacaagaagcccaccttcgaggacagcagctgcagcctgtacagattcaccaccatccccaaccaggacagccagctgggcaaggagaacaagctgtacagccccgccagatacgccgacgccctgttcaagagcagcgacatcagaagcgccagcctggaggacctgtgggagaacctgagcctgaagcccgccaacagcccccacgtgaacatcagcgccaccctgagcccccaggtgatcaacgaggtgtggcaggaggagaccatcggcagactgctgcagctggtggacctgcccctgctggacagcctgctgaagcagcaggaggccgtgcccaagatcccccagcccaagagacagagcaccatggtgaacagcagcaactacctggacagaggcatcctgaaggcctacagcgacagccaggaggacgagtggctgagcgccgccatcgactgcctggagtacctgcccgaccagatggtggtggagatcagcagaagcttccccgagcagcccgacagaaccgacctggtgaaggagctgctgttcgacgccatcggcagatactacagcagcagagagcccctgctgaaccacctgagcgacgtgcacaacggcatcgccgagctgctggtgaacggcaagaccgagatcgccctggaggccacccagctgctgctgaagctgctggacttccagaacagagaggagttcagaagactgctgtacttcatggccgtggccgccaaccccagcgagttcaagctgcagaaggagagcgacaacagaatggtggtgaagagaatcttcagcaaggccatcgtggacaacaagaacctgagcaagggcaagaccgacctgctggtgctgttcctgatggaccaccagaaggacgtgttcaagatccccggcaccctgcacaagatcgtgagcgtgaagctgatggccatccagaacggcagagaccccaacagagacgccggctacatctactgccagagaatcgaccagagagactacagcaacaacaccgagaagaccaccaaggacgagctgctgaacctgctgaagaccctggacgaggacagcaagctgagcgccaaggagaagaagaagctgctgggccagttctacaagtgccaccccgacatcttcatcgagcacttcggcgactag

SEQ ID NO: 79046 - DNA, 1509 bp, synthetic construct
  misc_feature 1..1509: note = Description of Artificial Sequence: Synthetic coding sequence
  source 1..1509: mol_type = other DNA
atgagaggcctgtgcgagttctactggcaggagttcggcatcaagggcttcagcgtggcccagaagcccttcggcgccacctacgtgtggagcagcatcatcaacaccctgcagacccaggtggaggtgaagaagagaagacacagactgaagagacacaacgactgcttcgtgggcagcgaggccgtggacgtgatcttcagccacctgatccagaacaagtacttcggcgacgtggacatccccagagccaaggtggtgagagtgtgccaggccctgatggactacaaggtgttcgaggccgtgcccaccaaggtgttcggcaaggacaagaagcccaccttcgaggacagcagctgcagcctgtacagattcaccaccatccccaaccaggacagccagctgggcaaggagaacaagctgtacagccccgccagatacgccgacgccctgttcaagagcagcgacatcagaagcgccagcctggaggacctgtgggagaacctgagcctgaagcccgccaacagcccccacgtgaacatcagcgccaccctgagcccccaggtgatcaacgaggtgtggcaggaggagaccatcggcagactgctgcagctggtggacctgcccctgctggacagcctgctgaagcagcaggaggccgtgcccaagatcccccagcccaagagacagagcaccatggtgaacagcagcaactacctggacagaggcatcctgaaggcctacagcgacagccaggaggacgagtggctgagcgccgccatcgactgcctggagtacctgcccgaccagatggtggtggagatcagcagaagcttccccgagcagcccgacagaaccgacctggtgaaggagctgctgttcgacgccatcggcagatactacagcagcagagagcccctgctgaaccacctgagcgacgtgcacaacggcatcgccgagctgctggtgaacggcaagaccgagatcgccctggaggccacccagctgctgctgaagctgctggacttccagaacagagaggagttcagaagactgctgtacttcatggccgtggccgccaaccccagcgagttcaagctgcagaaggagagcgacaacagaatggtggtgaagagaatcttcagcaaggccatcgtggacaacaagaacctgagcaagggcaagaccgacctgctggtgctgttcctgatggaccaccagaaggacgtgttcaagatccccggcaccctgcacaagatcgtgagcgtgaagctgatggccatccagaacggcagagaccccaacagagacgccggctacatctactgccagagaatcgaccagagagactacagcaacaacaccgagaagaccaccaaggacgagctgctgaacctgctgaagaccctggacgaggacagcaagctgagcgccaaggagaagaagaagctgctgggccagttctacaagtgccaccccgacatcttcatcgagcacttcggcgactag

SEQ ID NO: 79047 - DNA, 1230 bp, synthetic construct
  misc_feature 1..1230: note = Description of Artificial Sequence: Synthetic coding sequence
  source 1..1230: mol_type = other DNA
atggaggagggcggcagcaccggcagcgccggcagcgacagcagcaccagcggcagcggcggcgcccagcagagagagctggagagaatggccgaggtgctggtgaccggcgagcagctgagactgagactgcacgaggagaaggtgatcaaggacagaagacaccacctgaagacctaccccaactgcttcgtggccaaggagctgatcgactggctgatcgagcacaaggaggccagcgacagagagaccgccatcaagctgatgcagaagctggccgacagaggcatcatccaccacgtgtgcgacgagcacaaggagttcaaggacgtgaagctgttctacagattcagaaaggacgacggcaccttccccctggacaacgaggtgaaggccttcatgagaggccagagactgtacgagaagctgatgagccccgagaacaccctgctgcagcccagagaggaggagggcgtgaagtacgagagaaccttcatggccagcgagttcctggactggctggtgcaggagggcgaggccaccaccagaaaggaggccgagcagctgtgccacagactgatggagcacggcatcatccagcacgtgagcaacaagcaccccttcgtggacagcaacctgctgtaccagttcagaatgaacttcagaagaagaagaagactgatggagctgctgaacgagaagagccccagcagccaggagacccacgacagccccttctgcctgagaaagcagagccacgacaacagaaagagcaccagcttcatgagcgtgagccccagcaaggagatcaagatcgtgagcgccgtgagaagaagcagcatgagcagctgcggcagcagcggctacttcagcagcagccccaccctgagcagcagcccccccgtgctgtgcaaccccaagagcgtgctgaagagacccgtgaccagcgaggagctgctgacccccggcgccccctacgccagaaagaccttcaccatcgtgggcgacgccgtgggctggggcttcgtggtgagaggcagcaagccctgccacatccaggccgtggaccccagcggccccgccgccgccgccggcatgaaggtgtgccagttcgtggtgagcgtgaacggcctgaacgtgctgcacgtggactacagaaccgtgagcaacctgatcctgaccggccccagaaccatcgtgatggaggtgatggaggagctggagtgctag

SEQ ID NO: 79048 - DNA, 2877 bp, synthetic construct
  misc_feature 1..2877: note = Description of Artificial Sequence: Synthetic coding sequence
  source 1..2877: mol_type = other DNA
atgagaacccacaccagaggcgcccccagcgtgttcttcatctacctgctgtgcttcgtgagcgcctacatcaccgacgagaaccccgaggtgatgatccccttcaccaacgccaactacgacagccaccccatgctgtacttcagcagagccgaggtggccgagctgcagctgagagccgccagcagccacgagcacatcgccgccagactgaccgaggccgtgcacaccatgctgagcagccccctggagtacctgcccccctgggaccccaaggactacagcgccagatggaacgagatcttcggcaacaacctgggcgccctggccatgttctgcgtgctgtaccccgagaacatcgaggccagagacatggccaaggactacatggagagaatggccgcccagcccagctggctggtgaaggacgccccctgggacgaggtgcccctggcccacagcctggtgggcttcgccaccgcctacgacttcctgtacaactacctgagcaagacccagcaggagaagttcctggaggtgatcgccaacgccagcggctacatgtacgagaccagctacagaagaggctggggcttccagtacctgcacaaccaccagcccaccaactgcatggccctgctgaccggcagcctggtgctgatgaaccagggctacctgcaggaggcctacctgtggaccaagcaggtgctgaccatcatggagaagagcctggtgctgctgagagaggtgaccgacggcagcctgtacgagggcgtggcctacggcagctacaccaccagaagcctgttccagtacatgttcctggtgcagagacacttcaacatcaaccacttcggccacccctggctgaagcagcacttcgccttcatgtacagaaccatcctgcccggcttccagagaaccgtggccatcgccgacagcaactacaactggttctacggccccgagagccagctggtgttcctggacaagttcgtgatgagaaacggcagcggcaactggctggccgaccagatcagaagaaacagagtggtggagggccccggcacccccagcaagggccagagatggtgcaccctgcacaccgagttcctgtggtacgacggcagcctgaagagcgtgcccccccccgacttcggcacccccaccctgcactacttcgaggactggggcgtggtgacctacggcagcgccctgcccgccgagatcaacagaagcttcctgagcttcaagagcggcaagctgggcggcagagccatctacgacatcgtgcacagaaacaagtacaaggactggatcaagggctggagaaacttcaacgccggccacgagcaccccgaccagaacagcttcaccttcgcccccaacggcgtgcccttcatcaccgaggccctgtacggccccaagtacaccttcttcaacaacgtgctgatgttcagccccgccgtgagcaagagctgcttcagcccctgggtgggccaggtgaccgaggactgcagcagcaagtggagcaagtacaagcacgacctggccgccagctgccagggcagagtggtggccgccgaggagaagaacggcgtggtgttcatcagaggcgagggcgtgggcgcctacaacccccagctgaacctgaagaacgtgcagagaaacctgatcctgctgcacccccagctgctgctgctggtggaccagatccacctgggcgaggagagccccctggagaccgccgccagcttcttccacaacgtggacgtgcccttcgaggagaccgtggtggacggcgtgcacggcgccttcatcagacagagagacggcctgtacaagatgtactggatggacgacaccggctacagcgagaaggccaccttcgccagcgtgacctaccccagaggctacccctacaacggcaccaactacgtgaacgtgaccatgcacctgagaagccccatcaccagagccgcctacctgttcatcggccccagcatcgacgtgcagagcttcaccgtgcacggcgacagccagcagctggacgtgttcatcgccaccagcaagcacgcctacgccacctacctgtggaccggcgaggccaccggccagagcgccttcgcccaggtgatcgccgacagacacaagatcctgttcgacagaaacagcgccatcaagagcagcatcgtgcccgaggtgaaggactacgccgccatcgtggagcagaacctgcagcacttcaagcccgtgttccagctgctggagaagcagatcctgagcagagtgagaaacaccgccagcttcagaaagaccgccgagagactgctgagattcagcgacaagagacagaccgaggaggccatcgacagaatcttcgccatcagccagcagcagcagcagcagagcaagagcaagaagaacagaagagccggcaagagatacaagttcgtggacgccgtgcccgacatcttcgcccagatcgaggtgaacgagaagaagatcagacagaaggcccagatcctggcccagaaggagctgcccatcgacgaggacgaggagatgaaggacctgctggacttcgccgacgtgacctacgagaagcacaagaacggcggcctgatcaagggcagattcggccaggccagaatggtgaccaccacccacagcagagcccccagcctgagcgccagctacaccagactgttcctgatcctgaacatcgccatcttcttcgtgatgctggccatgcagctgacctacttccagagagcccagagcctgcacggccagagatgcctgtacgccgtgctgctgatcgacagctgcatcctgctgtggctgtacagcagctgcagccagagccagtgctag

SEQ ID NO: 79049 - DNA, 2877 bp, synthetic construct; identical to SEQ ID NO: 79048
  misc_feature 1..2877: note = Description of Artificial Sequence: Synthetic coding sequence
  source 1..2877: mol_type = other DNA

SEQ ID NO: 79050 - DNA, 501 bp, synthetic construct
  misc_feature 1..501: note = Description of Artificial Sequence: Synthetic coding sequence
  source 1..501: mol_type = other DNA
atgagaacccacaccagaggcgcccccagcgtgttcttcatctacctgctgtgcttcgtgagcgcctacatcaccgacgagaaccccgaggtgatgatccccttcaccaacgccaactacgacagccaccccatgctgtacttcagcagagccgaggtggccgagctgcagctgagagccgccagcagccacgagcacatcgccgccagactgaccgaggccgtgcacaccatgctgagcagccccctggagtacctgcccccctgggaccccaaggactacagcgccagatggaacgagatcttcggcaacaacctgggcgccctggccatgttctgcgtgctgtaccccgagaacatcgaggccagagacatggccaaggactacatggagagaatggccgcccagcccagctggctggtgaaggacgccccctgggacgaggtgcccctggcccacagcctggtgggcttcgccaccgcctacgacttcctgtactag

SEQ ID NO: 79051 - DNA, 2877 bp, synthetic construct; identical to SEQ ID NO: 79048
  misc_feature 1..2877: note = Description of Artificial Sequence: Synthetic coding sequence
  source 1..2877: mol_type = other DNA

SEQ ID NO: 79052 - DNA, 2934 bp, synthetic construct
  misc_feature 1..2934: note = Description of Artificial Sequence: Synthetic coding sequence
  source 1..2934: mol_type = other DNA
atgggcagcttcgaggacggcctggccgccctggagatctggagaagcgacgccaccatgagaacccacaccagaggcgcccccagcgtgttcttcatctacctgctgtgcttcgtgagcgcctacatcaccgacgagaaccccgaggtgatgatccccttcaccaacgccaactacgacagccaccccatgctgtacttcagcagagccgaggtggccgagctgcagctgagagccgccagcagccacgagcacatcgccgccagactgaccgaggccgtgcacaccatgctgagcagccccctggagtacctgcccccctgggaccccaaggactacagcgccagatggaacgagatcttcggcaacaacctgggcgccctggccatgttctgcgtgctgtaccccgagaacatcgaggccagagacatggccaaggactacatggagagaatggccgcccagcccagctggctggtgaaggacgccccctgggacgaggtgcccctggcccacagcctggtgggcttcgccaccgcctacgacttcctgtacaactacctgagcaagacccagcaggagaagttcctggaggtgatcgccaacgccagcggctacatgtacgagaccagctacagaagaggctggggcttccagtacctgcacaaccaccagcccaccaactgcatggccctgctgaccggcagcctggtgctgatgaaccagggctacctgcaggaggcctacctgtggaccaagcaggtgctgaccatcatggagaagagcctggtgctgctgagagaggtgaccgacggcagcctgtacgagggcgtggcctacggcagctacaccaccagaagcctgttccagtacatgttcctggtgcagagacacttcaacatcaaccacttcggccacccctggctgaagcagcacttcgccttcatgtacagaaccatcctgcccggcttccagagaaccgtggccatcgccgacagcaactacaactggttctacggccccgagagccagctggtgttcctggacaagttcgtgatgagaaacggcagcggcaactggctggccgaccagatcagaagaaacagagtggtggagggccccggcacccccagcaagggccagagatggtgcaccctgcacaccgagttcctgtggtacgacggcagcctgaagagcgtgcccccccccgacttcggcacccccaccctgcactacttcgaggactggggcgtggtgacctacggcagcgccctgcccgccgagatcaacagaagcttcctgagcttcaagagcggcaagctgggcggcagagccatctacgacatcgtgcacagaaacaagtacaaggactggatcaagggctggagaaacttcaacgccggccacgagcaccccgaccagaacagcttcaccttcgcccccaacggcgtgcccttcatcaccgaggccctgtacggccccaagtacaccttcttcaacaacgtgctgatgttcagccccgccgtgagcaagagctgcttcagcccctgggtgggccaggtgaccgaggactgcagcagcaagtggagcaagtacaagcacgacctggccgccagctgccagggcagagtggtggccgccgaggagaagaacggcgtggtgttcatcagaggcgagggcgtgggcgcctacaacccccagctgaacctgaagaacgtgcagagaaacctgatcctgctgcacccccagctgctgctgctggtggaccagatccacctgggcgaggagagccccctggagaccgccgccagcttcttccacaacgtggacgtgcccttcgaggagaccgtggtggacggcgtgcacggcgccttcatcagacagagagacggcctgtacaagatgtactggatggacgacaccggctacagcgagaaggccaccttcgccagcgtgacctaccccagaggctacccctacaacggcaccaactacgtgaacgtgaccatgcacctgagaagccccatcaccagagccgcctacctgttcatcggccccagcatcgacgtgcagagcttcaccgtgcacggcgacagccagcagctggacgtgttcatcgccaccagcaagcacgcctacgccacctacctgtggaccggcgaggccaccggccagagcgccttcgcccaggtgatcgccgacagacacaagatcctgttcgacagaaacagcgccatcaagagcagcatcgtgcccgaggtgaaggactacgccgccatcgtggagcagaacctgcagcacttcaagcccgtgttccagctgctggagaagcagatcctgagcagagtgagaaacaccgccagcttcagaaagaccgccgagagactgctgagattcagcgacaagagacagaccgaggaggccatcgacagaatcttcgccatcagccagcagcagcagcagcagagcaagagcaagaagaacagaagagccggcaagagatacaagttcgtggacgccgtgcccgacatcttcgcccagatcgaggtgaacgagaagaagatcagacagaaggcccagatcctggcccagaaggagctgcccatcgacgaggacgaggagatgaaggacctgctggacttcgccgacgtgacctacgagaagcacaagaacggcggcctgatcaagggcagattcggccaggccagaatggtgaccaccacccacagcagagcccccagcctgagcgccagctacaccagactgttcctgatcctgaacatcgccatcttcttcgtgatgctggccatgcagctgacctacttccagagagcccagagcctgcacggccagagatgcctgtacgccgtgctgctgatcgacagctgcatcctgctgtggctgtacagcagctgcagccagagccagtgctag

SEQ ID NO: 79053 - DNA, 570 bp, synthetic construct
  misc_feature 1..570: note = Description of Artificial Sequence: Synthetic coding sequence
  source 1..570: mol_type = other DNA
atggccgccctgaagggcagacaggtgtactgggccaccgccggcaagatcagcggctggacctggccccacgcccccagaagaccccacgtgctgctgctgaacggcatcggcgtgggcggcgccctgggcagcatcgacgagctgctgtgccaggccctgagcaacggcctgaacgtgcccgagggcagcctgaccagcacctgcgcccagcagcccgacggcctgatccacaccgccaagtggggccacgtgcacagcctgagcagccacagccccggcgcccccaacgcctgcggcgtgctgcccggcaccaccgtggacgacggcgtgcaccaggacctgcagagagtgctggcctgcgagcaggtgtacgacctggagggcatgctggacgacgcccacagccacgagctgctggccgtggtggccgccgtgcaccaccacggcgtgagcaaggccctgcacaacggcaccctgagcttcgtggaggccttcggcggcatccccccctgcaccgtgagaatcttcagaagatggttcggctgcctgggcgacctggagatctag

SEQ ID NO: 79054 - DNA, 3669 bp, synthetic construct
  misc_feature 1..3669: note = Description of Artificial Sequence: Synthetic coding sequence
  source 1..3669: mol_type = other DNA
atgcccaagggcggcgcccccccctggatcatggccctgatgttcaccggccacctgctgttcctggccctgctgatgttcgccttcagcaccttcgaggagagcgtgagcaactacagcgagtgggccgtgttcaccgacgacatcgaccagttcaagacccagaaggtgcaggacttcagacccaaccagaagctgaagaagagcatgctgcaccccagcctgtacttcgacgccggcgagatccaggccatgagacagaagagcagagccagccacctgcacctgttcagagccatcagaagcgccgtgaccgtgatgctgagcaaccccacctactacctgcccccccccaagcacgccgacttcgccgccaagtggaacgagatctacggcaacaacctgccccccctggccctgtactgcctgctgtgccccgaggacaaggtggccttcgagttcgtgctggagtacatggacagaatggtgggctacaaggactggctggtggagaacgcccccggcgacgaggtgcccatcggccacagcctgaccggcttcgccaccgccttcgacttcctgtacaacctgctggacaaccacagaagacagaagtacctggagaagatctgggtgatcaccgaggagatgtacgagtacagcaaggtgagaagctggggcaagcagctgctgcacaaccaccaggccaccaacatgatcgccctgctgaccggcgccctggtgaccggcgtggacaagggcagcaaggccaacatctggaagcaggccgtggtggacgtgatggagaagaccatgttcctgctgaaccacatcgtggacggcagcctggacgagggcgtggcctacggcagctacaccgccaagagcgtgacccagtacgtgttcctggcccagagacacttcaacatcaacaacctggacaacaactggctgaagatgcacttctggttctactacgccaccctgctgcccggcttccagagaaccgtgggcatcgccgacagcaactacaactggttctacggccccgagagccagctggtgttcctggacaagttcatcctgaagaacggcgccggcaactggctggcccagcagatcagaaagcacagacccaaggacggccccatggtgcccagcaccgcccagagatggagcaccctgcacaccgagtacatctggtacgacccccagctgaccccccagccccccgccgactacggcaccgccaagatccacaccttccccaactggggcgtggtgacctacggcgccggcctgcccaacacccagaccaacaccttcgtgagcttcaagagcggcaagctgggcggcagagccgtgtacgacatcgtgcacttccagccctacagctggatcgacggctggagaagcttcaaccccggccacgagcaccccgaccagaacagcttcaccttcgcccccaacggccaggtgttcgtgagcgaggccctgtacggccccaagctgagccacctgaacaacgtgctggtgttcgcccccagccccagcagccagtgcaacaagccctgggagggccagctgggcgagtgcgcccagtggctgaagtggaccggcgaggaggtgggcgacgccgccggcgagatcatcaccgccagccagcacggcgagatggtgttcgtgagcggcgaggccgtgagcgcctacagcagcgccatgagactgaagagcgtgtacagagccctgctgctgctgaacagccagaccctgctggtggtggaccacatcgagagacaggaggacagccccatcaacagcgtgagcgccttcttccacaacctggacatcgacttcaagtacatcccctacaagttcatgaacagatacaacggcgccatgatggacgtgtgggacgcccactacaagatgttctggttcgaccaccacggcaacagccccatggccagcatccaggaggccgagcaggccgccgagttcaagaagagatggacccagttcgtgaacgtgaccttccagatggagcccaccatcaccagaatcgcctacgtgttctacggcccctacatcaacgtgagcagctgcagattcatcgacagcagcaaccccggcctgcagatcagcctgaacgtgaacaacaccgagcacgtggtgagcatcgtgaccgactaccacaacctgaagaccagattcaactacctgggcttcggcggcttcgccagcgtggccgaccagggccagatcaccagattcggcctgggcacccaggccatcgtgaagcccgtgagacacgacagaatcatcttccccttcggcttcaagttcaacatcgccgtgggcctgatcctgtgcatcagcctggtgatcctgaccttccagtggagattctacctgagcttcagaaagctgatgagatggatcctgatcctggtgatcgccctgtggttcatcgagctgctggacgtgtggagcacctgcagccagcccatctgcgccaagtggaccagaaccgaggccgagggcagcaagaagagcctgagcagcgagggccaccacatggacctgcccgacgtggtgatcaccagcctgcccggcagcggcgccgagatcctgaagcagctgttcttcaacagcagcgacttcctgtacatcagagtgcccaccgcctacatcgacatccccgagaccgagctggagatcgacagcttcgtggacgcctgcgagtggaaggtgagcgacatcagaagcggccacttcagactgctgagaggctggctgcagagcctggtgcaggacaccaagctgcacctgcagaacatccacctgcacgagcccaacagaggcaagctggcccagtacttcgccatgaacaaggacaagaagagaaagttcaagagaagagagagcctgcccgagcagagaagccagatgaagggcgccttcgacagagacgccgagtacatcagagccctgagaagacacctggtgtactaccccagcgccagacccgtgctgagcctgagcagcggcagctggaccctgaagctgcacttcttccaggaggtgctgggcgccagcatgagagccctgtacatcgtgagagaccccagagcctggatctacagcatgctgtacaacagcaagcccagcctgtacagcctgaagaacgtgcccgagcacctggccaagctgttcaagatcgagggcggcaagggcaagtgcaacctgaacagcggctacgccttcgagtacgagcccctgagaaaggagctgagcaagagcaagagcaacgccgtgagcctgctgagccacctgtggctggccaacaccgccgccgccctgagaatcaacaccgacctgctgcccaccagctaccagctggtgaagttcgaggacatcgtgcacttcccccagaagaccaccgagagaatcttcgccttcctgggcatccccctgagccccgccagcctgaaccagatcctgttcgccaccagcaccaacctgttctacctgccctacgagggcgagatcagccccaccaacaccaacgtgtggaagcagaacctgcccagagacgagatcaagctgatcgagaacatctgctggaccctgatggacagactgggctaccccaagttcatggactag

SEQ ID NO: 79055 - DNA, 3639 bp, synthetic construct
  misc_feature 1..3639: note = Description of Artificial Sequence: Synthetic coding sequence
  source 1..3639: mol_type = other DNA
atggccctgatgttcaccggccacctgctgttcctggccctgctgatgttcgccttcagcaccttcgaggagagcgtgagcaactacagcgagtgggccgtgttcaccgacgacatcgaccagttcaagacccagaaggtgcaggacttcagacccaaccagaagctgaagaagagcatgctgcaccccagcctgtacttcgacgccggcgagatccaggccatgagacagaagagcagagccagccacctgcacctgttcagagccatcagaagcgccgtgaccgtgatgctgagcaaccccacctactacctgcccccccccaagcacgccgacttcgccgccaagtggaacgagatctacggcaacaacctgccccccctggccctgtactgcctgctgtgccccgaggacaaggtggccttcgagttcgtgctggagtacatggacagaatggtgggctacaaggactggctggtggagaacgcccccggcgacgaggtgcccatcggccacagcctgaccggcttcgccaccgccttcgacttcctgtacaacctgctggacaaccacagaagacagaagtacctggagaagatctgggtgatcaccgaggagatgtacgagtacagcaaggtgagaagctggggcaagcagctgctgcacaaccaccaggccaccaacatgatcgccctgctgaccggcgccctggtgaccggcgtggacaagggcagcaaggccaacatctggaagcaggccgtggtggacgtgatggagaagaccatgttcctgctgaaccacatcgtggacggcagcctggacgagggcgtggcctacggcagctacaccgccaagagcgtgacccagtacgtgttcctggcccagagacacttcaacatcaacaacctggacaacaactggctgaagatgcacttctggttctactacgccaccctgctgcccggcttccagagaaccgtgggcatcgccgacagcaactacaactggttctacggccccgagagccagctggtgttcctggacaagttcatcctgaagaacggcgccggcaactggctggcccagcagatcagaaagcacagacccaaggacggccccatggtgcccagcaccgcccagagatggagcaccctgcacaccgagtacatctggtacgacccccagctgaccccccagccccccgccgactacggcaccgccaagatccacaccttccccaactggggcgtggtgacctacggcgccggcctgcccaacacccagaccaacaccttcgtgagcttcaagagcggcaagctgggcggcagagccgtgtacgacatcgtgcacttccagccctacagctggatcgacggctggagaagcttcaaccccggccacgagcaccccgaccagaacagcttcaccttcgcccccaacggccaggtgttcgtgagcgaggccctgtacggccccaagctgagccacctgaacaacgtgctggtgttcgcccccagccccagcagccagtgcaacaagccctgggagggccagctgggcgagtgcgcccagtggctgaagtggaccggcgaggaggtgggcgacgccgccggcgagatcatcaccgccagccagcacggcgagatggtgttcgtgagcggcgaggccgtgagcgcctacagcagcgccatgagactgaagagcgtgtacagagccctgctgctgctgaacagccagaccctgctggtggtggaccacatcgagagacaggaggacagccccatcaacagcgtgagcgccttcttccacaacctggacatcgacttcaagtacatcccctacaagttcatgaacagatacaacggcgccatgatggacgtgtgggacgcccactacaagatgttctggttcgaccaccacggcaacagccccatggccagcatccaggaggccgagcaggccgccgagttcaagaagagatggacccagttcgtgaacgtgaccttccagatggagcccaccatcaccagaatcgcctacgtgttctacggcccctacatcaacgtgagcagctgcagattcatcgacagcagcaaccccggcctgcagatcagcctgaacgtgaacaacaccgagcacgtggtgagcatcgtgaccgactaccacaacctgaagaccagattcaactacctgggcttcggcggcttcgccagcgtggccgaccagggccagatcaccagattcggcctgggcacccaggccatcgtgaagcccgtgagacacgacagaatcatcttccccttcggcttcaagttcaacatcgccgtgggcctgatcctgtgcatcagcctggtgatcctgaccttccagtggagattctacctgagcttcagaaagctgatgagatggatcctgatcctggtgatcgccctgtggttcatcgagctgctggacgtgtggagcacctgcagccagcccatctgcgccaagtggaccagaaccgaggccgagggcagcaagaagagcctgagcagcgagggccaccacatggacctgcccgacgtggtgatcaccagcctgcccggcagcggcgccgagatcctgaagcagctgttcttcaacagcagcgacttcctgtacatcagagtgcccaccgcctacatcgacatccccgagaccgagctggagatcgacagcttcgtggacgcctgcgagtggaaggtgagcgacatcagaagcggccacttcagactgctgagaggctggctgcagagcctggtgcaggacaccaagctgcacctgcagaacatccacctgcacgagcccaacagaggcaagctggcccagtacttcgccatgaacaaggacaagaagagaaagttcaagagaagagagagcctgcccgagcagagaagccagatgaagggcgccttcgacagagacgccgagtacatcagagccctgagaagacacctggtgtactaccccagcgccagacccgtgctgagcctgagcagcggcagctggaccctgaagctgcacttcttccaggaggtgctgggcgccagcatgagagccctgtacatcgtgagagaccccagagcctggatctacagcatgctgtacaacagcaagcccagcctgtacagcctgaagaacgtgcccgagcacctggccaagctgttcaagatcgagggcggcaagggcaagtgcaacctgaacagcggctacgccttcgagtacgagcccctgagaaaggagctgagcaagagcaagagcaacgccgtgagcctgctgagccacctgtggctggccaacaccgccgccgccctgagaatcaacaccgacctgctgcccaccagctaccagctggtgaagttcgaggacatcgtgcacttcccccagaagaccaccgagagaatcttcgccttcctgggcatccccctgagccccgccagcctgaaccagatcctgttcgccaccagcaccaacctgttctacctgccctacgagggcgagatcagccccaccaacaccaacgtgtggaagcagaacctgcccagagacgagatcaagctgatcgagaacatctgctggaccctgatggacagactgggctaccccaagttcatggactag

SEQ ID NO: 79056 - DNA, 606 bp, synthetic construct
  misc_feature 1..606: note = Description of Artificial Sequence: Synthetic coding sequence
  source 1..606: mol_type = other DNA
atggacctgagcctgctgtgggtgctgctgcccctggtgaccatggcctggggccagtacggcgactacggctacccctaccagcagtaccacgactacagcgacgacggctgggtgaacctgaacagacagggcttcagctaccagtgcccccagggccaggtgatcgtggccgtgagaagcatcttcagcaagaaggagggcagcgacagacagtggaactacgcctgcatgcccaccccccagagcctgggcgagcccaccgagtgctggtgggaggagatcaacagagccggcatggagtggtaccagacctgcagcaacaacggcctggtggccggcttccagagcagatacttcgagagcgtgctggacagagagtggcagttctactgctgcagatacagcaagagatgcccctacagctgctggctgaccaccgagtaccccggccactacggcgaggagatggacatgatcagctacaactacgactactacatcagaggcgccaccaccaccttcagcgccgtggagagagacagacagtggaagttcatcatgtgcagaatgaccgagtacgactgcgagttcgccaacgtgtag

SEQ ID NO: 79057 - DNA, 333 bp, synthetic construct
  misc_feature 1..333: note = Description of Artificial Sequence: Synthetic coding sequence
  source 1..333: mol_type = other DNA
atgagattcatgaccctgctgttcctgaccgccctggccggcgccctggtgtgcgcctacgaccccgaggccgccagcgcccccggcagcggcaacccctgccacgaggccagcgccgcccagaaggagaacgccggcgaggaccccggcctggccagacaggcccccaagcccagaaagcagagaagcagcctgctggagaagggcctggacggcgccaagaaggccgtgggcggcctgggcaagctgggcaaggacgccgtggaggacctggagagcgtgggcaagggcgccgtgcacgacgtgaaggacgtgctggacagcgtgctgtag

SEQ ID NO: 79058 - DNA, 1191 bp, synthetic construct
  misc_feature 1..1191: note = Description of Artificial Sequence: Synthetic coding sequence
  source 1..1191: mol_type = other DNA
atggccctgctgaccaacctgctgcccctgtgctgcctggccctgctggccctgcccgcccagagctgcggccccggcagaggccccgtgggcagaagaagatacgccagaaagcagctggtgcccctgctgtacaagcagttcgtgcccggcgtgcccgagagaaccctgggcgccagcggccccgccgagggcagagtggccagaggcagcgagagattcagagacctggtgcccaactacaaccccgacatcatcttcaaggacgaggagaacagcggcgccgacagactgatgaccgagagatgcaaggagagagtgaacgccctggccatcgccgtgatgaacatgtggcccggcgtgagactgagagtgaccgagggctgggacgaggacggccaccacgcccaggacagcctgcactacgagggcagagccctggacatcaccaccagcgacagagacagaaacaagtacggcctgctggccagactggccgtggaggccggcttcgactgggtgtactacgagagcagaaaccacgtgcacgtgagcgtgaaggccgacaacagcctggccgtgagagccggcggctgcttccccggcaacgccaccgtgagactgtggagcggcgagagaaagggcctgagagagctgcacagaggcgactgggtgctggccgccgacgccagcggcagagtggtgcccacccccgtgctgctgttcctggacagagacctgcagagaagagccagcttcgtggccgtggagaccgagtggccccccagaaagctgctgctgaccccctggcacctggtgttcgccgccagaggccccgcccccgcccccggcgacttcgcccccgtgttcgccagaagactgagagccggcgacagcgtgctggcccccggcggcgacgccctgagacccgccagagtggccagagtggccagagaggaggccgtgggcgtgttcgcccccctgaccgcccacggcaccctgctggtgaacgacgtgctggccagctgctacgccgtgctggagagccaccagtgggcccacagagccttcgcccccctgagactgctgcacgccctgggcgccctgctgcccggcggcgccgtgcagcccaccggcatgcactggtacagcagactgctgtacagactggccgaggagctgctgggctag

SEQ ID NO: 79059 - DNA, 1413 bp, synthetic construct
  misc_feature 1..1413: note = Description of Artificial Sequence: Synthetic coding sequence
  source 1..1413: mol_type = other DNA
atgagccaggcctacagcagcagccagagagtgagcagctacagaagaaccttcggcggcgcccccggcttccccctgggcagccccctgagcagccccgtgttccccagagccggcttcggcagcaagggcagcagcagcagcgtgaccagcagagtgtaccaggtgagcagaaccagcggcggcgccggcggcctgggcagcctgagagccagcagactgggcaccaccagaacccccagcagctacggcgccggcgagctgctggacttcagcctggccgacgccgtgaaccaggagttcctgaccaccagaaccaacgagaaggtggagctgcaggagctgaacgacagattcgccaactacatcgagaaggtgagattcctggagcagcagaacgccgccctggccgccgaggtgaacagactgaagggcagagagcccaccagagtggccgagctgtacgaggaggagctgagagagctgagaagacaggtggaggtgctgaccaaccagagagccagagtggacgtggagagagacaacctgctggacgacctgcagagactgaaggccaagctgcaggaggagatccagctgaaggaggaggccgagaacaacctggccgccttcagagccgacgtggacgccgccaccctggccagaatcgacctggagagaagaatcgagagcctgaacgaggagatcgccttcctgaagaaggtgcacgaggaggagatcagagagctgcaggcccagctgcaggagcagcaggtgcaggtggagatggacatgagcaagcccgacctgaccgccgccctgagagacatcagagcccagtacgagaccatcgccgccaagaacatcagcgaggccgaggagtggtacaagagcaaggtgagcgacctgacccaggccgccaacaagaacaacgacgccctgagacaggccaagcaggagatgatggagtacagacaccagatccagagctacacctgcgagatcgacgccctgaagggcaccaacgacagcctgatgagacagatgagagagctggaggacagattcgccagcgaggccagcggctaccaggacaacatcgccagactggaggaggagatcagacacctgaaggacgagatggccagacacctgagagagtaccaggacctgctgaacgtgaagatggccctggacgtggagatcgccacctacagaaagctgctggagggcgaggagagcagaatcaacctgcccatccagacctacagcgccctgaacttcagagagaccagccccgagcagagaggcagcgaggtgcacaccaagaagaccgtgatgatcaagaccatcgagaccagagacggcgaggtggtgagcgaggccacccagcagcagcacgaggtgctgtag

SEQ ID NO: 79060 - DNA, 2523 bp, synthetic construct
  misc_feature 1..2523: note = Description of Artificial Sequence: Synthetic coding sequence
  source 1..2523: mol_type = other DNA
atggccctggccagcgccgcccccggcagcatcttctgcaagcagctgctgttcagcctgctggtgctgaccctgctgtgcgacgcctgccagaaggtgtacctgagagtgcccagccacctgcaggccgagaccctggtgggcaaggtgaacctggaggagtgcctgaagagcgccagcctgatcagaagcagcgaccccgccttcagaatcctggaggacggcagcatctacaccacccacgacctgatcctgagcagcgagagaaagagcttcagcatcttcctgagcgacggccagagaagagagcagcaggagatcaaggtggtgctgagcgccagagagaacaagagccccaagaagagacacaccaaggacaccgccctgaagagaagcaagagaagatgggcccccatccccgccagcctgatggagaacagcctgggccccttcccccagcacgtgcagcagatccagagcgacgccgcccagaactacaccatcttctacagcatcagcggccccggcgtggacaaggagcccttcaacctgttctacatcgagaaggacaccggcgacatcttctgcaccagaagcatcgacagagagaagtacgagcagttcgccctgtacggctacgccaccaccgccgacggctacgcccccgagtaccccctgcccctgatcatcaagatcgaggacgacaacgacaacgccccctacttcgagcacagagtgaccatcttcaccgtgcccgagaactgcagaagcggcaccagcgtgggcaaggtgaccgccaccgacctggacgagcccgacaccctgcacaccagactgaagtacaagatcctgcagcagatccccgaccaccccaagcacttcagcatccaccccgacaccggcgtgatcaccaccaccacccccttcctggacagagagaagtgcgacacctaccagctgatcatggaggtgagagacatgggcggccagcccttcggcctgttcaacaccggcaccatcaccatcagcctggaggacgagaacgacaacccccccagcttcaccgagaccagctacgtgaccgaggtggaggagaacagaatcgacgtggagatcctgagaatgaaggtgcaggaccaggacctgcccaacaccccccacagcaaggccgtgtacaagatcctgcagggcaacgagaacggcaacttcatcatcagcaccgaccccaacaccaacgagggcgtgctgtgcgtggtgaagcccctgaactacgaggtgaacagacaggtgatcctgcaggtgggcgtgatcaacgaggcccagttcagcaaggccgccagcagccagacccccaccatgtgcaccaccaccgtgaccgtgaagatcatcgacagcgacgagggccccgagtgccacccccccgtgaaggtgatccagagccaggacggcttccccgccggccaggagctgctgggctacaaggccctggaccccgagatcagcagcggcgagggcctgagataccagaagctgggcgacgaggacaactggttcgagatcaaccagcacaccggcgacctgagaaccctgaaggtgctggacagagagagcaagttcgtgaagaacaaccagtacaacatcagcgtggtggccgtggacgccgtgggcagaagctgcaccggcaccctggtggtgcacctggacgactacaacgaccacgccccccagatcgacaaggaggtgaccatctgccagaacaacgaggacttcgccgtgctgaagcccgtggaccccgacggccccgagaacggcccccccttccagttcttcctggacaacagcgccagcaagaactggaacatcgaggagaaggacggcaagaccgccatcctgagacagagacagaacctggactacaactactacagcgtgcccatccagatcaaggacagacacggcctggtggccacccacatgctgaccgtgagagtgtgcgactgcagcacccccagcgagtgcagaatgaaggacaagagcaccagagacgtgagacccaacgtgatcctgggcagatgggccatcctggccatggtgctgggcagcgtgctgctgctgtgcatcctgttcacctgcttctgcgtgaccgccaagagaaccgtgaagaagtgcttccccgaggacatcgcccagcagaacctgatcgtgagcaacaccgagggccccggcgaggaggtgaccgaggccaacatcagactgcccatgcagaccagcaacatctgcgacaccagcatgagcgtgggcaccgtgggcggccagggcatcaagacccagcagagcttcgagatggtgaagggcggctacaccctggacagcaacaagggcggcggccaccagaccctggagagcgtgaagggcgtgggccagggcgacaccggcagatacgcctacaccgactggcagagcttcacccagcccagactgggcgaggagagcatcagaggccacaccctgatcaagaactag

SEQ ID NO: 79061 - DNA, 2685 bp, synthetic construct
  misc_feature 1..2685: note = Description of Artificial Sequence: Synthetic coding sequence
  source 1..2685: mol_type = other DNA
atggccctggccagcgccgcccccggcagcatcttctgcaagcagctgctgttcagcctgctggtgctgaccctgctgtgcgacgcctgccagaaggtgtacctgagagtgcccagccacctgcaggccgagaccctggtgggcaaggtgaacctggaggagtgcctgaagagcgccagcctgatcagaagcagcgaccccgccttcagaatcctggaggacggcagcatctacaccacccacgacctgatcctgagcagcgagagaaagagcttcagcatcttcctgagcgacggccagagaagagagcagcaggagatcaaggtggtgctgagcgccagagagaacaagagccccaagaagagacacaccaaggacaccgccctgaagagaagcaagagaagatgggcccccatccccgccagcctgatggagaacagcctgggccccttcccccagcacgtgcagcagatccagagcgacgccgcccagaactacaccatcttctacagcatcagcggccccggcgtggacaaggagcccttcaacctgttctacatcgagaaggacaccggcgacatcttctgcaccagaagcatcgacagagagaagtacgagcagttcgccctgtacggctacgccaccaccgccgacggctacgcccccgagtaccccctgcccctgatcatcaagatcgaggacgacaacgacaacgccccctacttcgagcacagagtgaccatcttcaccgtgcccgagaactgcagaagcggcaccagcgtgggcaaggtgaccgccaccgacctggacgagcccgacaccctgcacaccagactgaagtacaagatcctgcagcagatccccgaccaccccaagcacttcagcatccaccccgacaccggcgtgatcaccaccaccacccccttcctggacagagagaagtgcgacacctaccagctgatcatggaggtgagagacatgggcggccagcccttcggcctgttcaacaccggcaccatcaccatcagcctggaggacgagaacgacaacccccccagcttcaccgagaccagctacgtgaccgaggtggaggagaacagaatcgacgtggagatcctgagaatgaaggtgcaggaccaggacctgcccaacaccccccacagcaaggccgtgtacaagatcctgcagggcaacgagaacggcaacttcatcatcagcaccgaccccaacaccaacgagggcgtgctgtgcgtggtgaagcccctgaactacgaggtgaacagacaggtgatcctgcaggtgggcgtgatcaacgaggcccagttcagcaaggccgccagcagccagacccccaccatgtgcaccaccaccgtgaccgtgaagatcatcgacagcgacgagggccccgagtgccacccccccgtgaaggtgatccagagccaggacggcttccccgccggccaggagctgctgggctacaaggccctggaccccgagatcagcagcggcgagggcctgagataccagaagctgggcgacgaggacaactggttcgagatcaaccagcacaccggcgacctgagaaccctgaaggtgctggacagagagagcaagttcgtgaagaacaaccagtacaacatcagcgtggtggccgtggacgccgtgggcagaagctgcaccggcaccctggtggtgcacctggacgactacaacgaccacgccccccagatcgacaaggaggtgaccatctgccagaacaacgaggacttcgccgtgctgaagcccgtggaccccgacggccccgagaacggcccccccttccagttcttcctggacaacagcgccagcaagaactggaacatcgaggagaaggacggcaagaccgccatcctgagacagagacagaacctggactacaactactacagcgtgcccatccagatcaaggacagacacggcctggtggccacccacatgctgaccgtgagagtgtgcgactgcagcacccccagcgagtgcagaatgaaggacaagagcaccagagacgtgagacccaacgtgatcctgggcagatgggccatcctggccatggtgctgggcagcgtgctgctgctgtgcatcctgttcacctgcttctgcgtgaccgccaagagaaccgtgaagaagtgcttccccgaggacatcgcccagcagaacctgatcgtgagcaacaccgagggccccggcgaggaggtgaccgaggccaacatcagactgcccatgcagaccagcaacatctgcgacaccagcatgagcgtgggcaccgtgggcggccagggcatcaagacccagcagagcttcgagatggtgaagggcggctacaccctggacagcaacaagggcggcggccaccagaccctggagagcgtgaagggcgtgggccagggcgacaccggcagatacgcctacaccgactggcagagcttcacccagcccagactgggcgagaaggtgtacctgtgcggccaggacgaggagcacaagcactgcgaggactacgtgtgcagctacaactacgagggcaagggcagcctggccggcagcgtgggctgctgcagcgacagacaggaggaggagggcctggagttcctggaccacctggagcccaagttcagaaccctggccaagacctgcatcaagaagtag

SEQ ID NO: 79062 - DNA, 2691 bp, synthetic construct
  misc_feature 1..2691: note = Description of Artificial Sequence: Synthetic coding sequence
  source 1..2691: mol_type = other DNA
atggccgccgccggccccagaagaagcgtgagaggcgccgtgtgcctgcacctgctgctgaccctggtgatcttcagcagagccggcgaggcctgcaagaaggtgatcctgaacgtgcccagcaagctggaggccgacaagatcatcggcagagtgaacctggaggagtgcttcagaagcgccgacctgatcagaagcagcgaccccgacttcagagtgctgaacgacggcagcgtgtacaccgccagagccgtggccctgagcgacaagaagagaagcttcaccatctggctgagcgacaagagaaagcagacccagaaggaggtgaccgtgctgctggagcaccagaagaaggtgagcaagaccagacacaccagagagaccgtgctgagaagagccaagagaagatgggcccccatcccctgcagcatgcaggagaacagcctgggccccttccccctgttcctgcagcaggtggagagcgacgccgcccagaactacaccgtgttctacagcatcagcggcagaggcgtggacaaggagcccctgaacctgttctacatcgagagagacaccggcaacctgttctgcaccagacccgtggacagagaggagtacgacgtgttcgacctgatcgcctacgccagcaccgccgacggctacagcgccgacctgcccctgcccctgcccatcagagtggaggacgagaacgacaaccaccccgtgttcaccgaggccatctacaacttcgaggtgctggagagcagcagacccggcaccaccgtgggcgtggtgtgcgccaccgacagagacgagcccgacaccatgcacaccagactgaagtacagcatcctgcagcagacccccagaagccccggcctgttcagcgtgcaccccagcaccggcgtgatcaccaccgtgagccactacctggacagagaggtggtggacaagtacagcctgatcatgaaggtgcaggacatggacggccagttcttcggcctgatcggcaccagcacctgcatcatcaccgtgaccgacagcaacgacaacgcccccaccttcagacagaacgcctacgaggccttcgtggaggagaacgccttcaacgtggagatcctgagaatccccatcgaggacaaggacctgatcaacaccgccaactggagagtgaacttcaccatcctgaagggcaacgagaacggccacttcaagatcagcaccgacaaggagaccaacgagggcgtgctgagcgtggtgaagcccctgaactacgaggagaacagacaggtgaacctggagatcggcgtgaacaacgaggcccccttcgccagagacatccccagagtgaccgccctgaacagagccctggtgaccgtgcacgtgagagacctggacgagggccccgagtgcacccccgccgcccagtacgtgagaatcaaggagaacctggccgtgggcagcaagatcaacggctacaaggcctacgaccccgagaacagaaacggcaacggcctgagatacaagaagctgcacgaccccaagggctggatcaccatcgacgagatcagcggcagcatcatcaccagcaagatcctggacagagaggtggagacccccaagaacgagctgtacaacatcaccgtgctggccatcgacaaggacgacagaagctgcaccggcaccctggccgtgaacatcgaggacgtgaacgacaacccccccgagatcctgcaggagtacgtggtgatctgcaagcccaagatgggctacaccgacatcctggccgtggaccccgacgagcccgtgcacggcgcccccttctacttcagcctgcccaacaccagccccgagatcagcagactgtggagcctgaccaaggtgaacgacaccgccgccagactgagctaccagaagaacgccggcttccaggagtacaccatccccatcaccgtgaaggacagagccggccaggccgccaccaagctgctgagagtgaacctgtgcgagtgcacccaccccacccagtgcagagccaccagcagaagcaccggcgtgatcctgggcaagtgggccatcctggccatcctgctgggcatcgccctgctgttcagcgtgctgctgaccctggtgtgcggcgtgttcggcgccaccaagggcaagagattccccgaggacctggcccagcagaacctgatcatcagcaacaccgaggcccccggcgacgacagagtgtgcagcgccaacggcttcatgacccagaccaccaacaacagcagccagggcttctgcggcaccatgggcagcggcatgaagaacggcggccaggagaccatcgagatgatgaagggcggcaaccagaccctggagagctgcagaggcgccggccaccaccacaccctggacagctgcagaggcggccacaccgaggtggacaactgcagatacacctacagcgagtggcacagcttcacccagcccagactgggcgagaagctgcacagatgcaaccagaacgaggacagaatgcccagccaggactacgtgctgacctacaactacgagggcagaggcagccccgccggcagcgtgggctgctgcagcgagaagcaggaggaggacggcctggacttcctgaacaacctggagcccaagttcatcaccctggccgaggcctgcaccaagagatag

SEQ ID NO: 79063 - DNA, 2520 bp, synthetic construct
  misc_feature 1..2520: note = Description of Artificial Sequence: Synthetic coding sequence
  source 1..2520: mol_type = other DNA
atggccgccgccggccccagaagaagcgtgagaggcgccgtgtgcctgcacctgctgctgaccctggtgatcttcagcagagccggcgaggcctgcaagaaggtgatcctgaacgtgcccagcaagctggaggccgacaagatcatcggcagagtgaacctggaggagtgcttcagaagcgccgacctgatcagaagcagcgaccccgacttcagagtgctgaacgacggcagcgtgtacaccgccagagccgtggccctgagcgacaagaagagaagcttcaccatctggctgagcgacaagagaaagcagacccagaaggaggtgaccgtgctgctggagcaccagaagaaggtgagcaagaccagacacaccagagagaccgtgctgagaagagccaagagaagatgggcccccatcccctgcagcatgcaggagaacagcctgggccccttccccctgttcctgcagcaggtggagagcgacgccgcccagaactacaccgtgttctacagcatcagcggcagaggcgtggacaaggagcccctgaacctgttctacatcgagagagacaccggcaacctgttctgcaccagacccgtggacagagaggagtacgacgtgttcgacctgatcgcctacgccagcaccgccgacggctacagcgccgacctgcccctgcccctgcccatcagagtggaggacgagaacgacaaccaccccgtgttcaccgaggccatctacaacttcgaggtgctggagagcagcagacccggcaccaccgtgggcgtggtgtgcgccaccgacagagacgagcccgacaccatgcacaccagactgaagtacagcatcctgcagcagacccccagaagccccggcctgttcagcgtgcaccccagcaccggcgtgatcaccaccgtgagccactacctggacagagaggtggtggacaagtacagcctgatcatgaaggtgcaggacatggacggccagttcttcggcctgatcggcaccagcacctgcatcatcaccgtgaccgacagcaacgacaacgcccccaccttcagacagaacgcctacgaggccttcgtggaggagaacgccttcaacgtggagatcctgagaatccccatcgaggacaaggacctgatcaacaccgccaactggagagtgaacttcaccatcctgaagggcaacgagaacggccacttcaagatcagcaccgacaaggagaccaacgagggcgtgctgagcgtggtgaagcccctgaactacgaggagaacagacaggtgaacctggagatcggcgtgaacaacgaggcccccttcgccagagacatccccagagtgaccgccctgaacagagccctggtgaccgtgcacgtgagagacctggacgagggccccgagtgcacccccgccgcccagtacgtgagaatcaaggagaacctggccgtgggcagcaagatcaacggctacaaggcctacgaccccgagaacagaaacggcaacggcctgagatacaagaagctgcacgaccccaagggctggatcaccatcgacgagatcagcggcagcatcatcaccagcaagatcctggacagagaggtggagacccccaagaacgagctgtacaacatcaccgtgctggccatcgacaaggacgacagaagctgcaccggcaccctggccgtgaacatcgaggacgtgaacgacaacccccccgagatcctgcaggagtacgtggtgatctgcaagcccaagatgggctacaccgacatcctggccgtggaccccgacgagcccgtgcacggcgcccccttctacttcagcctgcccaacaccagccccgagatcagcagactgtggagcctgaccaaggtgaacgacaccgccgccagactgagctaccagaagaacgccggcttccaggagtacaccatccccatcaccgtgaaggacagagccggccaggccgccaccaagctgctgagagtgaacctgtgcgagtgcacccaccccacccagtgcagagccaccagcagaagcaccggcgtgatcctgggcaagtgggccatcctggccatcctgctgggcatcgccctgctgttcagcgtgctgctgaccctggtgtgcggcgtgttcggcgccaccaagggcaagagattccccgaggacctggcccagcagaacctgatcatcagcaacaccgaggcccccggcgacgacagagtgtgcagcgccaacggcttcatgacccagaccaccaacaacagcagccagggcttctgcggcaccatgggcagcggcatgaagaacggcggccaggagaccatcgagatgatgaagggcggcaaccagaccctggagagctgcagaggcgccggccaccaccacaccctggacagctgcagaggcggccacaccgaggtggacaactgcagatacacctacagcgagtggcacagcttcacccagcccagactgggcgaggagagcatcagaggccacaccggctag

SEQ ID NO: 79064 - DNA, 3150 bp, synthetic construct
  misc_feature 1..3150: note = Description of Artificial Sequence: Synthetic coding sequence
  source 1..3150: mol_type = other DNA
atggactggagcttcttcagagtggtggccatgctgttcatcttcctggtggtggtggaggtgaacagcgagttcagaatccaggtgagagactacaacaccaagaacggcaccatcaagtggcacagcatcagaagacagaagagagagtggatcaagttcgccgccgcctgcagagagggcgaggacaacagcaagagaaaccccatcgccaagatccacagcgactgcgccgccaaccagcaggtgacctacagaatcagcggcgtgggcatcgaccagcccccctacggcatcttcgtgatcaaccagaagaccggcgagatcaacatcaccagcatcgtggacagagaggtgacccccttcttcatcatctactgcagagccctgaacagcatgggccaggacctggagagacccctggagctgagagtgagagtgctggacatcaacgacaacccccccgtgttcagcatggccaccttcgccggccagatcgaggagaacagcaacgccaacaccctggtgatgatcctgaacgccaccgacgccgacgagcccaacaacctgaacagcaagatcgccttcaagatcatcagacaggagcccagcgacagccccatgttcatcatcaacagaaacaccggcgagatcagaaccatgaacaacttcctggacagagagcagtacggccagtacgccctggccgtgagaggcagcgacagagacggcggcgccgacggcatgagcgccgagtgcgagtgcaacatcaagatcctggacgtgaacgacaacatcccctacatggagcagagcagctacaccatcgagatccaggagaacaccctgaacagcaacctgctggagatcagagtgatcgacctggacgaggagttcagcgccaactggatggccgtgatcttcttcatcagcggcaacgagggcaactggttcgagatcgagatgaacgagagaaccaacgtgggcatcctgaaggtggtgaagcccctggactacgaggccatgcagagcctgcagctgagcatcggcgtgagaaacaaggccgagttccaccacagcatcatgagccagtacaagctgaaggccagcgccatcagcgtgaccgtgctgaacgtgatcgagggccccgtgttcagacccggcagcaagacctacgtggtgaccggcaacatgggcagcaacgacaaggtgggcgacttcgtggccaccgacctggacaccggcagacccagcaccaccgtgagatacgtgatgggcaacaaccccgccgacctgctggccgtggacagcagaaccggcaagctgaccctgaagaacaaggtgaccaaggagcagtacaacatgctgggcggcaagtaccagggcaccatcctgagcatcgacgacaacctgcagagaacctgcaccggcaccatcaacatcaacatccagagcttcggcaacgacgacagaaccaacaccgagcccaacaccaagatcaccaccaacaccggcagacaggagagcaccagcagcaccaactacgacaccagcaccaccagcaccgacagcagccaggtgtacagcagcgagcccggcaacggcgccaaggacctgctgagcgacaacgtgcacttcggccccgccggcatcggcctgctgatcatgggcttcctggtgctgggcctggtgcccttcctgatgatctgctgcgactgcggcggcgcccccagaagcgccgccggcttcgagcccgtgcccgagtgcagcgacggcgccatccacagctgggccgtggagggcccccagcccgagcccagagacatcaccaccgtgatcccccagatcccccccgacaacgccaacatcatcgagtgcatcgacaacagcggcgtgtacaccaacgagtacggcggcagagagatgcaggacctgggcggcggcgagagaatgaccggcttcgagctgaccgagggcgtgaagaccagcggcatgcccgagatctgccaggagtacagcggcaccctgagaagaaacagcatgagagagtgcagagagggcggcctgaacatgaacttcatggagagctacttctgccagaaggcctacgcctacgccgacgaggacgagggcagacccagcaacgactgcctgctgatctacgacatcgagggcgtgggcagccccgccggcagcgtgggctgctgcagcttcatcggcgaggacctggacgacagcttcctggacaccctgggccccaagttcaagaagctggccgacatcagcctgggcaaggagagctaccccgacctggaccccagctggcccccccagagcaccgagcccgtgtgcctgccccaggagaccgagcccgtggtgagcggccacccccccatcagcccccacttcggcaccaccaccgtgatcagcgagagcacctaccccagcggccccggcgtgctgcaccccaagcccatcctggaccccctgggctacggcaacgtgaccgtgaccgagagctacaccaccagcgacaccctgaagcccagcgtgcacgtgcacgacaacagacccgccagcaacgtggtggtgaccgagagagtggtgggccccatcagcggcgccgacctgcacggcatgctggagatgcccgacctgagagacggcagcaacgtgatcgtgaccgagagagtgatcgcccccagcagcagcctgcccaccagcctgaccatccaccaccccagagagagcagcaacgtggtggtgaccgagagagtgatccagcccaccagcggcatgatcggcagcctgagcatgcaccccgagctggccaacgcccacaacgtgatcgtgaccgagagagtggtgagcggcgccggcgtgaccggcatcagcggcaccaccggcatcagcggcggcatcggcagcagcggcctggtgggcaccagcatgggcgccggcagcggcgccctgagcggcgccggcatcagcggcggcggcatcggcctgagcagcctgggcggcaccgccagcatcggccacatgagaagcagcagcgaccaccacttcaaccagaccatcggcagcgccagccccagcaccgccagaagcagaatcaccaagtacagcaccgtgcagtacagcaagtag

SEQ ID NO: 79065 - DNA, 3357 bp, synthetic construct
  misc_feature 1..3357: note = Description of Artificial Sequence: Synthetic coding sequence
  source 1..3357: mol_type = other DNA
atggccagaagccccggcagagcctacgccctgctgctgctgctgatctgcttcaacgtgggcagcggcctgcacctgcaggtgctgagcaccagaaacgagaacaagctgctgcccaagcacccccacctggtgagacagaagagagcctggatcaccgcccccgtggccctgagagagggcgaggacctgagcaagaagaaccccatcgccaagatccacagcgacctggccgaggagagaggcctgaagatcacctacaagtacaccggcaagggcatcaccgagccccccttcggcatcttcgtgttcaacaaggacaccggcgagctgaacgtgaccagcatcctggacagagaggagacccccttcttcctgctgaccggctacgccctggacgccagaggcaacaacgtggagaagcccctggagctgagaatcaaggtgctggacatcaacgacaacgagcccgtgttcacccaggacgtgttcgtgggcagcgtggaggagctgagcgccgcccacaccctggtgatgaagatcaacgccaccgacgccgacgagcccaacaccctgaacagcaagatcagctacagaatcgtgagcctggagcccgcctacccccccgtgttctacctgaacaaggacaccggcgagatctacaccaccagcgtgaccctggacagagaggagcacagcagctacaccctgaccgtggaggccagagacggcaacggcgaggtgaccgacaagcccgtgaagcaggcccaggtgcagatcagaatcctggacgtgaacgacaacatccccgtggtggagaacaaggtgctggagggcatggtggaggagaaccaggtgaacgtggaggtgaccagaatcaaggtgttcgacgccgacgagatcggcagcgacaactggctggccaacttcaccttcgccagcggcaacgagggcggctacttccacatcgagaccgacgcccagaccaacgagggcatcgtgaccctgatcaaggaggtggactacgaggagatgaagaacctggacttcagcgtgatcgtggccaacaaggccgccttccacaagagcatcagaagcaagtacaagcccacccccatccccatcaaggtgaaggtgaagaacgtgaaggagggcatccacttcaagagcagcgtgatcagcatctacgtgagcgagagcatggacagaagcagcaagggccagatcatcggcaacttccaggccttcgacgaggacaccggcctgcccgcccacgccagatacgtgaagctggaggacagagacaactggatcagcgtggacagcgtgaccagcgagatcaagctggccaagctgcccgacttcgagagcagatacgtgcagaacggcacctacaccgtgaagatcgtggccatcagcgaggactaccccagaaagaccatcaccggcaccgtgctgatcaacgtggaggacatcaacgacaactgccccaccctgatcgagcccgtgcagaccatctgccacgacgccgagtacgtgaacgtgaccgccgaggacctggacggccaccccaacagcggccccttcagcttcagcgtgatcgacaagccccccggcatggccgagaagtggaagatcgccagacaggagagcaccagcgtgctgctgcagcagagcgagaagaagctgggcagaagcgagatccagttcctgatcagcgacaaccagggcttcagctgccccgagaagcaggtgctgaccctgaccgtgtgcgagtgcctgcacggcagcggctgcagagaggcccagcacgacagctacgtgggcctgggccccgccgccatcgccctgatgatcctggccttcctgctgctgctgctggtgcccctgctgctgctgatgtgccactgcggcaagggcgccaagggcttcacccccatccccggcaccatcgagatgctgcacccctggaacaacgagggcgccccccccgaggacaaggtggtgcccagcttcctgcccgtggaccagggcggcagcctggtgggcagaaacggcgtgggcggcatggccaaggaggccaccatgaagggcagcagcagcgccagcatcgtgaagggccagcacgagatgagcgagatggacggcagatgggaggagcacagaagcctgctgagcggcagagccacccagttcaccggcgccaccggcgccatcatgaccaccgagaccaccaagaccgccagagccaccggcgccagcagagacatggccggcgcccaggccgccgccgtggccctgaacgaggagttcctgagaaactacttcaccgacaaggccgccagctacaccgaggaggacgagaaccacaccgccaaggactgcctgctggtgtacagccaggaggagaccgagagcctgaacgccagcatcggctgctgcagcttcatcgagggcgagctggacgacagattcctggacgacctgggcctgaagttcaagaccctggccgaggtgtgcctgggccagaagatcgacatcaacaaggagatcgagcagagacagaagcccgccaccgagaccagcatgaacaccgccagccacagcctgtgcgagcagaccatggtgaacagcgagaacacctacagcagcggcagcagcttccccgtgcccaagagcctgcaggaggccaacgccgagaaggtgacccaggagatcgtgaccgagagaagcgtgagcagcagacaggcccagaaggtggccacccccctgcccgaccccatggccagcagaaacgtgatcgccaccgagaccagctacgtgaccggcagcaccatgccccccaccaccgtgatcctgggccccagccagccccagagcctgatcgtgaccgagagagtgtacgcccccgccagcaccctggtggaccagccctacgccaacgagggcaccgtggtggtgaccgagagagtgatccagccccacggcggcggcagcaaccccctggagggcacccagcacctgcaggacgtgccctacgtgatggtgagagagagagagagcttcctggcccccagcagcggcgtgcagcccaccctggccatgcccaacatcgccgtgggccagaacgtgaccgtgaccgagagagtgctggcccccgccagcaccctgcagagcagctaccagatccccaccgagaacagcatgaccgccagaaacaccaccgtgagcggcgccggcgtgcccggccccctgcccgacttcggcctggaggagagcggccacagcaacagcaccatcaccaccagcagcaccagagtgaccaagcacagcaccgtgcagcacagctacagctag

SEQ ID NO: 79066 - DNA, 3123 bp, synthetic construct
  misc_feature 1..3123: note = Description of Artificial Sequence: Synthetic coding sequence
  source 1..3123: mol_type = other DNA
atggactggctgttcttcagaaacatctgcctgctgatcatcctgatggtggtgatggaggtgaacagcgagttcatcgtggaggtgaaggagttcgacatcgagaacggcaccaccaagtggcagaccgtgagaagacagaagagagagtggatcaagttcgccgccgcctgcagagagggcgaggacaacagcaagagaaaccccatcgccaagatcagaagcgactgcgagagcaaccagaagatcacctacagaatcagcggcgtgggcatcgacagacccccctacggcgtgttcaccatcaaccccagaaccggcgagatcaacatcaccagcgtggtggacagagagatcacccccctgttcctgatctactgcagagccctgaacagcagaggcgaggacctggagagacccctggagctgagagtgaaggtgatggacatcaacgacaacgcccccgtgttcagccagagcgtgtacaccgccagcatcgaggagaacagcgacgccaacaccctggtggtgaagctgtgcgccaccgacgccgacgaggagaaccacctgaacagcaagatcgcctacaagatcgtgagccaggagcccagcggcgcccccatgttcatcctgaacagatacaccggcgaggtgtgcaccatgagcagcttcctggacagagagcagcacagcatgtacaacctggtggtgagaggcagcgacagagacggcgccgccgacggcctgagcagcgagtgcgactgcagaatcaaggtgctggacgtgaacgacaacttccccaccctggagaagaccagctacagcgccagcatcgaggagaactgcctgagcagcgagctgatcagactgcaggccatcgacctggacgaggagggcaccgacaactggctggcccagtacctgatcctgagcggcaacgacggcaactggttcgacatccagaccgacccccagaccaacgagggcatcctgaaggtggtgaagatgctggactacgagcaggcccccaacatccagctgagcatcggcgtgaagaaccaggccgacttccactacagcgtggccagccagttccagatgcaccccacccccgtgagaatccaggtggtggacgtgagagagggccccgccttccaccccagcaccatggccttcagcgtgagagagggcatcaagggcagcagcctgctgaactacgtgctgggcacctacaccgccatcgacctggacaccggcaaccccgccaccgacgtgagatacatcatcggccacgacgccggcagctggctgaagatcgacagcagaaccggcgagatccagttcagcagagagttcgacaagaagagcaagtacatcatcaacggcatctacaccgccgagatcctggccatcgacgacggcagcggcaagaccgccaccggcaccatctgcatcgaggtgcccgacatcaacgactactgccccaacatcttccccgagagaagaaccatctgcatcgacagccccagcgtgctgatcagcgtgaacgagcacagctacggcagccccttcaccttctgcgtggtggacgagccccccggcatcgccgacatgtgggacgtgagaagcaccaacgccaccagcgccatcctgaccgccaagcaggtgctgagccccggcttctacgagatccccatcctggtgaaggacagctacaacagagcctgcgagctggcccagatggtgcagctgtacgcctgcgactgcgacgacaaccacatgtgcctggacagcggcgccgccggcatctacaccgaggacatcaccggcgacacctacggccccgtgaccgaggaccaggccggcgtgagcaacgtgggcctgggccccgccggcatcggcatgatggtgctgggcatcctgctgctgatcctggcccccctgctgctgctgctgtgctgctgcaagcagagacagcccgagggcctgggcaccagattcgcccccgtgcccgagggcggcgagggcgtgatgcagagctggagaatcgagggcgcccaccccgaggacagagacgtgagcaacatctgcgcccccatgaccgccagcaacacccaggacagaatggacagcagcgagatctacaccaacacctacgccgccggcggcaccgtggagggcggcgtgagcggcgtggagctgaacaccggcatgggcaccgccgtgggcctgatggccgccggcgccgccggcgccagcggcgccgccagaaagagaagcagcaccatgggcaccctgagagactacgccgacgccgacatcaacatggccttcctggacagctacttcagcgagaaggcctacgcctacgccgacgaggacgagggcagacccgccaacgactgcctgctgatctacgaccacgagggcgtgggcagccccgtgggcagcatcggctgctgcagctggatcgtggacgacctggacgagagctgcatggagaccctggaccccaagttcagaaccctggccgagatctgcctgaacaccgagatcgagcccttccccagccaccaggcctgcatccccatcagcaccgacctgcccctgctgggccccaactacttcgtgaacgagagcagcggcctgacccccagcgaggtggagttccaggaggagatggccgccagcgagcccgtggtgcacggcgacatcatcgtgaccgagacctacggcaacgccgacccctgcgtgcagcccaccaccatcatcttcgacccccagctggcccccaacgtggtggtgaccgaggccgtgatggcccccgtgtacgacatccagggcaacatctgcgtgcccgccgagctggccgactacaacaacgtgatctacgccgagagagtgctggccagccccggcgtgcccgacatgagcaacagcagcaccaccgagggctgcatgggccccgtgatgagcggcaacatcctggtgggccccgagatccaggtgatgcagatgatgagccccgacctgcccatcggccagaccgtgggcagcaccagccccatgaccagcagacacagagtgaccagatacagcaacatccactacacccagcagtag

SEQ ID NO: 79067 - DNA, 3180 bp, synthetic construct
  misc_feature 1..3180: note = Description of Artificial Sequence: Synthetic coding sequence
  source 1..3180: mol_type = other DNA
atggactggctgttcttcagaaacatctgcctgctgatcatcctgatggtggtgatggaggtgaacagcgagttcatcgtggaggtgaaggagttcgacatcgagaacggcaccaccaagtggcagaccgtgagaagacagaagagagagtggatcaagttcgccgccgcctgcagagagggcgaggacaacagcaagagaaaccccatcgccaagatcagaagcgactgcgagagcaaccagaagatcacctacagaatcagcggcgtgggcatcgacagacccccctacggcgtgttcaccatcaaccccagaaccggcgagatcaacatcaccagcgtggtggacagagagatcacccccctgttcctgatctactgcagagccctgaacagcagaggcgaggacctggagagacccctggagctgagagtgaaggtgatggacatcaacgacaacgcccccgtgttcagccagagcgtgtacaccgccagcatcgaggagaacagcgacgccaacaccctggtggtgaagctgtgcgccaccgacgccgacgaggagaaccacctgaacagcaagatcgcctacaagatcgtgagccaggagcccagcggcgcccccatgttcatcctgaacagatacaccggcgaggtgtgcaccatgagcagcttcctggacagagagcagcacagcatgtacaacctggtggtgagaggcagcgacagagacggcgccgccgacggcctgagcagcgagtgcgactgcagaatcaaggtgctggacgtgaacgacaacttccccaccctggagaagaccagctacagcgccagcatcgaggagaactgcctgagcagcgagctgatcagactgcaggccatcgacctggacgaggagggcaccgacaactggctggcccagtacctgatcctgagcggcaacgacggcaactggttcgacatccagaccgacccccagaccaacgagggcatcctgaaggtggtgaagatgctggactacgagcaggcccccaacatccagctgagcatcggcgtgaagaaccaggccgacttccactacagcgtggccagccagttccagatgcaccccacccccgtgagaatccaggtggtggacgtgagagagggccccgccttccaccccagcaccatggccttcagcgtgagagagggcatcaagggcagcagcctgctgaactacgtgctgggcacctacaccgccatcgacctggacaccggcaaccccgccaccgacgtgagatacatcatcggccacgacgccggcagctggctgaagatcgacagcagaaccggcgagatccagttcagcagagagttcgacaagaagagcaagtacatcatcaacggcatctacaccgccgagatcctggccatcgacgacggcagcggcaagaccgccaccggcaccatctgcatcgaggtgcccgacatcaacgactactgccccaacatcttccccgagagaagaaccatctgcatcgacagccccagcgtgctgatcagcgtgaacgagcacagctacggcagccccttcaccttctgcgtggtggacgagccccccggcatcgccgacatgtgggacgtgagaagcaccaacgccaccagcgccatcctgaccgccaagcaggtgctgagccccggcttctacgagatccccatcctggtgaaggacagctacaacagagcctgcgagctggcccagatggtgcagctgtacgcctgcgactgcgacgacaaccacatgtgcctggacagcggcgccgccggcatctacaccgaggacatcaccggcgacacctacggccccgtgaccgaggaccaggccggcgtgagcaacgtgggcctgggccccgccggcatcggcatgatggtgctgggcatcctgctgctgatcctggcccccctgctgctgctgctgtgctgctgcaagcagagacagcccgagggcctgggcaccagattcgcccccgtgcccgagggcggcgagggcgtgatgcagagctggagaatcgagggcgcccaccccgaggacagactgttcagcgcctacgccctgcccggcggcggcggcaccgccgacggcggcggcagcgtgctgggcagatgcgccctgcaggccacccccgccctgctgaaccagcacccccccttcagcgagatctacaccaacacctacgccgccggcggcaccgtggagggcggcgtgagcggcgtggagctgaacaccggcatgggcaccgccgtgggcctgatggccgccggcgccgccggcgccagcggcgccgccagaaagagaagcagcaccatgggcaccctgagagactacgccgacgccgacatcaacatggccttcctggacagctacttcagcgagaaggcctacgcctacgccgacgaggacgagggcagacccgccaacgactgcctgctgatctacgaccacgagggcgtgggcagccccgtgggcagcatcggctgctgcagctggatcgtggacgacctggacgagagctgcatggagaccctggaccccaagttcagaaccctggccgagatctgcctgaacaccgagatcgagcccttccccagccaccaggcctgcatccccatcagcaccgacctgcccctgctgggccccaactacttcgtgaacgagagcagcggcctgacccccagcgaggtggagttccaggaggagatggccgccagcgagcccgtggtgcacggcgacatcatcgtgaccgagacctacggcaacgccgacccctgcgtgcagcccaccaccatcatcttcgacccccagctggcccccaacgtggtggtgaccgaggccgtgatggcccccgtgtacgacatccagggcaacatctgcgtgcccgccgagctggccgactacaacaacgtgatctacgccgagagagtgctggccagccccggcgtgcccgacatgagcaacagcagcaccaccgagggctgcatgggccccgtgatgagcggcaacatcctggtgggccccgagatccaggtgatgcagatgatgagccccgacctgcccatcggccagaccgtgggcagcaccagccccatgaccagcagacacagagtgaccagatacagcaacatccactacacccagcagtag

SEQ ID NO: 79068 - DNA, 498 bp, synthetic construct
  misc_feature 1..498: note = Description of Artificial Sequence: Synthetic coding sequence
  source 1..498: mol_type = other DNA
atggccagcggcgtgcaggtggccgacgaggtgtgcagaatcttctacgacatgaaggtgagaaagtgcagcacccccgaggagatcaagaagagaaagaaggccgtgatcttctgcctgagcgccgacaagaagtgcatcatcgtggaggagggcaaggagatcctggtgggcgacgtgggcgtgaccatcaccgaccccttcaagcacttcgtgggcatgctgcccgagaaggactgcagatacgccctgtacgacgccagcttcgagaccaaggagagcagaaaggaggagctgatgttcttcctgtgggcccccgagctggcccccctgaagagcaagatgatctacgccagcagcaaggacgccatcaagaagaagttccagggcatcaagcacgagtgccaggccaacggccccgaggacctgaacagagcctgcatcgccgagaagctgggcggcagcctgatcgtggccttcgagggctgccccgtgtag

SEQ ID NO: 79069 - DNA, 447 bp, synthetic construct
  misc_feature 1..447: note = Description of Artificial Sequence: Synthetic coding sequence
  source 1..447: mol_type = other DNA
atgaaggtgagaaagtgcagcacccccgaggagatcaagaagagaaagaaggccgtgatcttctgcctgagcgccgacaagaagtgcatcatcgtggaggagggcaaggagatcctggtgggcgacgtgggcgtgaccatcaccgaccccttcaagcacttcgtgggcatgctgcccgagaaggactgcagatacgccctgtacgacgccagcttcgagaccaaggagagcagaaaggaggagctgatgttcttcctgtgggcccccgagctggcccccctgaagagcaagatgatctacgccagcagcaaggacgccatcaagaagaagttccagggcatcaagcacgagtgccaggccaacggccccgaggacctgaacagagcctgcatcgccgagaagctgggcggcagcctgatcgtggccttcgagggctgccccgtgtag

SEQ ID NO: 79070 - DNA, 897 bp, synthetic construct
  misc_feature 1..897: note = Description of Artificial Sequence: Synthetic coding sequence
  source 1..897: mol_type = other DNA
atgagcgacgccaacctggacagcagcaagaagaacttcctggagggcgaggtggacgacgaggagagcgtgatcctgaccctggtgcccgtgaaggacgacgccaacatggagcagatggagcccagcgtgagcagcaccagcgacgtgaagctggagaagcccaagaagtacaaccccggccacctgctgcagaccaacgagcagttcaccgccccccagaaggccagatgcaagatccccgccctgcccctgcccaccatcctgccccccatcaacaaggtgtgcagagacaccctgagagactggtgccagcagctgggcctgagcaccaacggcaagaagatcgaggtgtacctgagactgcacagacacgcctaccccgagcagagacaggacatgcccgagatgagccaggagaccagactgcagagatgcagcagaaagagaaaggccgtgaccaagagagccagactgcagagaagctacgagatgaacgagagagccgaggagaccaacaccgtggaggtgatcaccagcgcccccggcgccatgctggccagctgggccagaatcgccgccagagccgtgcagcccaaggccctgaacagctgcagcatccccgtgagcgtggaggccttcctgatgcaggccagcggcgtgagatggtgcgtggtgcacggcagactgctgagcgccgacaccaagggctgggtgagactgcagttccacgccggccaggcctgggtgcccaccacccacagaagaatgatcagcctgttcctgctgcccgcctgcatcttccccagccccggcatcgaggacaacatgctgtgccccgactgcgccaagagaaacaagaagatgatgaagagactgatgaccgtggagaagtag

SEQ ID NO: 79071 - DNA, 480 bp, synthetic construct
  misc_feature 1..480: note = Description of Artificial Sequence: Synthetic coding sequence
  source 1..480: mol_type = other DNA
atggaccccagccagttcaaccccacctacatccccggcagcccccagatgctgaccgaggagaacagcagagacgacagcggcgccagccagatcagcagcgagaccctgatcaagaacctgagcaacctgaccatcaacgccagcagcgagagcgtgagccccctgagcgaggccctgctgagaagagagagcgtgggcgccgccgtgctgagagagatcgaggacgagtggctgtacagcagaagaggcgtgagaaccctgctgagcgtgcagagagagaagatggccagactgagatacatgctgctgggcggcgtgagaacccacgagagaagacccaccaacaaggagcccaagggcgtgaagaaggagagcagacccttcaagtgcccctgcagcttctgcgtgagcaacggctgggaccccagcgagaacgccagaatcggcaaccaggacaccaagcccctgcagccctag

SEQ ID NO: 79072 - DNA, 915 bp, synthetic construct
  misc_feature 1..915: note = Description of Artificial Sequence: Synthetic coding sequence
  source 1..915: mol_type = other DNA
atgctgagaggcagcgccagcagcaccagcatggagaaggccaagggcaaggagtggaccagcaccgagaagagcagagaggaggaccagcaggccagcaaccagcccaacagcatcgccctgcccggcaccagcgccaagagaaccaaggagaagatgagcatcaagggcagcaaggtgctgtgccccaagaagaaggccgagcacaccgacaaccccagaccccagaagaagatccccatcccccccctgcccagcaagctgccccccgtgaacctgatccacagagacatcctgagagcctggtgccagcagctgaagctgagcagcaagggccagaagctggacgcctacaagagactgtgcgccttcgcctaccccaaccagaaggacttccccagcaccgccaaggaggccaagatcagaaagagcctgcagaagaagctgaaggtggagaagggcgagaccagcctgcagagcagcgagacccacccccccgaggtggccctgccccccgtgggcgagccccccgccctggagaacagcaccgccctgctggagggcgtgaacaccgtggtggtgaccaccagcgcccccgaggccctgctggccagctgggccagaatcagcgccagagccagaacccccgaggccgtggagagcccccaggaggccagcggcgtgagatggtgcgtggtgcacggcaagagcctgcccgccgacaccgacggctgggtgcacctgcagttccacgccggccaggcctgggtgcccgagaagcaggagggcagagtgagcgccctgttcctgctgcccgccagcaacttcccccccccccacctggaggacaacatgctgtgccccaagtgcgtgcacagaaacaaggtgctgatcaagagcctgcagtgggagtag

SEQ ID NO: 79073 - DNA, 351 bp, synthetic construct
  misc_feature 1..351: note = Description of Artificial Sequence: Synthetic coding sequence
  source 1..351: mol_type = other DNA
atgggcaccctgcccgccagaagacacatccccccctgggtgaaggtgcccgaggacctgaaggaccccgaggtgttccaggtgcagaccagactgctgaaggccatcttcggccccgacggcagcagaatcccctacatcgagcaggtgagcaaggccatgctggagctgaaggccctggagagcagcgacctgaccgaggtggtggtgtacggcagctacctgtacaagctgagaaccaagtggatgctgcagagcatggccgagtggcacagacagagacaggagagaggcatgctgaagctggccgaggccatgaacgccctggagctgggcccctggatgaagtag

SEQ ID NO: 79074 - DNA, 1104 bp, synthetic construct
  misc_feature 1..1104: note = Description of Artificial Sequence: Synthetic coding sequence
  source 1..1104: mol_type = other DNA
atgagcagcaccctggccaagatcgccgagatcgaggccgagatggccagaacccagaagaacaaggccaccgcccaccacctgggcctgctgaaggccagactggccaagctgagaagagagctgatcacccccaagggcggcggcggcggcggccccggcgagggcttcgacgtggccaagaccggcgacgccagaatcggcttcgtgggcttccccagcgtgggcaagagcaccctgctgagcaacctggccggcgtgtacagcgaggtggccgcctacgagttcaccaccctgaccaccgtgcccggcgtgatcagatacaagggcgccaagatccagctgctggacctgcccggcatcatcgagggcgccaaggacggcaagggcagaggcagacaggtgatcgccgtggccagaacctgcaacctgatcctgatcgtgctggacgtgctgaagcccctgggccacaagaagatcatcgagaacgagctggagggcttcggcatcagactgaacagcaagccccccaacatcggcttcaagaagaaggacaagggcggcatcaacctgaccgccacctgcccccagagcgagctggacgccgagaccgtgaagagcatcctggccgagtacaagatccacaacgccgacgtgaccctgagaagcgacgccaccgccgacgacctgatcgacgtggtggagggcaacagagtgtacatcccctgcatctacgtgctgaacaagatcgaccagatcagcatcgaggagctggacatcatctacaaggtgccccactgcgtgcccatcagcgcccaccacagatggaacttcgacgacctgctggagaagatctgggactacctgaagctggtgagaatctacaccaagcccaagggccagctgcccgactacaccagccccgtggtgctgccctacagcagaaccaccgtggaggacttctgcatgaagatccacaagaacctgatcaaggagttcaagtacgccctggtgtggggcctgagcgtgaagcacaacccccagaaggtgggcaaggaccacaccctggaggacgaggacgtgatccagatcgtgaagaagtag

SEQ ID NO: 79075 - DNA, 396 bp, synthetic construct
  misc_feature 1..396: note = Description of Artificial Sequence: Synthetic coding sequence
  source 1..396: mol_type = other DNA
atggccgccgccgtggccatggagaccgacgacgccggcaacagactgagattccagctggagctggagttcgtgcagtgcctggccaaccccaactacctgaacttcctggcccagagaggctacttcaaggacaaggccttcgtgaactacctgaagtacctgctgtactggaaggaccccgagtacgccaagtacctgaagtacccccagtgcctgcacatgctggagctgctgcagtacgagcacttcagaaaggagctggtgaacgcccagtgcgccaagttcatcgacgagcagcagatcctgcactggcagcactacagcagaaagagaatgagactgcagcaggccctggccgagcagcagcagcagaacaacaccagcggcaagtag

SEQ ID NO: 79076 - DNA, 1032 bp, synthetic construct
  misc_feature 1..1032: note = Description of Artificial Sequence: Synthetic coding sequence
  source 1..1032: mol_type = other DNA
atgggcatcctggagaagatcagcgagatcgagaaggagatcgccagaacccagaagaacaaggccaccgagtaccacctgggcctgctgaaggccaagctggccaagtacagagcccagctgctggagcccagcaagagcgccagcagcaagggcgagggcttcgacgtgatgaagagcggcgacgccagagtggccctgatcggcttccccagcgtgggcaagagcaccttcctgagcctgatgaccagcaccgccagcgaggccgccagctacgagttcaccaccctgacctgcatccccggcgtgatcgagtacaagggcgccaacatccagctgctggacctgcccggcatcatcgagggcgccgcccagggcaagggcagaggcagacaggtgatcgccgtggccagaaccgccgacgtgatcatcatgatgctggacgccaccaagggcgaggtgcagagaagcctgctggagaaggagctggagagcgtgggcatcagactgaacaagcacaagcccaacatctacttcaagcccaagaagggcggcggcatcagcttcaacagcaccgtgaccctgacccagtgcagcgagaagctggtgcagctgatcctgcacgagtacaagatcttcaacgccgaggtgctgttcagagaggactgcagccccgacgagttcatcgacgtgatcgtgggcaacagagtgtacatgccctgcctgtacgtgtacaacaagatcgaccagatcagcatggaggaggtggacagactggccagaaagcccaacagcgtggtgatcagctgcggcatgaagctgaacctggactacctgctggagatgctgtgggagtacctggccctgacctgcatctacaccaagaagagaggccagagacccgacttcaccgacgccatcatcctgagaaagggcgccagcgtggagcacgtgtgccacagaatccacagaagcctggccagccagttcaaggcccccgcccccagcaccgtgagaagcggctgggcctag

SEQ ID NO: 79077 - DNA, 2037 bp, synthetic construct
  misc_feature 1..2037: note = Description of Artificial Sequence: Synthetic coding sequence
  source 1..2037: mol_type = other DNA
atggagctgagaagctaccagtgggaggtgatcatgcccgccctggagggcaagaacatcatcatctggctgcccaccggcgccggcaagaccagagccgccgcctacgtggccaagagacacctggagaccgtggacggcgccaaggtggtggtgctggtgaacagagtgcacctggtgacccagcacggcgaggagttcagaagaatgctggacggcagatggaccgtgaccaccctgagcggcgacatgggccccagagccggcttcggccacctggccagatgccacgacctgctgatctgcaccgccgagctgctgcagatggccctgaccagccccgaggaggaggagcacgtggagctgaccgtgttcagcctgatcgtggtggacgagtgccaccacacccacaaggacaccgtgtacaacgtgatcatgagccagtacctggagctgaagctgcagagagcccagcccctgccccaggtgctgggcctgaccgccagccccggcaccggcggcgccagcaagctggacggcgccatcaaccacgtgctgcagctgtgcgccaacctggacacctggtgcatcatgagcccccagaactgctgcccccagctgcaggagcacagccagcagccctgcaagcagtacaacctgtgccacagaagaagccaggaccccttcggcgacctgctgaagaagctgatggaccagatccacgaccacctggagatgcccgagctgagcagaaagttcggcacccagatgtacgagcagcaggtggtgaagctgagcgaggccgccgccctggccggcctgcaggagcagagagtgtacgccctgcacctgagaagatacaacgacgccctgctgatccacgacaccgtgagagccgtggacgccctggccgccctgcaggacttctaccacagagagcacgtgaccaagacccagatcctgtgcgccgagagaagactgctggccctgttcgacgacagaaagaacgagctggcccacctggccacccacggccccgagaaccccaagctggagatgctggagaagatcctgcagagacagttcagcagcagcaacagccccagaggcatcatcttcaccagaaccagacagagcgcccacagcctgctgctgtggctgcagcagcagcagggcctgcagaccgtggacatcagagcccagctgctgatcggcgccggcaacagcagccagagcacccacatgacccagagagaccagcaggaggtgatccagaagttccaggacggcaccctgaacctgctggtggccaccagcgtggccgaggagggcctggacatcccccactgcaacgtggtggtgagatacggcctgctgaccaacgagatcagcatggtgcaggccagaggcagagccagagccgaccagagcgtgtacgccttcgtggccaccgagggcagcagagagctgaagagagagctgatcaacgaggccctggagaccctgatggagcaggccgtggccgccgtgcagaagatggaccaggccgagtaccaggccaagatcagagacctgcagcaggccgccctgaccaagagagccgcccaggccgcccagagagagaaccagagacagcagttccccgtggagcacgtgcagctgctgtgcatcaactgcatggtggccgtgggccacggcagcgacctgagaaaggtggagggcacccaccacgtgaacgtgaaccccaacttcagcaactactacaacgtgagcagagaccccgtggtgatcaacaaggtgttcaaggactggaagcccggcggcgtgatcagctgcagaaactgcggcgaggtgtggggcctgcagatgatctacaagagcgtgaagctgcccgtgctgaaggtgagaagcatgctgctggagaccccccagggcagaatccaggccaagaagtggagcagagtgcccttcagcgtgcccgacttcgacttcctgcagcactgcgccgagaacctgagcgacctgagcctggactag

SEQ ID NO: 79078 - DNA, 909 bp, synthetic construct
  misc_feature 1..909: note = Description of Artificial Sequence: Synthetic coding sequence
  source 1..909: mol_type = other DNA
atggagctgagaagctaccagtgggaggtgatcatgcccgccctggagggcaagaacatcatcatctggctgcccaccggcgccggcaagaccagagccgccgcctacgtggccaagagacacctggagaccgtggacggcgccaaggtggtggtgctggtgaacagagtgcacctggtgacccagcacggcgaggagttcagaagaatgctggacggcagatggaccgtgaccaccctgagcggcgacatgggccccagagccggcttcggccacctggccagatgccacgacctgctgatctgcaccgccgagctgctgcagatggccctgaccagccccgaggaggaggagcacgtggagctgaccgtgttcagcctgatcgtggtggacgagtgccaccacacccacaaggacaccgtgtacaacgtgatcatgagccagtacctggagctgaagctgcagagagcccagcccctgccccaggtgctgggcctgaccgccagccccggcaccggcggcgccagcaagctggacggcgccatcaaccacgtgctgcagctgtgcgccaacctggacacctggtgcatcatgagcccccagaactgctgcccccagctgcaggagcacagccagcagccctgcaagcagtacaacctgtgccacagaagaagccaggaccccttcggcgacctgctgaagaagctgatggaccagatccacgaccacctggagatgcccgagctgagcagaaagttcggcacccagatgtacgagcagcaggtggtgaagctgagcgaggccgccgccctggccggcctgcaggagcagagagtgtacgccctgcacctgagaagatacaacgacgccctgctgatccacgacaccgtgagagccgtggacgcctag

SEQ ID NO: 79079 - DNA, 1464 bp, synthetic construct
  misc_feature 1..1464: note = Description of Artificial Sequence: Synthetic coding sequence
  source 1..1464: mol_type = other DNA
atggagctgagaagctaccagtgggaggtgatcatgcccgccctggagggcaagaacatcatcatctggctgcccaccggcgccggcaagaccagagccgccgcctacgtggccaagagacacctggagaccgtggacggcgccaaggtggtggtgctggtgaacagagtgcacctggtgacccagcacggcgaggagttcagaagaatgctggacggcagatggaccgtgaccaccctgagcggcgacatgggccccagagccggcttcggccacctggccagatgccaccacacccacaaggacaccgtgtacaacgtgatcatgagccagtacctggagctgaagctgcagagagcccagcccctgccccaggtgctgggcctgaccgccagccccggcaccggcggcgccagcaagctggacggcgccatcaaccacgtgctgcagctgtgcgccaacctggacacctggtgcatcatgagcccccagaactgctgcccccagctgcaggagcacagccagcagccctgcaagcagtacaacctgtgccacagaagaagccaggaccccttcggcgacctgctgaagaagctgatggaccagatccacgaccacctggagatgcccgagctgagcagaaagttcggcacccagatgtacgagcagcaggtggtgaagctgagcgaggccgccgccctggccggcctgcaggagcagagagtgtacgccctgcacctgagaagatacaacgacgccctgctgatccacgacaccgtgagagccgtggacgccctggccgccctgcaggacttctaccacagagagcacgtgaccaagacccagatcctgtgcgccgagagaagactgctggccctgttcgacgacagaaagaacgagctggcccacctggccacccacggccccgagaaccccaagctggagatgctggagaagatcctgcagagacagttcagcagcagcaacagccccagaggcatcatcttcaccagaaccagacagagcgcccacagcctgctgctgtggctgcagcagcagcagggcctgcagaccgtggacatcagagcccagctgctgatcggcgccggcaacagcagccagagcacccacatgacccagagagaccagcaggaggtgatccagaagttccaggacggcaccctgaacctgctggtggccaccagcgtggccgaggagggcctggacatcccccactgcaacgtggtggtgagatacggcctgctgaccaacgagatcagcatggtgcaggccagaggcagagccagagccgaccagagcgtgtacgccttcgtggccaccgagggcagcagagagctgaagagagagctgatcaacgaggccctggagaccctgatggagcaggccgtggccgccgtgcagaagatggaccaggccgagtaccaggccaaggagctgctgtag

SEQ ID NO: 79080 - DNA, 471 bp, synthetic construct
  misc_feature 1..471: note = Description of Artificial Sequence: Synthetic coding sequence
  source 1..471: mol_type = other DNA
atggagctgagaagctaccagtgggaggtgatcatgcccgccctggagggcaagaacatcatcatctggctgcccaccggcgccggcaagaccagagccgccgcctacgtggccaagagacacctggagaccgtggacggcgccaaggtggtggtgctggtgaacagagtgcacctggtgacccagcacggcgaggagttcagaagaatgctggacggcagatggaccgtgaccaccctgagcggcgacatgggccccagagccggcttcggccacctggccagatgccacgacctgctgatctgcaccgccgagctgctgcagatggccctgaccagccccgaggaggaggagcacgtggagctgaccgtgttcagcctgatcgtggtggacgagtgccaccacacccacaaggacaccgtgtacaacgtgatcatgagccagtacctggagctgaagctgcagagatag

SEQ ID NO: 79081 - DNA, 2208 bp, synthetic construct
  misc_feature 1..2208: note = Description of Artificial Sequence: Synthetic coding sequence
  source 1..2208: mol_type = other DNA
atggccaaggagagaggcctgatcagccccagcgacttcgcccagctgcagaagtacatggagtacagcaccaagaaggtgagcgacgtgctgaagctgttcgaggacggcgagatggccaagtacgtgcagggcgacgccatcggctacgagggcttccagcagttcctgaagatctacctggaggtggacaacgtgcccagacacctgagcctggccctgttccagagcttcgagaccggccactgcctgaacgagaccaacgtgaccaaggacgtggtgtgcctgaacgacgtgagctgctacttcagcctgctggagggcggcagacccgaggacaagctggagttcaccttcaagctgtacgacaccgacagaaacggcatcctggacagcagcgaggtggacaagatcatcctgcagatgatgagagtggccgagtacctggactgggacgtgagcgagctgagacccatcctgcaggagatgatgaaggagatcgactacgacggcagcggcagcgtgagccaggccgagtgggtgagagccggcgccaccaccgtgcccctgctggtgctgctgggcctggagatgaccctgaaggacgacggccagcacatgtggagacccaagagattccccagacccgtgtactgcaacctgtgcgagagcagcatcggcctgggcaagcagggcctgagctgcaacctgtgcaagtacaccgtgcacgaccagtgcgccatgaaggccctgccctgcgaggtgagcacctacgccaagagcagaaaggacatcggcgtgcagagccacgtgtgggtgagaggcggctgcgagagcggcagatgcgacagatgccagaagaagatcagaatctaccacagcctgaccggcctgcactgcgtgtggtgccacctggagatccacgacgactgcctgcaggccgtgggccacgagtgcgactgcggcctgctgagagaccacatcctgccccccagcagcatctaccccagcgtgctggccagcggccccgacagaaagaacagcaagaccagccagaagaccatggacgacctgaacctgagcaccagcgaggccctgagaatcgaccccgtgcccaacacccaccccctgctggtgttcgtgaaccccaagagcggcggcaagcagggccagagagtgctgtggaagttccagtacatcctgaaccccagacaggtgttcaacctgctgaaggacggccccgagatcggcctgagactgttcaaggacgtgcccgacagcagaatcctggtgtgcggcggcgacggcaccgtgggctggatcctggagaccatcgacaaggccaacctgcccgtgctgccccccgtggccgtgctgcccctgggcaccggcaacgacctggccagatgcctgagatggggcggcggctacgagggccagaacctggccaagatcctgaaggacctggagatgagcaaggtggtgcacatggacagatggagcgtggaggtgatcccccagcagaccgaggagaagagcgaccccgtgcccttccagatcatcaacaactacttcagcatcggcgtggacgccagcatcgcccacagattccacatcatgagagagaagtaccccgagaagttcaacagcagaatgaagaacaagctgtggtacttcgagttcgccaccagcgagagcatcttcagcacctgcaagaagctggaggagagcctgaccgtggagatctgcggcaagcccctggacctgagcaacctgagcctggagggcatcgccgtgctgaacatccccagcatgcacggcggcagcaacctgtggggcgacaccagaagaccccacggcgacatctacggcatcaaccaggccctgggcgccaccgccaaggtgatcaccgaccccgacatcctgaagacctgcgtgcccgacctgagcgacaagagactggaggtggtgggcctggagggcgccatcgagatgggccagatctacaccaagctgaagaacgccggcagaagactggccaagtgcagcgagatcaccttccacaccaccaagaccctgcccatgcagatcgacggcgagccctggatgcagaccccctgcaccatcaagatcacccacaagaaccagatgcccatgctgatgggccccccccccagaagcaccaacttcttcggcttcctgagctag

SEQ ID NO: 79082 - DNA, 2208 bp, synthetic construct; identical to SEQ ID NO: 79081
  misc_feature 1..2208: note = Description of Artificial Sequence: Synthetic coding sequence
  source 1..2208: mol_type = other DNA

SEQ ID NO: 79083 - DNA, 744 bp, synthetic construct
  misc_feature 1..744: note = Description of Artificial Sequence: Synthetic coding sequence
  source 1..744: mol_type = other DNA
atggccaaggagagaggcctgatcagccccagcgacttcgcccagctgcagaagtacatggagtacagcaccaagaaggtgagcgacgtgctgaagctgttcgaggacggcgagatggccaagtacgtgcagggcgacgccatcggctacgagggcttccagcagttcctgaagatctacctggaggtggacaacgtgcccagacacctgagcctggccctgttccagagcttcgagaccggccactgcctgaacgagaccaacgtgaccaaggacgtggtgtgcctgaacgacgtgagctgctacttcagcctgctggagggcggcagacccgaggacaagctggagttcaccttcaagctgtacgacaccgacagaaacggcatcctggacagcagcgaggtggacaagatcatcctgcagatgatgagagtggccgagtacctggactgggacgtgagcgagctgagacccatcctgcaggagatgatgaaggagatcgactacgacggcagcggcagcgtgagccaggccgagtgggtgagagccggcgccaccaccgtgcccctgctggtgctgctgggcctggagatgaccctgaaggacgacggccagcacatgtggagacccaagagattccccagacccgtgtactgcaacctgtgcgagagcagcatcggcctgggcaagcagggcctgagctgcaacagacccatcacctgcgtgggcgccagaagactgtag

SEQ ID NO: 79084 - DNA, 351 bp, synthetic construct
  misc_feature 1..351: note = Description of Artificial Sequence: Synthetic coding sequence
  source 1..351: mol_type = other DNA
atggccaaggagagaggcctgatcagccccagcgacttcgcccagctgcagaagtacatggagtacagcaccaagaaggtgagcgacgtgctgaagctgttcgaggacggcgagatggccaagtacgtgcagggcgacgccatcggctacgagggcttccagcagttcctgaagatctacctggaggtggacaacgtgcccagacacctgagcctggccctgttccagagcttcgagaccggccactgcctgaacgagaccaacgtgaccaaggacgtggtgtgcctgaacgacgtgagctgctacttcagcctgctggagggcggcagacccgaggacaagctggagtag

SEQ ID NO: 79085 - DNA, 177 bp, synthetic construct
  misc_feature 1..177: note = Description of Artificial Sequence: Synthetic coding sequence
  source 1..177: mol_type = other DNA
atggccaaggagagaggcctgatcagccccagcgacttcgcccagctgcagaagtacatggagtacagcaccaagaaggtgagcgacgtgctgaagctgttcgaggacggcgagatggccaagtacgtgcagggcgacgccatcggctacgagggcttccagcagttcctgaagtag

SEQ ID NO: 79086 - DNA, 66 bp, synthetic construct
  misc_feature 1..66: note = Description of Artificial Sequence: Synthetic coding sequence
  source 1..66: mol_type = other DNA
atggccaaggagagaggcctgatcagccccagcgacttcgcccagctgcagaagtacatggagtag

SEQ ID NO: 79087 - DNA, 444 bp, synthetic construct
  misc_feature 1..444: note = Description of Artificial Sequence: Synthetic coding sequence
  source 1..444: mol_type = other DNA
atggccaaggagagaggcctgatcagccccagcgacttcgcccagctgcagaagtacatggagtacagcaccaagaaggtgagcgacgtgctgaagctgttcgaggacggcgagatggccaagtacgtgcagggcgacgccatcggctacgagggcttccagcagttcctgaagatctacctggaggtggacaacgtgcccagacacctgagcctggccctgttccagagcttcgagaccggccactgcctgaacgagaccaacgtgaccaaggacgtggtgtgcctgaacgacgtgagctgctacttcagcctgctggagggcggcagacccgaggacaagctggagttcaccttcaagctgtacgacaccgacagaaacggcatcctggacagcagcgaggtggacaagatcatcctgcagatgatgagagtggccgagtag

SEQ ID NO: 79088 - DNA, 2208 bp, synthetic construct; identical to SEQ ID NO: 79081
  misc_feature 1..2208: note = Description of Artificial Sequence: Synthetic coding sequence
  source 1..2208: mol_type = other DNA

SEQ ID NO: 79089 - DNA, 402 bp, synthetic construct
  misc_feature 1..402: note = Description of Artificial Sequence: Synthetic coding sequence
  source 1..402: mol_type = other DNA
atggccaaggagagaggcctgatcagccccagcgacttcgcccagctgcagaagtacatggagtacagcaccaagaaggtgagcgacgtgctgaagctgttcgaggacggcgagatggccaagtacgtgcagggcgacgccatcggctacgagggcttccagcagttcctgaagatctacctggaggtggacaacgtgcccagacacctgagcctggccctgttccagagcttcgagaccggccactgcctgaacgagaccaacgtgaccaaggacgtggtgtgcctgaacgacgtgagctgctacttcagcctgctggagggcggcagacccgaggacaagctggagttcaccttcaagctgtacgacaccgacagaaacggcatcctggacagcagctag

SEQ ID NO: 79090 - DNA, 324 bp, synthetic construct
  misc_feature 1..324: note = Description of Artificial Sequence: Synthetic coding sequence
  source 1..324: mol_type = other DNA
atggccaaggagagaggcctgatcagccccagcgacttcgcccagctgcagaagtacatggagtacagcaccaagaaggtgagcgacgtgctgaagctgttcgaggacggcgagatggccaagtacgtgcagggcgacgccatcggctacgagggcttccagcagttcctgaagatctacctggaggtggacaacgtgcccagacacctgagcctggccctgttccagagcttcgagaccggccactgcctgaacgagaccaacgtgaccaaggacgtggtgtgcctgaacgacgtgagctgctacttcagcctgctggagtag

SEQ ID NO: 79091 - DNA, 135 bp, synthetic construct
  misc_feature 1..135: note = Description of Artificial Sequence: Synthetic coding sequence
  source 1..135: mol_type = other DNA
atggccaaggagagaggcctgatcagccccagcgacttcgcccagctgcagaagtacatggagtacagcaccaagaaggtgagcgacgtgctgaagctgttcgaggacggcgagatggccaagtacgtgcagtag

SEQ ID NO: 79092 - DNA, 135 bp, synthetic construct; identical to SEQ ID NO: 79091
  misc_feature 1..135: note = Description of Artificial Sequence: Synthetic coding sequence
  source 1..135: mol_type = other DNA

SEQ ID NO: 79093 - DNA, 402 bp, synthetic construct; identical to SEQ ID NO: 79089
  misc_feature 1..402: note = Description of Artificial Sequence: Synthetic coding sequence
  source 1..402: mol_type = other DNA

SEQ ID NO: 79094 - DNA, 135 bp, synthetic construct; identical to SEQ ID NO: 79091
  misc_feature 1..135: note = Description of Artificial Sequence: Synthetic coding sequence
  source 1..135: mol_type = other DNA

SEQ ID NO: 79095 - DNA, 2415 bp, synthetic construct
  misc_feature 1..2415: note = Description of Artificial Sequence: Synthetic coding sequence
  source 1..2415: mol_type = other DNA
atgaccaaccaggagaagtgggcccacctgagccccagcgagttcagccagctgcagaagtacgccgagtacagcaccaagaagctgaaggacgtgctggaggagttccacggcaacggcgtgctggccaagtacaaccccgagggcaagctggtggtgctgggcaacaccatcgacttcgagggcttcaagctgttcatgaagaccttcctggaggccgagctgcccgacgacttcaccgcccacctgttcatgagcttcagcaacaagttcccccacagcagccccatggtgaagagcaagcccgccctgctgagcggcggcctgagaatgaacaagggcgccatcaccccccccagaaccaccagccccgccaacacctgcagccccgaggtgatccacctgaaggacatcgtgtgctacctgagcctgctggagagaggcagacccgaggacaagctggagttcatgttcagactgtacgacaccgacggcaacggcttcctggacagcagcgagctggagaacatcatcagccagatgatgcacgtggccgagtacctggagtgggacgtgaccgagctgaaccccatcctgcacgagatgatggaggagatcgactacgaccacgacggcaccgtgagcctggaggagtggatccagggcggcatgaccaccatccccctgctggtgctgctgggcctggagaacaacgtgaaggacgacggccagcacgtgtggagactgaagcacttcaacaagcccgcctactgcaacctgtgcctgaacatgctgatcggcgtgggcaagcagggcctgtgctgcagcttctgcaagtacaccgtgcacgagagatgcgtggccagagccccccccagctgcatcaagacctacgtgaagagcaagagaaacaccgacgtgatgcaccactactgggtggagggcaactgccccaccaagtgcgacaagtgccacaagaccgtgaagtgctaccagggcctgaccggcctgcactgcgtgtggtgccagatcaccctgcacaacaagtgcgccagccacctgaagcccgagtgcgactgcggccccctgaaggaccacatcctgccccccaccaccatctgccccgtggtgctgcagaccctgcccaccagcggcgtgagcgtgcccgaggagagacagagcaccgtgaagaaggagaagagcggcagccagcagcccaacaaggtgatcgacaagaacaagatgcagagagccaacagcgtgaccgtggacggccagggcctgcaggtgacccccgtgcccggcacccaccccctgctggtgttcgtgaaccccaagagcggcggcaagcagggcgagagaatctacagaaagttccagtacctgctgaaccccagacaggtgtacagcctgagcggcaacggccccatgcccggcctgaacttcttcagagacgtgcccgacttcagagtgctggcctgcggcggcgacggcaccgtgggctgggtgctggactgcatcgagaaggccaacgtgggcaagcacccccccgtggccatcctgcccctgggcaccggcaacgacctggccagatgcctgagatggggcggcggctacgagggcgagaacctgatgaagatcctgaaggacatcgagaacagcaccgagatcatgctggacagatggaagttcgaggtgatccccaacgacaaggacgagaagggcgaccccgtgccctacagcatcatcaacaactacttcagcatcggcgtggacgccagcatcgcccacagattccacatcatgagagagaagcaccccgagaagttcaacagcagaatgaagaacaagttctggtacttcgagttcggcaccagcgagaccttcagcgccacctgcaagaagctgcacgagagcgtggagatcgagtgcgacggcgtgcagatcgacctgatcaacatcagcctggagggcatcgccatcctgaacatccccagcatgcacggcggcagcaacctgtggggcgagagcaagaagagaagaagccacagaagaatcgagaagaagggcagcgacaagagaaccaccgtgaccgacgccaaggagctgaagttcgccagccaggacctgagcgaccagctgctggaggtggtgggcctggagggcgccatggagatgggccagatctacaccggcctgaagagcgccggcagaagactggcccagtgcagctgcgtggtgatcagaaccagcaagagcctgcccatgcagatcgacggcgagccctggatgcagaccccctgcaccatcaagatcacccacaagaaccaggcccccatgctgatgggccccccccccaagaccggcctgttctgcagcctggtgaagagaaccagaaacagaagcaaggagtag

SEQ ID NO: 79096 - DNA, 2415 bp, synthetic construct
  misc_feature 1..2415: note = Description of Artificial Sequence: Synthetic coding sequence
  source 1..2415: mol_type = other DNA
atgaccaaccaggagaagtgggcccacctgagccccagcgagttcagccagctgcagaagtacgccgagtacagcaccaagaagctgaaggacgtgctggaggagttccacggcaacggcgtgctggccaagtacaaccccgagggcaagcaggacatcctgaaccagaccatcgacttcgagggcttcaagctgttcatgaagaccttcctggaggccgagctgcccgacgacttcaccgcccacctgttcatgagcttcagcaacaagttcccccacagcagccccatggtgaagagcaagcccgccctgctgagcggcggcctgagaatgaacaagggcgccatcaccccccccagaaccaccagccccgccaacacctgcagccccgaggtgatccacctgaaggacatcgtgtgctacctgagcctgctggagagaggcagacccgaggacaagctggagttcatgttcagactgtacgacaccgacggcaacggcttcctggacagcagcgagctggagaacatcatcagccagatgatgcacgtggccgagtacctggagtgggacgtgaccgagctgaaccccatcctgcacgagatgatggaggagatcgactacgaccacgacggcaccgtgagcctggaggagtggatccagggcggcatgaccaccatccccctgctggtgctgctgggcctggagaacaacgtgaaggacgacggccagcacgtgtggagactgaagcacttcaacaagcccgcctactgcaacctgtgcctgaacatgctgatcggcgtgggcaagcagggcctgtgctgcagcttctgcaagtacaccgtgcacgagagatgcgtggccagagccccccccagctgcatcaagacctacgtgaagagcaagagaaacaccgacgtgatgcaccactactgggtggagggcaactgccccaccaagtgcgacaagtgccacaagaccgtgaagtgctaccagggcctgaccggcctgcactgcgtgtggtgccagatcaccctgcacaacaagtgcgccagccacctgaagcccgagtgcgactgcggccccctgaaggaccacatcctgccccccaccaccatctgccccgtggtgctgcagaccctgcccaccagcggcgtgagcgtgcccgaggagagacagagcaccgtgaagaaggagaagagcggcagccagcagcccaacaaggtgatcgacaagaacaagatgcagagagccaacagcgtgaccgtggacggccagggcctgcaggtgacccccgtgcccggcacccaccccctgctggtgttcgtgaaccccaagagcggcggcaagcagggcgagagaatctacagaaagttccagtacctgctgaaccccagacaggtgtacagcctgagcggcaacggccccatgcccggcctgaacttcttcagagacgtgcccgacttcagagtgctggcctgcggcggcgacggcaccgtgggctgggtgctggactgcatcgagaaggccaacgtgggcaagcacccccccgtggccatcctgcccctgggcaccggcaacgacctggccagatgcctgagatggggcggcggctacgagggcgagaacctgatgaagatcctgaaggacatcgagaacagcaccgagatcatgctggacagatggaagttcgaggtgatccccaacgacaaggacgagaagggcgaccccgtgccctacagcatcatcaacaactacttcagcatcggcgtggacgccagcatcgcccacagattccacatcatgagagagaagcaccccgagaagttcaacagcagaatgaagaacaagttctggtacttcgagttcggcaccagcgagaccttcagcgccacctgcaagaagctgcacgagagcgtggagatcgagtgcgacggcgtgcagatcgacctgatcaacatcagcctggagggcatcgccatcctgaacatccccagcatgcacggcggcagcaacctgtggggcgagagcaagaagagaagaagccacagaagaatcgagaagaagggcagcgacaagagaaccaccgtgaccgacgccaaggagctgaagttcgccagccaggacctgagcgaccagctgctggaggtggtgggcctggagggcgccatggagatgggccagatctacaccggcctgaagagcgccggcagaagactggcccagtgcagctgcgtggtgatcagaaccagcaagagcctgcccatgcagatcgacggcgagccctggatgcagaccccctgcaccatcaagatcacccacaagaaccaggcccccatgctgatgggccccccccccaagaccggcctgttctgcagcctggtgaagagaaccagaaacagaagcaaggagtag

SEQ ID NO: 79097 - DNA, 2412 bp, synthetic construct
  misc_feature 1..2412: note = Description of Artificial Sequence: Synthetic coding sequence
  source 1..2412: mol_type = other DNA
atgaccaaccaggagaagtgggcccacctgagccccagcgagttcagccagctgcagaagtacgccgagtacagcaccaagaagctgaaggacgtgctggaggagttccacggcaacggcgtgctggccaagtacaaccccgagggcaagcaggacatcctgaaccagaccatcgacttcgagggcttcaagctgttcatgaagaccttcctggaggccgagctgcccgacgacttcaccgcccacctgttcatgagcttcagcaacaagttcccccacagcagccccatggtgaagagcaagcccgccctgctgagcggcggcctgagaatgaacaagggcgccatcaccccccccagaaccaccagccccgccaacacctgcagccccgaggtgatccacctgaaggacatcgtgtgctacctgagcctgctggagagaggcagacccgaggacaagctggagttcatgttcagactgtacgacaccgacggcaacggcttcctggacagcagcgagctggagaacatcatcagccagatgatgcacgtggccgagtacctggagtgggacgtgaccgagctgaaccccatcctgcacgagatgatggaggagatcgactacgaccacgacggcaccgtgagcctggaggagtggatccagggcggcatgaccaccatccccctgctggtgctgctgggcctggagaacaacgtgaaggacgacggccagcacgtgtggagactgaagcacttcaacaagcccgcctactgcaacctgtgcctgaacatgctgatcggcgtgggcaagcagggcctgtgctgcagcttctgcaagtacaccgtgcacgagagatgcgtggccagagccccccccagctgcatcaagacctacgtgaagagcaagagaaacaccgacgtgatgcaccactactgggtggagggcaactgccccaccaagtgcgacaagtgccacaagaccgtgaagtgctaccagggcctgaccggcctgcactgcgtgtggtgccagatcaccctgcacaacaagtgcgccagccacctgaagcccgagtgcgactgcggccccctgaaggaccacatcctgccccccaccaccatctgccccgtggtgctgaccctgcccaccagcggcgtgagcgtgcccgaggagagacagagcaccgtgaagaaggagaagagcggcagccagcagcccaacaaggtgatcgacaagaacaagatgcagagagccaacagcgtgaccgtggacggccagggcctgcaggtgacccccgtgcccggcacccaccccctgctggtgttcgtgaaccccaagagcggcggcaagcagggcgagagaatctacagaaagttccagtacctgctgaaccccagacaggtgtacagcctgagcggcaacggccccatgcccggcctgaacttcttcagagacgtgcccgacttcagagtgctggcctgcggcggcgacggcaccgtgggctgggtgctggactgcatcgagaaggccaacgtgggcaagcacccccccgtggccatcctgcccctgggcaccggcaacgacctggccagatgcctgagatggggcggcggctacgagggcgagaacctgatgaagatcctgaaggacatcgagaacagcaccgagatcatgctggacagatggaagttcgaggtgatccccaacgacaaggacgagaagggcgaccccgtgccctacagcatcatcaacaactacttcagcatcggcgtggacgccagcatcgcccacagattccacatcatgagagagaagcaccccgagaagttcaacagcagaatgaagaacaagttctggtacttcgagttcggcaccagcgagaccttcagcgccacctgcaagaagctgcacgagagcgtggagatcgagtgcgacggcgtgcagatcgacctgatcaacatcagcctggagggcatcgccatcctgaacatccccagcatgcacggcggcagcaacctgtggggcgagagcaagaagagaagaagccacagaagaatcgagaagaagggcagcgacaagagaaccaccgtgaccgacgccaaggagctgaagttcgccagccaggacctgagcgaccagctgctggaggtggtgggcctggagggcgccatggagatgggccagatctacaccggcctgaagagcgccggcagaagactggcccagtgcagctgcgtggtgatcagaaccagcaagagcctgcccatgcagatcgacggcgagccctggatgcagaccccctgcaccatcaagatcacccacaagaaccaggcccccatgctgatgggccccccccccaagaccggcctgttctgcagcctggtgaagagaaccagaaacagaagcaaggagtag

SEQ ID NO: 79098 - DNA, 2415 bp, synthetic construct; identical to SEQ ID NO: 79096
  misc_feature 1..2415: note = Description of Artificial Sequence: Synthetic coding sequence
  source 1..2415: mol_type = other DNA

SEQ ID NO: 79099 - DNA, 2322 bp, synthetic construct
  misc_feature 1..2322: note = Description of Artificial Sequence: Synthetic coding sequence
  source 1..2322: mol_type = other DNA
atgaccaaccaggagaagtgggcccacctgagccccagcgagttcagccagctgcagaagtacgccgagtacagcaccaagaagctgaaggacgtgctggaggagttccacggcaacggcgtgctggccaagtacaaccccgagggcaagcaggacatcctgaaccagaccatcgacttcgagggcttcaagctgttcatgaagaccttcctggaggccgagctgcccgacgacttcaccgcccacctgttcatgagcttcagcaacaagttcccccacagcagccccatggtgaagagcaagcccgccctgctgagcggcggcctgagaatgaacaagggcgccatcaccccccccagaaccaccagccccgccaacacctgcagccccgaggtgatccacctgaaggacatcgtgtgctacctgagcctgctggagagaggcagacccgaggacaagctggagttcatgttcagactgtacgacaccgacggcaacggcttcctggacagcagcgagctggagaacatcatcagccagatgatgcacgtggccgagtacctggagtgggacgtgaccgagctgaaccccatcctgcacgagatgatggaggagatcgactacgaccacgacggcaccgtgagcctggaggagtggatccagggcggcatgaccaccatccccctgctggtgctgctgggcctggagaacaacgtgaaggacgacggccagcacgtgtggagactgaagcacttcaacaagcccgcctactgcaacctgtgcctgaacatgctgatcggcgtgggcaagcagggcctgtgctgcagcttctgcaagtacaccgtgcacgagagatgcgtggccagagccccccccagctgcatcaagacctacgtgaagagcaagagaaacaccgacgtgatgcaccactactgggtggagggcaactgccccaccaagtgcgacaagtgccacaagaccgtgaagtgctaccagggcctgaccggcctgcactgcgtgtggtgccagatcaccctgcacaacaagtgcgccagccacctgaagcccgagtgcgactgcggccccctgaaggaccacatcctgccccccaccaccatctgccccgtggtgctgcagaccctgcccaccagcggcgtgagcgtgcccgaggagagacagagcaccgtgaagaaggagaagagcggcagccagcagcccaacaaggtgatcgacaagaacaagatgcagagagccaacagcgtgaccgtggacggccagggcctgcaggtgacccccgtgcccggcacccaccccctgctggtgttcgtgaaccccaagagcggcggcaagcagggcgagagaatctacagaaagttccagtacctgctgaaccccagacaggtgtacagcctgagcggcaacggccccatgcccggcctgaacttcttcagagacgtgcccgacttcagagtgctggcctgcggcggcgacggcaccgtgggctgggtgctggactgcatcgagaaggccaacgtgggcaagcacccccccgtggccatcctgcccctgggcaccggcaacgacctggccagatgcctgagatggggcggcggctacgagggcgagaacctgatgaagatcctgaaggacatcgagaacagcaccgagatcatgctggacagatggaagttcgaggtgatccccaacgacaaggacgagaagggcgaccccgtgccctacagcatcatcaacaactacttcagcatcggcgtggacgccagcatcgcccacagattccacatcatgagagagaagcaccccgagaagttcaacagcagaatgaagaacaagttctggtacttcgagttcggcaccagcgagaccttcagcgccacctgcaagaagctgcacgagagcgtggagatcgagtgcgacggcgtgcagatcgacctgatcaacatcagcctggagggcatcgccatcctgaacatccccagcatgcacggcggcagcaacctgtggggcgagagcaagaagagaagaagccacagaagaatcgagaagaagggcagcgacaagagaaccaccgtgaccgacgccaaggagctgaagttcgccagccaggacctgagcgaccagctgctggaggtggtgggcctggagggcgccatggagatgggccagatctacaccggcctgaagagcgccggcagaagactggcccagtgcagctgcgtggtgatcagaaccagcaagagcctgcccatgcagatcgacggcgagccctggatgcagaccccctgcaccgtgagcaccgagtag

SEQ ID NO: 79100 - DNA, 2391 bp, synthetic construct
  misc_feature 1..2391: note = Description of Artificial Sequence: Synthetic coding sequence
  source 1..2391: mol_type = other DNA
atgaccaaccaggagaagtgggcccacctgagccccagcgagttcagccagctgcagaagtacgccgagtacagcaccaagaagctgaaggacgtgctggaggagttccacggcaacggcgtgctggccaagtacaaccccgagggcaccatcgacttcgagggcttcaagctgttcatgaagaccttcctggaggccgagctgcccgacgacttcaccgcccacctgttcatgagcttcagcaacaagttcccccacagcagccccatggtgaagagcaagcccgccctgctgagcggcggcctgagaatgaacaagggcgccatcaccccccccagaaccaccagccccgccaacacctgcagccccgaggtgatccacctgaaggacatcgtgtgctacctgagcctgctggagagaggcagacccgaggacaagctggagttcatgttcagactgtacgacaccgacggcaacggcttcctggacagcagcgagctggagaacatcatcagccagatgatgcacgtggccgagtacctggagtgggacgtgaccgagctgaaccccatcctgcacgagatgatggaggagatcgactacgaccacgacggcaccgtgagcctggaggagtggatccagggcggcatgaccaccatccccctgctggtgctgctgggcctggagaacaacgtgaaggacgacggccagcacgtgtggagactgaagcacttcaacaagcccgcctactgcaacctgtgcctgaacatgctgatcggcgtgggcaagcagggcctgtgctgcagcttctgcaagtacaccgtgcacgagagatgcgtggccagagccccccccagctgcatcaagacctacgtgaagagcaagagaaacaccgacgtgatgcaccactactgggtggagggcaactgccccaccaagtgcgacaagtgccacaagaccgtgaagtgctaccagggcctgaccggcctgcactgcgtgtggtgccagatcaccctgcacaacaagtgcgccagccacctgaagcccgagtgcgactgcggccccctgaaggaccacatcctgccccccaccaccatctgccccgtggtgctgaccctgcccaccagcggcgtgagcgtgcccgaggagagacagagcaccgtgaagaaggagaagagcggcagccagcagcccaacaaggtgatcgacaagaacaagatgcagagagccaacagcgtgaccgtggacggccagggcctgcaggtgacccccgtgcccggcacccaccccctgctggtgttcgtgaaccccaagagcggcggcaagcagggcgagagaatctacagaaagttccagtacctgctgaaccccagacaggtgtacagcctgagcggcaacggccccatgcccggcctgaacttcttcagagacgtgcccgacttcagagtgctggcctgcggcggcgacggcaccgtgggctgggtgctggactgcatcgagaaggccaacgtgggcaagcacccccccgtggccatcctgcccctgggcaccggcaacgacctggccagatgcctgagatggggcggcggctacgagggcgagaacctgatgaagatcctgaaggacatcgagaacagcaccgagatcatgctggacagatggaagttcgaggtgatccccaacgacaaggacgagaagggcgaccccgtgccctacagcatcatcaacaactacttcagcatcggcgtggacgccagcatcgcccacagattccacatcatgagagagaagcaccccgagaagttcaacagcagaatgaagaacaagttctggtacttcgagttcggcaccagcgagaccttcagcgccacctgcaagaagctgcacgagagcgtggagatcgagtgcgacggcgtgcagatcgacctgatcaacatcagcctggagggcatcgccatcctgaacatccccagcatgcacggcggcagcaacctgtggggcgagagcaagaagagaagaagccacagaagaatcgagaagaagggcagcgacaagagaaccaccgtgaccgacgccaaggagctgaagttcgccagccaggacctgagcgaccagctgctggaggtggtgggcctggagggcgccatggagatgggccagatctacaccggcctgaagagcgccggcagaagactggcccagtgcagctgcgtggtgatcagaaccagcaagagcctgcccatgcagatcgacggcgagccctggatgcagaccccctgcaccatcaagatcacccacaagaaccaggcccccatgctgatgggccccccccccaagaccggcctgttctgcagcctggtgaagagaaccagaaacagaagcaaggagtag

SEQ ID NO: 79101 - DNA, 228 bp, synthetic construct
  misc_feature 1..228: note = Description of Artificial Sequence: Synthetic coding sequence
  source 1..228: mol_type = other DNA
atgaccaaccaggagaagtgggcccacctgagccccagcgagttcagccagctgcagaagtacgccgagtacagcaccaagaagctgaaggacgtgctggaggagttccacggcaacggcgtgctggccaagtacaaccccgagggcaagcaggacatcctgaaccagaccatcgacttcgagggcttcaagctgttcatgaagaccttcctggaggccgagctgtag

SEQ ID NO: 79102 - DNA, 2358 bp, synthetic construct
  misc_feature 1..2358: note = Description of Artificial Sequence: Synthetic coding sequence
  source 1..2358: mol_type = other DNA
atgaccaaccaggagaagtgggcccacctgagccccagcgagttcagccagctgcagaagtacgccgagtacagcaccaagaagctgaaggacgtgctggaggagttccacggcaacggcgtgctggccaagtacaaccccgagggcaccatcgacttcgagggcttcaagctgttcatgaagaccttcctggaggccgagctgcccgacgacttcaccgcccacctgttcatgagcttcagcaacaagttcccccacagcagccccatggtgaagagcaagcccgccctgctgagcggcggcctgagaatgaacaagggcgccatcaccccccccagaaccaccagccccgccaacacctgcagccccgaggtgatccacctgaaggacatcgtgtgctacctgagcctgctggagagaggcagacccgaggacaagctggagttcatgttcagactgtacgacaccgacggcaacggcttcctggacagcagcgagctggagaacatcatcagccagatgatgcacgtggccgagtacctggagtgggacgtgaccgagctgaaccccatcctgcacgagatgatggaggagatcgactacgaccacgacggcaccgtgagcctggaggagtggatccagggcggcatgaccaccatccccctgctggtgctgctgggcctggagaacaacgtgaaggacgacggccagcacgtgtggagactgaagcacttcaacaagcccgcctactgcaacctgtgcctgaacatgctgatcggcgtgggcaagcagggcctgtgctgcagcttctgcaagtacaccgtgcacgagagatgcgtggccagagccccccccagctgcatcaagacctacgtgaagagcaagagaaacaccgacgtgatgcaccactactgggtggagggcaactgccccaccaagtgcgacaagtgccacaagaccgtgaagtgctaccagggcctgaccggcctgcactgcgtgtggtgccagatcaccctgcacaacaagtgcgccagccacctgaagcccgagtgcgactgcggccccctgaaggaccacatcctgccccccaccaccatctgccccgtggtgctggagagacagagcaccgtgaagaaggagaagagcggcagccagcagcccaacaaggtgatcgacaagaacaagatgcagagagccaacagcgtgaccgtggacggccagggcctgcaggtgacccccgtgcccggcacccaccccctgctggtgttcgtgaaccccaagagcggcggcaagcagggcgagagaatctacagaaagttccagtacctgctgaaccccagacaggtgtacagcctgagcggcaacggccccatgcccggcctgaacttcttcagagacgtgcccgacttcagagtgctggcctgcggcggcgacggcaccgtgggctgggtgctggactgcatcgagaaggccaacgtgggcaagcacccccccgtggccatcctgcccctgggcaccggcaacgacctggccagatgcctgagatggggcggcggctacgagggcgagaacctgatgaagatcctgaaggacatcgagaacagcaccgagatcatgctggacagatggaagttcgaggtgatccccaacgacaaggacgagaagggcgaccccgtgccctacagcatcatcaacaactacttcagcatcggcgtggacgccagcatcgcccacagattccacatcatgagagagaagcaccccgagaagttcaacagcagaatgaagaacaagttctggtacttcgagttcggcaccagcgagaccttcagcgccacctgcaagaagctgcacgagagcgtggagatcgagtgcgacggcgtgcagatcgacctgatcaacatcagcctggagggcatcgccatcctgaacatccccagcatgcacggcggcagcaacctgtggggcgagagcaagaagagaagaagccacagaagaatcgagaagaagggcagcgacaagagaaccaccgtgaccgacgccaaggagctgaagttcgccagccaggacctgagcgaccagctgctggaggtggtgggcctggagggcgccatggagatgggccagatctacaccggcctgaagagcgccggcagaagactggcccagtgcagctgcgtggtgatcagaaccagcaagagcctgcccatgcagatcgacggcgagccctggatgcagaccccctgcaccatcaagatcacccacaagaaccaggcccccatgctgatgggccccccccccaagaccggcctgttctgcagcctggtgaagagaaccagaaacagaagcaaggagtag

SEQ ID NO: 79103 - DNA, 3645 bp, synthetic construct
  misc_feature 1..3645: note = Description of Artificial Sequence: Synthetic coding sequence
  source 1..3645: mol_type = other DNA
atggccgccgccgccggcgcccccccccccggccccccccagcccccccccccccccccccccgaggagagcagcgacagcgagcccgaggccgagcccggcagcccccagaagctgatcagaaaggtgagcaccagcggccagatcagacagaagaccatcatcaaggagggcatgctgaccaagcagaacaacagcttccagagaagcaagagaagatacttcaagctgagaggcagaaccctgtactacgccaagaccgccaagagcatcatcttcgacgaggtggacctgaccgacgccagcgtggccgagagcagcaccaagaacgtgaacaacagcttcaccgtgatcaccccctgcagaaagctgatcctgtgcgccgacaacagaaaggagatggaggactggatcgccgccctgaagaccgtgcagaacagagagcacttcgagcccacccagtacagcatggaccacttcagcggcatgcacaactggtacgcctgcagccacgccagacccacctactgcaacgtgtgcagagaggccctgagcggcgtgaccagccacggcctgagctgcgaggtgtgcaagttcaaggcccacaagagatgcgccgtgagagccaccaacaactgcaagtggaccaccctggccagcatcggcaaggacatcatcgaggacgccgacggcatcgccatgccccaccagtggctggagggcaacctgcccgtgagcgccaagtgcaccgtgtgcgacaagacctgcggcagcgtgctgagactgcaggactggagatgcctgtggtgcaaggccatggtgcacaccagctgcaaggagagcctgctgaccaagtgccccctgggcctgtgcaaggtgagcgtgatcccccccaccgccctgaacagcatcgacagcgacggcttctggaaggccagctgcccccccagctgcaccagccccctgctggtgttcgtgaacagcaagagcggcgacaaccagggcgtgaagttcctgagaagattcaagcagctgctgaaccccgcccaggtgttcgacctgatgaacggcggcccccacctgggcctgagactgttccagaagttcgacaccttcagaatcctggtgtgcggcggcgacggcagcgtgggctgggtgctgagcgagatcgacagcctgaacctgcacaagcagtgccagctgggcgtgctgcccctgggcaccggcaacgacctggccagagtgctgggctggggcagcgcctgcgacgacgacacccagctgccccagatcctggagaagctggagagagccagcaccaagatgctggacagatggagcgtgatggcctacgaggccaagctgcccagacaggccagcagcagcaccgtgaccgaggacttcagcgaggacagcgaggtgcagcagatcctgttctacgaggacagcgtggccgcccacctgagcaagatcctgaccagcgaccagcacagcgtggtgatcagcagcgccaaggtgctgtgcgagaccgtgaaggacttcgtggccagagtgggcaaggcctacgagaagaccaccgagagcagcgaggagagcgaggtgatggccaagaagtgcagcgtgctgaaggagaagctggacagcctgctgaagaccctggacgacgagagccaggccagcagcagcctgcccaaccccccccccaccatcgccgaggaggccgaggacggcgacggcagcggcagcatctgcggcagcaccggcgacagactggtggccagcgcctgccccgccagaccccagatcttcagacccagagagcagctgatgctgagagccaacagcctgaagaaggccatcagacagatcatcgagcacaccgagaaggccgtggacgagcagaacgcccagacccaggagcaggagggcttcgtgctgggcctgagcgagagcgaggagaagatggaccacagagtgtgcccccccctgagccacagcgagagcttcggcgtgcccaagggcagaagccagagaaaggtgagcaagagcccctgcgagaagctgatcagcaagggcagcctgagcctgggcagcagcgccagcctgcccccccagcccggcagcagagacggcctgcccgccctgaacaccaagatcctgtaccccaacgtgagagccggcatgagcggcagcctgcccggcggcagcgtgatcagcagactgctgatcaacgccgaccccttcaacagcgagcccgagaccctggagtactacaccgagaagtgcgtgatgaacaactacttcggcatcggcctggacgccaagatcagcctggacttcaacaacaagagagacgagcaccccgagaagtgcagaagcagaaccaagaacatgatgtggtacggcgtgctgggcaccaaggagctgctgcacagaacctacaagaacctggagcagaaggtgctgctggagtgcgacggcagacccatccccctgcccagcctgcagggcatcgccgtgctgaacatccccagctacgccggcggcaccaacttctggggcggcaccaaggaggacgacaccttcgccgcccccagcttcgacgacaagatcctggaggtggtggccgtgttcggcagcatgcagatggccgtgagcagagtgatcagactgcagcaccacagaatcgcccagtgcagaaccgtgaagatcagcatcctgggcgacgagggcgtgcccgtgcaggtggacggcgaggcctgggtgcagccccccggctacatcagaatcgtgcacaagaacagagcccagaccctgaccagagacagagccttcgagagcaccctgaagagctgggaggacaagcagaagtgcgagctgcccagaccccccagctgcagcctgcaccccgagatgctgagcgaggaggaggccacccagatggaccagttcggccaggccgccggcgtgctgatccacagcatcagagagatcgcccagagccacagagacatggagcaggagctggcccacgccgtgaacgccagcagcaagagcatggacagagtgtacggcaagcccagaaccaccgagggcctgaactgcagcttcgtgctggagatggtgaacaacttcagagccctgagaagcgagaccgagctgctgctgagcggcaagatggccctgcagctggaccccccccagaaggagcagctgggcagcgccctggccgagatggacagacagctgagaagactggccgacaccccctggctgtgccagagcgccgagcccggcgacgaggagagcgtgatgctggacctggccaagagaagcagaagcggcaagttcagactggtgaccaagttcaagaaggagaagaacaacaagaacaaggaggcccacagcagcctgggcgcccccgtgcacctgtggggcaccgaggaggtggccgcctggctggagcacctgagcctgtgcgagtacaaggacatcttcaccagacacgacatcagaggcagcgagctgctgcacctggagagaagagacctgaaggacctgggcgtgaccaaggtgggccacatgaagagaatcctgtgcggcatcaaggagctgagcagaagcgcccccgccgtggaggcctag

SEQ ID NO: 79104 - DNA, 3513 bp, synthetic construct
  misc_feature 1..3513: note = Description of Artificial Sequence: Synthetic coding sequence
  source 1..3513: mol_type = other DNA
atgaacatgttcctgtacttccagaccatcatcaaggagggcatgctgaccaagcagaacaacagcttccagagaagcaagagaagatacttcaagctgagaggcagaaccctgtactacgccaagaccgccaagagcatcatcttcgacgaggtggacctgaccgacgccagcgtggccgagagcagcaccaagaacgtgaacaacagcttcaccgtgatcaccccctgcagaaagctgatcctgtgcgccgacaacagaaaggagatggaggactggatcgccgccctgaagaccgtgcagaacagagagcacttcgagcccacccagtacagcatggaccacttcagcggcatgcacaactggtacgcctgcagccacgccagacccacctactgcaacgtgtgcagagaggccctgagcggcgtgaccagccacggcctgagctgcgaggtgtgcaagttcaaggcccacaagagatgcgccgtgagagccaccaacaactgcaagtggaccaccctggccagcatcggcaaggacatcatcgaggacgccgacggcatcgccatgccccaccagtggctggagggcaacctgcccgtgagcgccaagtgcaccgtgtgcgacaagacctgcggcagcgtgctgagactgcaggactggagatgcctgtggtgcaaggccatggtgcacaccagctgcaaggagagcctgctgaccaagtgccccctgggcctgtgcaaggtgagcgtgatcccccccaccgccctgaacagcatcgacagcgacggcttctggaaggccagctgcccccccagctgcaccagccccctgctggtgttcgtgaacagcaagagcggcgacaaccagggcgtgaagttcctgagaagattcaagcagctgctgaaccccgcccaggtgttcgacctgatgaacggcggcccccacctgggcctgagactgttccagaagttcgacaccttcagaatcctggtgtgcggcggcgacggcagcgtgggctgggtgctgagcgagatcgacagcctgaacctgcacaagcagtgccagctgggcgtgctgcccctgggcaccggcaacgacctggccagagtgctgggctggggcagcgcctgcgacgacgacacccagctgccccagatcctggagaagctggagagagccagcaccaagatgctggacagatggagcgtgatggcctacgaggccaagctgcccagacaggccagcagcagcaccgtgaccgaggacttcagcgaggacagcgaggtgcagcagatcctgttctacgaggacagcgtggccgcccacctgagcaagatcctgaccagcgaccagcacagcgtggtgatcagcagcgccaaggtgctgtgcgagaccgtgaaggacttcgtggccagagtgggcaaggcctacgagaagaccaccgagagcagcgaggagagcgaggtgatggccaagaagtgcagcgtgctgaaggagaagctggacagcctgctgaagaccctggacgacgagagccaggccagcagcagcctgcccaaccccccccccaccatcgccgaggaggccgaggacggcgacggcagcggcagcatctgcggcagcaccggcgacagactggtggccagcgcctgccccgccagaccccagatcttcagacccagagagcagctgatgctgagagccaacagcctgaagaaggccatcagacagatcatcgagcacaccgagaaggccgtggacgagcagaacgcccagacccaggagcaggagggcttcgtgctgggcctgagcgagagcgaggagaagatggaccacagagtgtgcccccccctgagccacagcgagagcttcggcgtgcccaagggcagaagccagagaaaggtgagcaagagcccctgcgagaagctgatcagcaagggcagcctgagcctgggcagcagcgccagcctgcccccccagcccggcagcagagacggcctgcccgccctgaacaccaagatcctgtaccccaacgtgagagccggcatgagcggcagcctgcccggcggcagcgtgatcagcagactgctgatcaacgccgaccccttcaacagcgagcccgagaccctggagtactacaccgagaagtgcgtgatgaacaactacttcggcatcggcctggacgccaagatcagcctggacttcaacaacaagagagacgagcaccccgagaagtgcagaagcagaaccaagaacatgatgtggtacggcgtgctgggcaccaaggagctgctgcacagaacctacaagaacctggagcagaaggtgctgctggagtgcgacggcagacccatccccctgcccagcctgcagggcatcgccgtgctgaacatccccagctacgccggcggcaccaacttctggggcggcaccaaggaggacgacaccttcgccgcccccagcttcgacgacaagatcctggaggtggtggccgtgttcggcagcatgcagatggccgtgagcagagtgatcagactgcagcaccacagaatcgcccagtgcagaaccgtgaagatcagcatcctgggcgacgagggcgtgcccgtgcaggtggacggcgaggcctgggtgcagccccccggctacatcagaatcgtgcacaagaacagagcccagaccctgaccagagacagagccttcgagagcaccctgaagagctgggaggacaagcagaagtgcgagctgcccagaccccccagctgcagcctgcaccccgagatgctgagcgaggaggaggccacccagatggaccagttcggccaggccgccggcgtgctgatccacagcatcagagagatcgcccagagccacagagacatggagcaggagctggcccacgccgtgaacgccagcagcaagagcatggacagagtgtacggcaagcccagaaccaccgagggcctgaactgcagcttcgtgctggagatggtgaacaacttcagagccctgagaagcgagaccgagctgctgctgagcggcaagatggccctgcagctggaccccccccagaaggagcagctgggcagcgccctggccgagatggacagacagctgagaagactggccgacaccccctggctgtgccagagcgccgagcccggcgacgaggagagcgtgatgctggacctggccaagagaagcagaagcggcaagttcagactggtgaccaagttcaagaaggagaagaacaacaagaacaaggaggcccacagcagcctgggcgcccccgtgcacctgtggggcaccgaggaggtggccgcctggctggagcacctgagcctgtgcgagtacaaggacatcttcaccagacacgacatcagaggcagcgagctgctgcacctggagagaagagacctgaaggacctgggcgtgaccaaggtgggccacatgaagagaatcctgtgcggcatcaaggagctgagcagaagcgcccccgccgtggaggcctag

SEQ ID NO: 79105 - DNA, 1704 bp, synthetic construct
  misc_feature 1..1704: note = Description of Artificial Sequence: Synthetic coding sequence
  source 1..1704: mol_type = other DNA
atggaggccgagagaagacccgcccccggcagccccagcgagggcctgttcgccgacggccacctgatcctgtggaccctgtgcagcgtgctgctgcccgtgttcatcaccttctggtgcagcctgcagagaagcagaagacagctgcacagaagagacatcttcagaaagagcaagcacggctggagagacaccgacctgttcagccagcccacctactgctgcgtgtgcgcccagcacatcctgcagggcgccttctgcgactgctgcggcctgagagtggacgagggctgcctgagaaaggccgacaagagattccagtgcaaggagatcatgctgaagaacgacaccaaggtgctggacgccatgccccaccactggatcagaggcaacgtgcccctgtgcagctactgcatggtgtgcaagcagcagtgcggctgccagcccaagctgtgcgactacagatgcatctggtgccagaagaccgtgcacgacgagtgcatgaagaacagcctgaagaacgagaagtgcgacttcggcgagttcaagaacctgatcatcccccccagctacctgaccagcatcaaccagatgagaaaggacaagaagaccgactacgaggtgctggccagcaagctgggcaagcagtggacccccctgatcatcctggccaacagcagaagcggcaccaacatgggcgagggcctgctgggcgagttcagaatcctgctgaaccccgtgcaggtgttcgacgtgaccaagaccccccccatcaaggccctgcagctgtgcaccctgctgccctactacagcgccagagtgctggtgtgcggcggcgacggcaccgtgggctgggtgctggacgccgtggacgacatgaagatcaagggccaggagaagtacatcccccaggtggccgtgctgcccctgggcaccggcaacgacctgagcaacaccctgggctggggcaccggctacgccggcgagatccccgtggcccaggtgctgagaaacgtgatggaggccgacggcatcaagctggacagatggaaggtgcaggtgaccaacaagggctactacaacctgagaaagcccaaggagttcaccatgaacaactacttcagcgtgggccccgacgccctgatggccctgaacttccacgcccacagagagaaggcccccagcctgttcagcagcagaatcctgaacaaggccgtgtacctgttctacggcaccaaggactgcctggtgcaggagtgcaaggacctgaacaagaaggtggagctggagctggacggcgagagagtggccctgcccagcctggagggcatcatcgtgctgaacatcggctactggggcggcggctgcagactgtgggagggcatgggcgacgagacctaccccctggccagacacgacgacggcctgctggaggtggtgggcgtgtacggcagcttccactgcgcccagatccaggtgaagctggccaaccccttcagaatcggccaggcccacaccgtgagactgatcctgaagtgcagcatgatgcccatgcaggtggacggcgagccctgggcccagggcccctgcaccgtgaccatcacccacaagacccacgccatgatgctgtacttcagcggcgagcagaccgacgacgacatcagcagcaccagcgaccaggaggacatcaaggccaccgagtag

SEQ ID NO: 79106 - DNA, 2376 bp, synthetic construct
  misc_feature 1..2376: note = Description of Artificial Sequence: Synthetic coding sequence
  source 1..2376: mol_type = other DNA
atgggcgaggagagatgggtgagcctgacccccgaggagttcgaccagctgcagaagtacagcgagtacagcagcaagaagatcaaggacgccctgaccgagttcaacgagggcggcagcctgaagcagtacgacccccacgagcccatcagctacgacgtgttcaagctgttcatgagagcctacctggaggtggacctgccccagcccctgagcacccacctgttcctggccttcagccagaagcccagacacgagaccagcgaccaccccaccgagggcgccagcaacagcgaggccaacagcgccgacaccaacatccagaacgccgacaacgccaccaaggccgacgaggcctgcgcccccgacaccgagagcaacatggccgagaagcaggcccccgccgaggaccaggtggccgccacccccctggagccccccgtgcccagaagcagcagcagcgagagccccgtggtgtacctgaaggacgtggtgtgctacctgagcctgctggagaccggcagaccccaggacaagctggagttcatgttcagactgtacgacagcgacgagaacggcctgctggaccaggccgagatggactgcatcgtgaaccagatgctgcacatcgcccagtacctggagtgggaccccaccgagctgagacccatcctgaaggagatgctgcagggcatggactacgacagagacggcttcgtgagcctgcaggagtgggtgcacggcggcatgaccaccatccccctgctggtgctgctgggcatggacgacagcggcagcaagggcgacggcagacacgcctggaccatgaagcacttcaagaagcccacctactgcaacttctgccacatcatgctgatgggcgtgagaaagcagggcctgtgctgcacctactgcaagtacaccgtgcacgagagatgcgtgagcagaaacatccccggctgcgtgaagacctacagcaaggccaagagaagcggcgaggtgatgcagcacgcctgggtggagggcaacagcagcgtgaagtgcgacagatgccacaagagcatcaagtgctaccagagcgtgaccgccagacactgcgtgtggtgcagaatgaccttccacagaaagtgcgagctgagcaccctgtgcgacggcggcgagctgagagaccacatcctgctgcccaccagcatctgccccatcaccagagacagacccggcgagaagagcgacggctgcgtgagcgccaagggcgagctggtgatgcagtacaagatcatccccacccccggcacccaccccctgctggtgctggtgaaccccaagagcggcggcagacagggcgagagaatcctgagaaagttccactacctgctgaaccccaagcaggtgttcaacctggacaacggcggccccacccccggcctgaacttcttcagagacacccccgacttcagagtgctggcctgcggcggcgacggcaccgtgggctggatcctggactgcatcgacaaggccaacttcgccaagcacccccccgtggccgtgctgcccctgggcaccggcaacgacctggccagatgcctgagatggggcggcggctacgagggcggcagcctgaccaagatcctgaaggacatcgagcagagccccctggtgatgctggacagatggcacctggaggtgatccccagagaggaggtggagaacggcgaccaggtgccctacagcatcatgaacaactacttcagcatcggcgtggacgccagcatcgcccacagattccacgtgatgagagagaagcaccccgagaagttcaacagcagaatgaagaacaagctgtggtacttcgagttcggcaccagcgagaccttcgccgccacctgcaagaagctgcacgaccacatcgagctggagtgcgacggcgtgggcgtggacctgagcaacatcttcctggagggcatcgccatcctgaacatccccagcatgtacggcggcaccaacctgtggggcgagaacaagaagaacagagccgtgatcagagagagcagaaagggcgtgaccgaccccaaggagctgaagttctgcgtgcaggacctgagcgaccagctgctggaggtggtgggcctggagggcgccatggagatgggccagatctacaccggcctgaagagcgccggcagaagactggcccagtgcgccagcgtgaccatcagaaccaacaagctgctgcccatgcaggtggacggcgagccctggatgcagccctgctgcaccatcaagatcacccacaagaaccaggcccccatgatgatgggccccccccagaagagcagcttcttcagcctgagaagaaagagcagaagcaaggactag

SEQ ID NO: 79107 - DNA, 2301 bp, synthetic construct
  misc_feature 1..2301: note = Description of Artificial Sequence: Synthetic coding sequence
  source 1..2301: mol_type = other DNA
atgggcgaggagagatgggtgagcctgacccccgaggagttcgaccagctgcagaagtacagcgagtacagcagcaagaagatcaaggacgccctgaccgagttcaacgagggcggcagcctgaagcagtacgacccccacgagcccatcagctacgacgtgttcaagctgttcatgagagcctacctggaggtggacctgccccagcccctgagcacccacctgttcctggccttcagccagaagcccagacacgagaccagcgaccaccccaccgagggcgccagcaacagcgaggccaacagcgccgacaccaacatccagaacgccgacaacgccaccaaggccgacgaggcctgcgcccccgacaccgagagcaacatggccgagaagcaggcccccgccgaggaccaggtggccgccacccccctggagccccccgtgcccagaagcagcagcagcgagagccccgtggtgtacctgaaggacgtggtgtgctacctgagcctgctggagaccggcagaccccaggacaagctggagttcatgttcagactgtacgacagcgacgagaacggcctgctggaccaggccgagatggactgcatcgtgaaccagatgctgcacatcgcccagtacctggagtgggaccccaccgagctgagacccatcctgaaggagatgctgcagggcatggactacgacagagacggcttcgtgagcctgcaggagtgggtgcacggcggcatgaccaccatccccctgctggtgctgctgggcatggacgacagcggcagcaagggcgacggcagacacgcctggaccatgaagcacttcaagaagcccacctactgcaacttctgccacatcatgctgatgggcgtgagaaagcagggcctgtgctgcacctactgcaagtacaccgtgcacgagagatgcgtgagcagaaacatccccggctgcgtgaagacctacagcaaggccaagagaagcggcgaggtgatgcagcacgcctgggtggagggcaacagcagcgtgaagtgcgacagatgccacaagagcatcaagtgctaccagagcgtgaccgccagacactgcgtgtggtgcagaatgaccttccacagaaagtgcgagctgagcaccctgtgcgacggcggcgagctgagagaccacatcctgctgcccaccagcatctgccccatcaccagagacagacccggcgagaagagcgacggctgcgtgagcgccaagggcgagctggtgatgcagtacaagatcatccccacccccggcacccaccccctgctggtgctggtgaaccccaagagcggcggcagacagggcgagagactgaacttcttcagagacacccccgacttcagagtgctggcctgcggcggcgacggcaccgtgggctggatcctggactgcatcgacaaggccaacttcgccaagcacccccccgtggccgtgctgcccctgggcaccggcaacgacctggccagatgcctgagatggggcggcggctacgagggcggcagcctgaccaagatcctgaaggacatcgagcagagccccctggtgatgctggacagatggcacctggaggtgatccccagagaggaggtggagaacggcgaccaggtgccctacagcatcatgaacaactacttcagcatcggcgtggacgccagcatcgcccacagattccacgtgatgagagagaagcaccccgagaagttcaacagcagaatgaagaacaagctgtggtacttcgagttcggcaccagcgagaccttcgccgccacctgcaagaagctgcacgaccacatcgagctggagtgcgacggcgtgggcgtggacctgagcaacatcttcctggagggcatcgccatcctgaacatccccagcatgtacggcggcaccaacctgtggggcgagaacaagaagaacagagccgtgatcagagagagcagaaagggcgtgaccgaccccaaggagctgaagttctgcgtgcaggacctgagcgaccagctgctggaggtggtgggcctggagggcgccatggagatgggccagatctacaccggcctgaagagcgccggcagaagactggcccagtgcgccagcgtgaccatcagaaccaacaagctgctgcccatgcaggtggacggcgagccctggatgcagccctgctgcaccatcaagatcacccacaagaaccaggcccccatgatgatgggccccccccagaagagcagcttcttcagcctgagaagaaagagcagaagcaaggactag

SEQ ID NO: 79108 - DNA, 2259 bp, synthetic construct
  misc_feature 1..2259: note = Description of Artificial Sequence: Synthetic coding sequence
  source 1..2259: mol_type = other DNA
atgggcgaggagagatgggtgagcctgacccccgaggagttcgaccagctgcagaagtacagcgagtacagcagcaagaagatcaaggacgccctgaccgagttcaacgagggcggcagcctgaagcagtacgacccccacgagcccatcagctacgacgtgttcaagctgttcatgagagcctacctggaggtggacctgccccagcccctgagcacccacctgttcctggccttcagccagaagcccagacacgagaccagcgaccaccccaccgagggcgccagcaacagcgaggccaacagcgccgacaccaacatccagaacgccgacaacgccaccaaggccgacgaggcctgcgcccccgacaccgagagcaacatggccgagaagcaggcccccgccgaggaccaggtggccgccacccccctggagccccccgtgcccagaagcagcagcagcgagagccccgtggtgtacctgaaggacgtggtgtgctacctgagcctgctggagaccggcagaccccaggacaagctggagttcatgttcagactgtacgacagcgacgagaacggcctgctggaccaggccgagatggactgcatcgtgaaccagatgctgcacatcgcccagtacctggagtgggaccccaccgagctgagacccatcctgaaggagatgctgcagggcatggactacgacagagacggcttcgtgagcctgcaggagtgggtgcacggcggcatgaccaccatccccctgctggtgctgctgggcatggacgacagcggcagcaagggcgacggcagacacgcctggaccatgaagcacttcaagaagcccacctactgcaacttctgccacatcatgctgatgggcgtgagaaagcagggcctgtgctgcacctactgcaagtacaccgtgcacgagagatgcgtgagcagaaacatccccggctgcgtgaagacctacagcaaggccaagagaagcggcgagttccacagaaagtgcgagctgagcaccctgtgcgacggcggcgagctgagagaccacatcctgctgcccaccagcatctgccccatcaccagagacagacccggcgagaagagcgacggctgcgtgagcgccaagggcgagctggtgatgcagtacaagatcatccccacccccggcacccaccccctgctggtgctggtgaaccccaagagcggcggcagacagggcgagagaatcctgagaaagttccactacctgctgaaccccaagcaggtgttcaacctggacaacggcggccccacccccggcctgaacttcttcagagacacccccgacttcagagtgctggcctgcggcggcgacggcaccgtgggctggatcctggactgcatcgacaaggccaacttcgccaagcacccccccgtggccgtgctgcccctgggcaccggcaacgacctggccagatgcctgagatggggcggcggctacgagggcggcagcctgaccaagatcctgaaggacatcgagcagagccccctggtgatgctggacagatggcacctggaggtgatccccagagaggaggtggagaacggcgaccaggtgccctacagcatcatgaacaactacttcagcatcggcgtggacgccagcatcgcccacagattccacgtgatgagagagaagcaccccgagaagttcaacagcagaatgaagaacaagctgtggtacttcgagttcggcaccagcgagaccttcgccgccacctgcaagaagctgcacgaccacatcgagctggagtgcgacggcgtgggcgtggacctgagcaacatcttcctggagggcatcgccatcctgaacatccccagcatgtacggcggcaccaacctgtggggcgagaacaagaagaacagagccgtgatcagagagagcagaaagggcgtgaccgaccccaaggagctgaagttctgcgtgcaggacctgagcgaccagctgctggaggtggtgggcctggagggcgccatggagatgggccagatctacaccggcctgaagagcgccggcagaagactggcccagtgcgccagcgtgaccatcagaaccaacaagctgctgcccatgcaggtggacggcgagccctggatgcagccctgctgcaccatcaagatcacccacaagaaccaggcccccatgatgatgggccccccccagaagagcagcttcttcagcctgagaagaaagagcagaagcaaggactag

SEQ ID NO: 79109 - DNA, 1818 bp, synthetic construct
  misc_feature 1..1818: note = Description of Artificial Sequence: Synthetic coding sequence
  source 1..1818: mol_type = other DNA
agcctgaagatgggcgaggagagatgggtgagcctgacccccgaggagttcgaccagctgcagaagtacagcgagtacagcagcaagaagatcaaggacgccctgaccgagttcaacgagggcggcagcctgaagcagtacgacccccacgagcccatcagctacgacgtgttcaagctgttcatgagagcctacctggaggtggacctgccccagcccctgagcacccacctgttcctggccttcagccagaagcccagacacgagaccagcgaccaccccaccgagggcgccagcaacagcgaggccaacagcgccgacaccaacatccagaacgccgacaacgccaccaaggccgacgaggcctgcgcccccgacaccgagagcaacatggccgagaagcaggcccccgccgaggaccaggtggccgccacccccctggagccccccgtgcccagaagcagcagcagcgagagccccgtggtgtacctgaaggacgtggtgtgctacctgagcctgctggagaccggcagaccccaggacaagctggagttcatgttcagactgtacgacagcgacgagaacggcctgctggaccaggccgagatggactgcatcgtgaaccagatgctgcacatcgcccagtacctggagtgggaccccaccgagctgagacccatcctgaaggagatgctgcagggcatggactacgacagagacggcttcgtgagcctgcaggagtgggtgcacggcggcatgaccaccatccccctgctggtgctgctgggcatggacgacagcggcagcaagggcgacggcagacacgcctggaccatgaagcacttcaagaagcccacctactgcaacttctgccacatcatgctgatgggcgtgagaaagcagggcctgtgctgcacctactgcaagtacaccgtgcacgagagatgcgtgagcagaaacatccccggctgcgtgaagacctacagcaaggccaagagaagcggcgagttccacagaaagtgcgagctgagcaccctgtgcgacggcggcgagctgagagaccacatcctgctgcccaccagcatctgccccatcaccagagacagacccggcgagaagagcgacggctgcgtgagcgccaagggcgagctggtgatgcagtacaagatcatccccacccccggcacccaccccctgctggtgctggtgaaccccaagagcggcggcagacagggcgagagaatcctgagaaagttccactacctgctgaaccccaagcaggtgttcaacctggacaacggcggccccacccccggcctgaacttcttcagagacacccccgacttcagagtgctggcctgcggcggcgacggcaccgtgggctggatcctggactgcatcgacaaggccaacttcgccaagcacccccccgtggccgtgctgcccctgggcaccggcaacgacctggccagatgcctgagatggggcggcggctacgagggcggcagcctgaccaagatcctgaaggacatcgagcagagccccctggtgatgctggacagatggcacctggaggtgatccccagagaggaggtggagaacggcgaccaggtgccctacagcatcatgaacaactacttcagcatcggcgtggacgccagcatcgcccacagattccacgtgatgagagagaagcaccccgagaagttcaacagcagaatgaagaacaagctgtggtacttcgagttcggcaccagcgagaccttcgccgccacctgcaagaagctgcacgaccacatcgagctggagtggtgctag

SEQ ID NO: 79110 - DNA, 2199 bp, synthetic construct
  misc_feature 1..2199: note = Description of Artificial Sequence: Synthetic coding sequence
  source 1..2199: mol_type = other DNA
atgggcgaggagagatgggtgagcctgacccccgaggagttcgaccagctgcagaagtacagcgagtacagcagcaagaagatcaaggacgccctgaccgagttcaacgagggcggcagcctgaagcagtacgacccccacgagcccatcagctacgacgtgttcaagctgttcatgagagcctacctggaggtggacctgccccagcccctgagcacccacctgttcctggccttcagccagaagcccagacacgagaccagcgaccaccccaccgagggcgccagcaacagcgaggccaacagcgccgacaccaacatccagaacgccgacaacgccaccaaggccgacgaggcctgcgcccccgacaccgagagcaacatggccgagaagcaggcccccgccgaggaccaggtggccgccacccccctggagccccccgtgcccagaagcagcagcagcgagagccccgtggtgtacctgaaggacgtggtgtgctacctgagcctgctggagaccggcagaccccaggacaagctggagttcatgttcagactgtacgacagcgacgagaacggcctgctggaccaggccgagatggactgcatcgtgaaccagatgctgcacatcgcccagtacctggagtgggaccccaccgagctgagacccatcctgaaggagatgctgcagggcatggactacgacagagacggcttcgtgagcctgcaggagtgggtgcacggcggcatgaccaccatccccctgctggtgctgctgggcatggacgacagcggcagcaagggcgacggcagacacgcctggaccatgaagcacttcaagaagcccacctactgcaacttctgccacatcatgctgatgggcgtgagaaagcagggcctgtgctgcacctactgcaagtacaccgtgcacgagagatgcgtgagcagaaacatccccggctgcgtgaagacctacagcaaggccaagagaagcggcgagttccacagaaagtgcgagctgagcaccctgtgcgacggcggcgagctgagagaccacatcctgctgcccaccagcatctgccccatcaccagatacaagatcatccccacccccggcacccaccccctgctggtgctggtgaaccccaagagcggcggcagacagggcgagagaatcctgagaaagttccactacctgctgaaccccaagcaggtgttcaacctggacaacggcggccccacccccggcctgaacttcttcagagacacccccgacttcagagtgctggcctgcggcggcgacggcaccgtgggctggatcctggactgcatcgacaaggccaacttcgccaagcacccccccgtggccgtgctgcccctgggcaccggcaacgacctggccagatgcctgagatggggcggcggctacgagggcggcagcctgaccaagatcctgaaggacatcgagcagagccccctggtgatgctggacagatggcacctggaggtgatccccagagaggaggtggagaacggcgaccaggtgccctacagcatcatgaacaactacttcagcatcggcgtggacgccagcatcgcccacagattccacgtgatgagagagaagcaccccgagaagttcaacagcagaatgaagaacaagctgtggtacttcgagttcggcaccagcgagaccttcgccgccacctgcaagaagctgcacgaccacatcgagctggagtgcgacggcgtgggcgtggacctgagcaacatcttcctggagggcatcgccatcctgaacatccccagcatgtacggcggcaccaacctgtggggcgagaacaagaagaacagagccgtgatcagagagagcagaaagggcgtgaccgaccccaaggagctgaagttctgcgtgcaggacctgagcgaccagctgctggaggtggtgggcctggagggcgccatggagatgggccagatctacaccggcctgaagagcgccggcagaagactggcccagtgcgccagcgtgaccatcagaaccaacaagctgctgcccatgcaggtggacggcgagccctggatgcagccctgctgcaccatcaagatcacccacaagaaccaggcccccatgatgatgggccccccccagaagagcagcttcttcagcctgagaagaaagagcagaagcaaggactag

SEQ ID NO: 79111 - DNA, 3198 bp, synthetic construct
  misc_feature 1..3198: note = Description of Artificial Sequence: Synthetic coding sequence
  source 1..3198: mol_type = other DNA
atggacgccgccggcagaggctgccacctgctgcccctgcccgccgccagaggccccgccagagcccccgccgccgccgccgccgccgccgccagcccccccggcccctgcagcggcgccgcctgcgcccccagcgccgccgccggcgccggcgccatgaaccccagcagcagcgccggcgaggagaagggcgccaccggcggcagcagcagcagcggcagcggcgccggcagctgctgcctgggcgccgagggcggcgccgaccccagaggcgccggcagcgccgccgccgccggcgccgccgccctggacgagcccgccgccgccggccagaaggagaaggacgaggccctggaggagaagctgagaaacctgaccttcagaaagcaggtgagctacagaaaggccatcagcagagccggcctgcagcacctggcccccgcccaccccctgagcctgcccgtggccaacggccccgccaaggagcccagagccaccctggactggagcgagaacgccgtgaacggcgagcacctgtggctggagaccaacgtgagcggcgacctgtgctacctgggcgaggagaactgccaggtgagattcgccaagagcgccctgagaagaaagtgcgccgtgtgcaagatcgtggtgcacaccgcctgcatcgagcagctggagaagatcaacttcagatgcaagcccaccttcagagagggcggcagcagaagccccagagagaacttcgtgagacaccactgggtgcacagaagaagacaggagggcaagtgcaagcagtgcggcaagggcttccagcagaagttcagcttccacagcaaggagatcgtggccatcagctgcagctggtgcaagcaggccttccacaacaaggtgacctgcttcatgctgcaccacatcgaggagccctgcagcctgggcgcccacgccgccgtgatcgtgccccccacctggatcatcaaggtgaagaagccccagaacagcctgaaggccagcaacagaaagaagaagagaaccagcttcaagagaaaggccagcaagagaggcatggagcaggagaacaagggcagacccttcgtgatcaagcccatcagcagccccctgatgaagcccctgctggtgttcgtgaaccccaagagcggcggcaaccagggcaccaaggtgctgcagatgttcatgtggtacctgaaccccagacaggtgttcgacctgagccaggagggccccaaggacgccctggagctgtacagaaaggtgcccaacctgagaatcctggcctgcggcggcgacggcaccgtgggctggatcctgagcatcctggacgagctgcagctgagcccccagccccccgtgggcgtgctgcccctgggcaccggcaacgacctggccagaaccctgaactggggcggcggctacaccgacgagcccgtgagcaagatcctgtgccaggtggaggacggcaccgtggtgcagctggacagatggaacctgcacgtggagagaaaccccgacctgccccccgaggagctggaggacggcgtgtgcaagctgcccctgaacgtgttcaacaactacttcagcctgggcttcgacgcccacgtgaccctggagttccacgagagcagagaggccaaccccgagaagttcaacagcagattcagaaacaagatgttctacgccggcgccgccttcagcgacttcctgcagagaagcagcagagacctgagcaagcacgtgaaggtggtgtgcgacggcaccgacctgacccccaagatccaggagctgaagttccagtgcatcgtgttcctgaacatccccagatactgcgccggcaccatgccctggggcaaccccggcgaccaccacgacttcgagccccagagacacgacgacggctacatcgaggtgatcggcttcaccatggccagcctggccgccctgcaggtgggcggccacggcgagagactgcaccagtgcagagaggtgatgctgctgacctacaagagcatccccatgcaggtggacggcgagccctgcagactggcccccgccatgatcagaatcagcctgagaaaccaggccaacatggtgcagaagagcaagagaagaaccagcatgcccctgctgaacgacccccagagcgtgcccgacagactgagaatcagagtgaacaagatcagcctgcaggactacgagggcttccactacgacaaggagaagctgagagaggccagcatcagcgactggctgagaaccatcgccggcgagctggtgcagagcttcggcgccatccccctgggcatcctggtggtgagaggcgactgcgacctggagacctgcagaatgtacatcgacagactgcaggaggacctgcagagcgtgagcagcggcagccagagagtgcactaccaggaccacgagaccagcttccccagagccctgagcgcccagagactgagccccagatggtgcttcctggacgacagaagccaggagcacctgcacttcgtgatggagatcagccaggacgagatcttcatcctggaccccgacatggtggtgagccagcccgccggcaccccccccggcatgcccgacctggtggtggagcaggccagcggcatcagcgactggtggaaccccgccctgagaaagagaatgctgagcgacagcggcctgggcatgatcgccccctactacgaggacagcgacctgaaggacctgagccacagcagagtgctgcagagccccgtgagcagcgaggaccacgccatcctgcaggccgtgatcgccggcgacctgatgaagctgatcgagagctacaagaacggcggcagcctgctgatccagggccccgaccactgcagcctgctgcactacgccgccaagaccggcaacggcgagatcgtgaagtacatcctggaccacggccccagcgagctgctggacatggccgacagcgagaccggcgagaccgccctgcacaaggccgcctgccagagaaacagagccgtgtgccagctgctggtggacgccggcgccagcctgagaaagaccgacagcaagggcaagaccccccaggagagagcccagcaggccggcgaccccgacctggccgcctacctggagagcagacagaactacaaggtgatcggccacgaggacctggagaccgccgtgtag

SEQ ID NO: 79112 - DNA, 3207 bp, synthetic construct
  misc_feature 1..3207: note = Description of Artificial Sequence: Synthetic coding sequence
  source 1..3207: mol_type = other DNA
atggacgccgccggcagaggctgccacctgctgcccctgcccgccgccagaggccccgccagagcccccgccgccgccgccgccgccgccgccagcccccccggcccctgcagcggcgccgcctgcgcccccagcgccgccgccggcgccggcgccatgaaccccagcagcagcgccggcgaggagaagggcgccaccggcggcagcagcagcagcggcagcggcgccggcagctgctgcctgggcgccgagggcggcgccgaccccagaggcgccggcagcgccgccgccgccggcgccgccgccctggacgagcccgccgccgccggccagaaggagaaggacgaggccctggaggagaagctgagaaacctgaccttcagaaagcaggtgagctacagaaaggccatcagcagagccggcctgcagcacctggcccccgcccaccccctgagcctgcccgtggccaacggccccgccaaggagcccagagccaccctggactggagcgagaacgccgtgaacggcgagcacctgtggctggagaccaacgtgagcggcgacctgtgctacctgggcgaggagaactgccaggtgagattcgccaagagcgccctgagaagaaagtgcgccgtgtgcaagatcgtggtgcacaccgcctgcatcgagcagctggagaagatcaacttcagatgcaagcccaccttcagagagggcggcagcagaagccccagagagaacttcgtgagacaccactgggtgcacagaagaagacaggagggcaagtgcaagcagtgcggcaagggcttccagcagaagttcagcttccacagcaaggagatcgtggccatcagctgcagctggtgcaagcaggccttccacaacaaggtgacctgcttcatgctgcaccacatcgaggagccctgcagcctgggcgcccacgccgccgtgatcgtgccccccacctggatcatcaaggtgaagaagccccagaacagcctgaaggccagcaacagaaagaagaagagaaccagcttcaagagaaaggccagcaagagaggcatggagcaggagaacaagggcagacccttcgtgatcaagcccatcagcagccccctgatgaagcccctgctggtgttcgtgaaccccaagagcggcggcaaccagggcaccaaggtgctgcagatgttcatgtggtacctgaaccccagacaggtgttcgacctgagccaggagggccccaaggacgccctggagctgtacagaaaggtgcccaacctgagaatcctggcctgcggcggcgacggcaccgtgggctggatcctgagcatcctggacgagctgcagctgagcccccagccccccgtgggcgtgctgcccctgggcaccggcaacgacctggccagaaccctgaactggggcggcggctacaccgacgagcccgtgagcaagatcctgtgccaggtggaggacggcaccgtggtgcagctggacagatggaacctgcacgtggagagaaaccccgacctgccccccgaggagctggaggacggcgtgtgcaagctgcccctgaacgtgttcaacaactacttcagcctgggcttcgacgcccacgtgaccctggagttccacgagagcagagaggccaaccccgagaagttcaacagcagattcagaaacaagatgttctacgccggcgccgccttcagcgacttcctgcagagaagcagcagagacctgagcaagcacgtgaaggtggtgtgcgacggcaccgacctgacccccaagatccaggagctgaagttccagtgcatcgtgttcctgaacatccccagatactgcgccggcaccatgccctggggcaaccccggcgaccaccacgacttcgagccccagagacacgacgacggctacatcgaggtgatcggcttcaccatggccagcctggccgccctgcaggtgggcggccacggcgagagactgcaccagtgcagagaggtgatgctgctgacctacaagagcatccccatgcaggtggacggcgagccctgcagactggcccccgccatgatcagaatcagcctgagaaaccaggccaacatggtgcagaagagcaagagaagaaccagcatgcccctgctgaacgacatccaccaggtgcagaccgccgacctgagaagagtgagcgccccccccggcagcttcaccatcccccagagcgtgcccgacagactgagaatcagagtgaacaagatcagcctgcaggactacgagggcttccactacgacaaggagaagctgagagaggccagcatccccctgggcatcctggtggtgagaggcgactgcgacctggagacctgcagaatgtacatcgacagactgcaggaggacctgcagagcgtgagcagcggcagccagagagtgcactaccaggaccacgagaccagcttccccagagccctgagcgcccagagactgagccccagatggtgcttcctggacgacagaagccaggagcacctgcacttcgtgatggagatcagccaggacgagatcttcatcctggaccccgacatggtggtgagccagcccgccggcaccccccccggcatgcccgacctggtggtggagcaggccagcggcatcagcgactggtggaaccccgccctgagaaagagaatgctgagcgacagcggcctgggcatgatcgccccctactacgaggacagcgacctgaaggacctgagccacagcagagtgctgcagagccccgtgagcagcgaggaccacgccatcctgcaggccgtgatcgccggcgacctgatgaagctgatcgagagctacaagaacggcggcagcctgctgatccagggccccgaccactgcagcctgctgcactacgccgccaagaccggcaacggcgagatcgtgaagtacatcctggaccacggccccagcgagctgctggacatggccgacagcgagaccggcgagaccgccctgcacaaggccgcctgccagagaaacagagccgtgtgccagctgctggtggacgccggcgccagcctgagaaagaccgacagcaagggcaagaccccccaggagagagcccagcaggccggcgaccccgacctggccgcctacctggagagcagacagaactacaaggtgatcggccacgaggacctggagaccgccgtgtag

SEQ ID NO: 79113 - DNA, 2949 bp, synthetic construct
  misc_feature 1..2949: note = Description of Artificial Sequence: Synthetic coding sequence
  source 1..2949: mol_type = other DNA
atgaaccccagcagcagcgccggcgaggagaagggcgccaccggcggcagcagcagcagcggcagcggcgccggcagctgctgcctgggcgccgagggcggcgccgaccccagaggcgccggcagcgccgccgccgccggcgccgccgccctggacgagcccgccgccgccggccagaaggagaaggacgaggccctggaggagaagctgagaaacctgaccttcagaaagcaggtgagctacagaaaggccatcagcagagccggcctgcagcacctggcccccgcccaccccctgagcctgcccgtggccaacggccccgccaaggagcccagagccaccctggactggagcgagaacgccgtgaacggcgagcacctgtggctggagaccaacgtgagcggcgacctgtgctacctgggcgaggagaactgccaggtgagattcgccaagagcgccctgagaagaaagtgcgccgtgtgcaagatcgtggtgcacaccgcctgcatcgagcagctggagaagatcaacttcagatgcaagcccaccttcagagagggcggcagcagaagccccagagagaacttcgtgagacaccactgggtgcacagaagaagacaggagggcaagtgcaagcagtgcggcaagggcttccagcagaagttcagcttccacagcaaggagatcgtggccatcagctgcagctggtgcaagcaggccttccacaacaaggtgacctgcttcatgctgcaccacatcgaggagccctgcagcctgggcgcccacgccgccgtgatcgtgccccccacctggatcatcaaggtgaagaagccccagaacagcctgaaggccagcaacagaaagaagaagagaaccagcttcaagagaaaggccagcaagagaggcatggagcaggagaacaagggcagacccttcgtgatcaagcccatcagcagccccctgatgaagcccctgctggtgttcgtgaaccccaagagcggcggcaaccagggcaccaaggtgctgcagatgttcatgtggtacctgaaccccagacaggtgttcgacctgagccaggagggccccaaggacgccctggagctgtacagaaaggtgcccaacctgagaatcctggcctgcggcggcgacggcaccgtgggctggatcctgagcatcctggacgagctgcagctgagcccccagccccccgtgggcgtgctgcccctgggcaccggcaacgacctggccagaaccctgaactggggcggcggctacaccgacgagcccgtgagcaagatcctgtgccaggtggaggacggcaccgtggtgcagctggacagatggaacctgcacgtggagagaaaccccgacctgccccccgaggagctggaggacggcgtgtgcaagctgcccctgaacgtgttcaacaactacttcagcctgggcttcgacgcccacgtgaccctggagttccacgagagcagagaggccaaccccgagaagttcaacagcagattcagaaacaagatgttctacgccggcgccgccttcagcgacttcctgcagagaagcagcagagacctgagcaagcacgtgaaggtggtgtgcgacggcaccgacctgacccccaagatccaggagctgaagttccagtgcatcgtgttcctgaacatccccagatactgcgccggcaccatgccctggggcaaccccggcgaccaccacgacttcgagccccagagacacgacgacggctacatcgaggtgatcggcttcaccatggccagcctggccgccctgcaggtgggcggccacggcgagagactgcaccagtgcagagaggtgatgctgctgacctacaagagcatccccatgcaggtggacggcgagccctgcagactggcccccgccatgatcagaatcagcctgagaaaccaggccaacatggtgcagaagagcaagagaagaaccagcatgcccctgctgaacgacccccagagcgtgcccgacagactgagaatcagagtgaacaagatcagcctgcaggactacgagggcttccactacgacaaggagaagctgagagaggccagcatcagcgactggctgagaaccatcgccggcgagctggtgcagagcttcggcgccatccccctgggcatcctggtggtgagaggcgactgcgacctggagacctgcagaatgtacatcgacagactgcaggaggacctgcagagcgtgagcagcggcagccagagagtgcactaccaggaccacgagaccagcttccccagagccctgagcgcccagagactgagccccagatggtgcttcctggacgccaccagcgccgacagattctacagaatcgacagaagccaggagcacctgcacttcgtgatggagatcagccaggacgagatcttcatcctggaccccgacatggtggtgagccagcccgccggcaccccccccggcatgcccgacctggtggtggagcaggccagcggcagccccgtgagcagcgaggaccacgccatcctgcaggccgtgatcgccggcgacctgatgaagctgatcgagagctacaagaacggcggcagcctgctgatccagggccccgaccactgcagcctgctgcactacgccgccaagaccggcaacggcgagatcgtgaagtacatcctggaccacggccccagcgagctgctggacatggccgacagcgagaccggcgagaccgccctgcacaaggccgcctgccagagaaacagagccgtgtgccagctgctggtggacgccggcgccagcctgagaaagaccgacagcaagggcaagaccccccaggagagagcccagcaggccggcgaccccgacctggccgcctacctggagagcagacagaactacaaggtgatcggccacgaggacctggagaccgccgtgtag

SEQ ID NO: 79114 - DNA, 2829 bp, synthetic construct
  misc_feature 1..2829: note = Description of Artificial Sequence: Synthetic coding sequence
  source 1..2829: mol_type = other DNA
atggccgccgccgccgagcccggcgccagagcctggctgggcggcggcagccccagacccggcagccccgcctgcagccccgtgctgggcagcggcggcagagccagacccggccccggccccggccccggccccgagagagccggcgtgagagcccccggccccgccgccgcccccggccacagcttcagaaaggtgaccctgaccaagcccaccttctgccacctgtgcagcgacttcatctggggcctggccggcttcctgtgcgacgtgtgcaacttcatgagccacgagaagtgcctgaagcacgtgagaatcccctgcaccagcgtggcccccagcctggtgagagtgcccgtggcccactgcttcggccccagaggcctgcacaagagaaagttctgcgccgtgtgcagaaaggtgctggaggcccccgccctgcactgcgaggtgtgcgagctgcacctgcaccccgactgcgtgcccttcgcctgcagcgactgcagacagtgccaccaggacggccaccaggaccacgacacccaccaccaccactggagagagggcaacctgcccagcggcgccagatgcgaggtgtgcagaaagacctgcggcagcagcgacgtgctggccggcgtgagatgcgagtggtgcggcgtgcaggcccacagcctgtgcagcgccgccctggcccccgagtgcggcttcggcagactgagaagcctggtgctgccccccgcctgcgtgagactgctgcccggcggcttcagcaagacccagagcttcagaatcgtggaggccgccgagcccggcgagggcggcgacggcgccgacggcagcgccgccgtgggccccggcagagagacccaggccacccccgagagcggcaagcagaccctgaagatcttcgacggcgacgacgccgtgagaagaagccagttcagactggtgaccgtgagcagactggccggcgccgaggaggtgctggaggccgccctgagagcccaccacatccccgaggaccccggccacctggagctgtgcagactgccccccagcagccaggcctgcgacgcctgggccggcggcaaggccggcagcgccgtgatcagcgaggagggcagaagccccggcagcggcgaggccacccccgaggcctgggtgatcagagccctgcccagagcccaggaggtgctgaagatctaccccggctggctgaaggtgggcgtggcctacgtgagcgtgagagtgacccccaagagcaccgccagaagcgtggtgctggaggtgctgcccctgctgggcagacaggccgagagccccgagagcttccagctggtggaggtggccatgggctgcagacacgtgcagagaaccatgctgatggacgagcagcccctgctggacagactgcaggacatcagacagatgagcgtgagacaggtgagccagaccagattctacgtggccgagagcagagacgtggccccccacgtgagcctgttcgtgggcggcctgccccccggcctgagccccgaggagtacagcagcctgctgcacgaggccggcgccaccaaggccaccgtggtgagcgtgagccacatctacagcagccagggcgccgtggtgctggacgtggcctgcttcgccgaggccgagagactgtacatgctgctgaaggacatggccgtgagaggcagactgctgaccgccctggtgctgcccgacctgctgcacgccaagctgccccccgacagctgccccctgctggtgttcgtgaaccccaagagcggcggcctgaagggcagagacctgctgtgcagcttcagaaagctgctgaacccccaccaggtgttcgacctgaccaacggcggccccctgcccggcctgcacctgttcagccaggtgccctgcttcagagtgctggtgtgcggcggcgacggcaccgtgggctgggtgctgggcgccctggaggagaccagatacagactggcctgccccgagcccagcgtggccatcctgcccctgggcaccggcaacgacctgggcagagtgctgagatggggcgccggctacagcggcgaggaccccttcagcgtgctgctgagcgtggacgaggccgacgccgtgctgatggacagatggaccatcctgctggacgcccacgaggccggcagcgccgagaacgacaccgccgacgccgagccccccaagatcgtgcagatgagcaactactgcggcatcggcatcgacgccgagctgagcctggacttccaccaggccagagaggaggagcccggcaagttcaccagcagactgcacaacaagggcgtgtacgtgagagtgggcctgcagaagatcagccacagcagaagcctgcacaagcagatcagactgcaggtggagagacaggaggtggagctgcccagcatcgagggcctgatcttcatcaacatccccagctggggcagcggcgccgacctgtggggcagcgacagcgacaccagattcgagaagcccagaatggacgacggcctgctggaggtggtgggcgtgaccggcgtggtgcacatgggccaggtgcagggcggcctgagaagcggcatcagaatcgcccagggcagctacttcagagtgaccctgctgaaggccacccccgtgcaggtggacggcgagccctgggtgcaggcccccggccacatgatcatcagcgccgccggccccaaggtgcacatgctgagaaaggccaagcagaagcccagaagagccggcaccaccagagacgccagagccgacgccgcccccgcccccgagagcgaccccagatag

SEQ ID NO: 79115 - DNA, 1632 bp, synthetic construct
  misc_feature 1..1632: note = Description of Artificial Sequence: Synthetic coding sequence
  source 1..1632: mol_type = other DNA
atgcccggcatggtgctgttcggcagaagatgggccatcgccagcgacgacctggtgttccccggcttcttcgagctggtggtgagagtgctgtggtggatcggcatcctgaccctgtacctgatgcacagaggcaagctggactgcgccggcggcgccctgctgagcagctacctgatcgtgctgatgatcctgctggccgtggtgatctgcaccgtgagcgccatcatgtgcgtgagcatgagaggcaccatctgcaaccccggccccagaaagagcatgagcaagctgctgtacatcagactggccctgttcttccccgagatggtgtgggccagcctgggcgccgcctgggtggccgacggcgtgcagtgcgacagaaccgtggtgaacggcatcatcgccaccgtggtggtgagaacccagatctggtgccccgccaccctgagaagagccagcccctgcttcatcagcaacagaaccatcagcggcaccaccaagagcctgcccagatggagcgccatgccccagggcgcccccagctgcagaagcagaaccaccgactacgacctggtgggcggcgaccagctgaactgccacttcggcagcatcctgcacaccaccggcctgcagtacagagacttcatccacgtgagcttccacgacaaggtgtacgagctgcccttcctggtggccctggaccacagaaaggagagcgtggtggtggccgtgagaggcaccatgagcctgcaggacgtgctgaccgacctgagcgccgagagcgaggtgctggacgtggagtgcgaggtgcaggacagactggcccacaagggcatcagccaggccgccagatacgtgtaccagagactgatcaacgacggcatcctgagccaggccttcagcatcgcccccgagtacagactggtgatcgtgggccacagcctgggcggcggcgccgccgccctgctggccaccatgctgagagccgcctacccccaggtgagatgctacgccttcagcccccccagaggcctgtggagcaaggccctgcaggagtacagccagagcttcatcgtgagcctggtgctgggcaaggacgtgatccccagactgagcgtgaccaacctggaggacctgaagagaagaatcctgagagtggtggcccactgcaacaagcccaagtacaagatcctgctgcacggcctgtggtacgagctgttcggcggcaaccccaacaacctgcccaccgagctggacggcggcgaccaggaggtgctgacccagcccctgctgggcgagcagagcctgctgaccagatggagccccgcctacagcttcagcagcgacagccccctggacagcagccccaagtacccccccctgtacccccccggcagaatcatccacctgcaggaggagggcgccagcggcagattcggctgctgcagcgccgcccactacagcgccaagtggagccacgaggccgagttcagcaagatcctgatcggccccaagatgctgaccgaccacatgcccgacatcctgatgagagccctggacagcgtggtgagcgacagagccgcctgcgtgagctgccccgcccagggcgtgagcagcgtggacgtggcctag

SEQ ID NO: 79116 - DNA, 3129 bp, synthetic construct
  misc_feature 1..3129: note = Description of Artificial Sequence: Synthetic coding sequence
  source 1..3129: mol_type = other DNA
atgcccggcatcgtggtgttcagaagaagatggagcgtgggcagcgacgacctggtgctgcccgccatcttcctgttcctgctgcacaccacctggttcgtgatcctgagcgtggtgctgttcggcctggtgtacaacccccacgaggcctgcagcctgaacctggtggaccacggcagaggctacctgggcatcctgctgagctgcatgatcgccgagatggccatcatctggctgagcatgagaggcggcatcctgtacaccgagcccagagacagcatgcagtacgtgctgtacgtgagactggccatcctggtgatcgagttcatctacgccatcgtgggcatcgtgtggctgacccagtactacaccagctgcaacgacctgaccgccaagaacgtgaccctgggcatggtggtgtgcaactgggtggtgatcctgagcgtgtgcatcaccgtgctgtgcgtgttcgaccccaccggcagaaccttcgtgaagctgagagccaccaagagaagacagagaaacctgagaacctacaacctgagacacagactggaggagggccaggccaccagctggagcagaagactgaaggtgttcctgtgctgcaccagaaccaaggacagccagagcgacgcctacagcgagatcgcctacctgttcgccgagttcttcagagacctggacatcgtgcccagcgacatcatcgccggcctggtgctgctgagacagagacagagagccaagagaaacgccgtgctggacgaggccaacaacgacatcctggccttcctgagcggcatgcccgtgaccagaaacaccaagtacctggacctgaagaacagccaggagatgctgagatacaaggaggtgtgctactacatgctgttcgccctggccgcctacggctggcccatgtacctgatgagaaagcccgcctgcggcctgtgccagctggccagaagctgcagctgctgcctgtgccccgccagacccagattcgcccccggcgtgaccatcgaggaggacaactgctgcggctgcaacgccatcgccatcagaagacacttcctggacgagaacatgaccgccgtggacatcgtgtacaccagctgccacgacgccgtgtacgagacccccttctacgtggccgtggaccacgacaagaagaaggtggtgatcagcatcagaggcaccctgagccccaaggacgccctgaccgacctgaccggcgacgccgagagactgcccgtggagggccaccacggcacctggctgggccacaagggcatggtgctgagcgccgagtacatcaagaagaagctggagcaggagatggtgctgagccaggccttcggcagagacctgggcagaggcaccaagcactacggcctgatcgtggtgggccacagcctgggcgccggcaccgccgccatcctgagcttcctgctgagaccccagtaccccaccctgaagtgcttcgcctacagcccccccggcggcctgctgagcgaggacgccatggagtacagcaaggagttcgtgaccgccgtggtgctgggcaaggacctggtgcccagaatcggcctgagccagctggagggcttcagaagacagctgctggacgtgctgcagagaagcaccaagcccaagtggagaatcatcgtgggcgccaccaagtgcatccccaagagcgagctgcccgaggaggtggaggtgaccaccctggccagcaccagactgtggacccaccccagcgacctgaccatcgccctgagcgccagcacccccctgtacccccccggcagaatcatccacgtggtgcacaaccaccccgccgagcagtgctgctgctgcgagcaggaggagcccacctacttcgccatctggggcgacaacaaggccttcaacgaggtgatcatcagccccgccatgctgcacgagcacctgccctacgtggtgatggagggcctgaacaaggtgctggagaactacaacaagggcaagaccgccctgctgagcgccgccaaggtgatggtgagccccaccgaggtggacctgacccccgagctgatcttccagcagcagcccctgcccaccggcccccccatgcccaccggcctggccctggagctgcccaccgccgaccacagaaacagcagcgtgagaagcaagagccagagcgagatgagcctggagggcttcagcgagggcagactgctgagccccgtggtggccgccgccgccagacaggaccccgtggagctgctgctgctgagcacccaggagagactggccgccgagctgcaggccagaagagcccccctggccaccatggagagcctgagcgacaccgagagcctgtacagcttcgacagcagaagaagcagcggcttcagaagcatcagaggcagccccagcctgcacgccgtgctggagagagacgagggccacctgttctacatcgaccccgccatccccgaggagaaccccagcctgagcagcagaaccgagctgctggccgccgacagcctgagcaagcacagccaggacacccagcccctggaggccgccctgggcagcggcggcgtgacccccgagagaccccccagcgccgccgccaacgacgaggaggaggaggtgggcggcggcggcggcggccccgccagcagaggcgagctggccctgcacaacggcagactgggcgacagccccagcccccaggtgctggagttcgccgagttcatcgacagcctgttcaacctggacagcaagagcagcagcttccaggacctgtactgcatggtggtgcccgagagccccaccagcgactacgccgagggccccaagagccccagccagcaggagatcctgctgagagcccagttcgagcccaacctggtgcccaagccccccagactgttcgccggcagcgccgaccccagcagcggcatcagcctgagccccagcttccccctgagcagcagcggcgagctgatggacctgacccccaccggcctgagcagccaggagtgcctggccgccgacaagatcagaaccagcacccccaccggccacggcgccagccccgccaagcaggacgagctggtgatcagcgccagatag

SEQ ID NO: 79117 - DNA, 2019 bp, synthetic construct
  misc_feature 1..2019: note = Description of Artificial Sequence: Synthetic coding sequence
  source 1..2019: mol_type = other DNA
atgcccggcatggtgctgttcggcagaagatgggccatcgccagcgacgacctggtgttccccggcttcttcgagctggtggtgagagtgctgtggtggatcggcatcctgaccctgtacctgatgcacagaggcaagctggactgcgccggcggcgccctgctgagcagctacctgatcgtgctgatgatcctgctggccgtggtgatctgcaccgtgagcgccatcatgtgcgtgagcatgagaggcaccatctgcaaccccggccccagaaagagcatgagcaagctgctgtacatcagactggccctgttcttccccgagatggtgtgggccagcctgggcgccgcctgggtggccgacggcgtgcagtgcgacagaaccgtggtgaacggcatcatcgccaccgtggtggtgagctggatcatcatcgccgccaccgtggtgagcatcatcatcgtgttcgaccccctgggcggcaagatggccccctacagcagcgccggccccagccacctggacagccacgacagcagccagctgctgaacggcctgaagaccgccgccaccagcgtgtgggagaccagaatcaagctgctgtgctgctgcatcggcaaggacgaccacaccagagtggccttcagcagcaccgccgagctgttcagcacctacttcagcgacaccgacctggtgcccagcgacatcgccgccggcctggccctgctgcaccagcagcaggacaacatcagaaacaaccaggagcccgcccaggtggtgtgccacgcccccggcagcagccaggaggccgacctggacgccgagctggagaactgccaccactacatgcagttcgccgccgccgcctacggctggcccctgtacatctacagaaaccccctgaccggcctgtgcagaatcggcggcgactgctgcagaagcagaaccaccgactacgacctggtgggcggcgaccagctgaactgccacttcggcagcatcctgcacaccaccggcctgcagtacagagacttcatccacgtgagcttccacgacaaggtgtacgagctgcccttcctggtggccctggaccacagaaaggagagcgtggtggtggccgtgagaggcaccatgagcctgcaggacgtgctgaccgacctgagcgccgagagcgaggtgctggacgtggagtgcgaggtgcaggacagactggcccacaagggcatcagccaggccgccagatacgtgtaccagagactgatcaacgacggcatcctgagccaggccttcagcatcgcccccgagtacagactggtgatcgtgggccacagcctgggcggcggcgccgccgccctgctggccaccatgctgagagccgcctacccccaggtgagatgctacgccttcagcccccccagaggcctgtggagcaaggccctgcaggagtacagccagagcttcatcgtgagcctggtgctgggcaaggacgtgatccccagactgagcgtgaccaacctggaggacctgaagagaagaatcctgagagtggtggcccactgcaacaagcccaagtacaagatcctgctgcacggcctgtggtacgagctgttcggcggcaaccccaacaacctgcccaccgagctggacggcggcgaccaggaggtgctgacccagcccctgctgggcgagcagagcctgctgaccagatggagccccgcctacagcttcagcagcgacagccccctggacagcagccccaagtacccccccctgtacccccccggcagaatcatccacctgcaggaggagggcgccagcggcagattcggctgctgcagcgccgcccactacagcgccaagtggagccacgaggccgagttcagcaagatcctgatcggccccaagatgctgaccgaccacatgcccgacatcctgatgagagccctggacagcgtggtgagcgacagagccgcctgcgtgagctgccccgcccagggcgtgagcagcgtggacgtggcctag

SEQ ID NO: 79118 - DNA, 663 bp, synthetic construct
  misc_feature 1..663: note = Description of Artificial Sequence: Synthetic coding sequence
  source 1..663: mol_type = other DNA
atgtactgcgtgagccaccacgtgtgccagcacgagagaacccagatctggtgccccgccaccctgagaagagccagcccctgcttcatcagcaacagaaccatcagcggcaccaccaagagcctgcccagatggagcgccatgccccagggcgcccccagctgcagaagcagaaccaccgactacgacctggtgggcggcgaccagctgaactgccacttcggcagcatcctgcacaccaccggcctgcagtacagagacttcatccacgtgagcttccacgacaaggtgtacgagctgcccttcctggtggccctggaccacagaaaggagagcgtggtggtggccgtgagaggcaccatgagcctgcaggacgtgctgaccgacctgagcgccgagagcgaggtgctggacgtggagtgcgaggtgcaggacagactggcccacaagggcatcagccaggccgccagatacgtgtaccagagactgatcaacgacggcatcctgagccaggccttcagcatcgcccccgagtacagactggtgatcgtgggccacagcctgggcggcggcgccgccgccctgctggccaccatgctgagagccgcctacccccaggtgagatgctacgccttcagcccccccagaggcctgtggagatag

SEQ ID NO: 79119 - DNA, 1140 bp, synthetic construct
  misc_feature 1..1140: note = Description of Artificial Sequence: Synthetic coding sequence
  source 1..1140: mol_type = other DNA
atgtactgcgtgagccaccacgtgtgccagcacgagagctggatcatcatcgccgccaccgtggtgagcatcatcatcgtgttcgaccccctgggcggcaagatggccccctacagcagcgccggccccagccacctggacagccacgacagcagccagctgctgaacggcctgaagaccgccgccaccagcgtgtgggagaccagaatcaagctgctgtgctgctgcatcggcaaggacgaccacaccagagtggccttcagcagcaccgccgagctgttcagcacctacttcagcgacaccgacctggtgcccagcgacatcgccgccggcctggccctgctgcaccagcagcaggacaacatcagaaacaaccaggagcccgcccaggtggtgtgccacgcccccggcagcagccaggaggccgacctggacgccgagctggagaactgccaccactacatgcagttcgccgccgccgcctacggctggcccctgtacatctacagaaaccccctgaccggcctgtgcagaatcggcggcgactgctgcagaagcagaaccaccgactacgacctggtgggcggcgaccagctgaactgccacttcggcagcatcctgcacaccaccggcctgcagtacagagacttcatccacgtgagcttccacgacaaggtgtacgagctgcccttcctggtggccctggaccacagaaaggagagcgtggtggtggccgtgagaggcaccatgagcctgcaggacgtgctgaccgacctgagcgccgagagcgaggtgctggacgtggagtgcgaggtgcaggacagactggcccacaagggcatcagccaggccgccagatacgtgtaccagagactgatcaacgacggcatcctgagccaggccttcagcatcgcccccgagtacagactggtgatcgtgggccacagcctgggcggcggcgccgccgccctgctggccaccatgctgagagccgcctacccccagcagagcagcgccggcatcttcagcgagctgcacagagtgaccagacccggcgagggctgcgacagccaggcccagtgcgaccagctgggcagaagcgaggagaagaacctggccagcggcagagccctgcagtag

SEQ ID NO: 79120 - DNA, 804 bp, synthetic construct
  misc_feature 1..804: note = Description of Artificial Sequence: Synthetic coding sequence
  source 1..804: mol_type = other DNA
atgcccggcatggtgctgttcggcagaagatgggccatcgccagcgacgacctggtgttccccggcttcttcgagctggtggtgagagtgctgtggtggatcggcatcctgaccctgtacctgatgcacagaggcaagctggactgcgccggcggcgccctgctgagcagctacctgatcgtgctgatgatcctgctggccgtggtgatctgcaccgtgagcgccatcatgtgcgtgagcatgagaggcaccatctgcaaccccggccccagaaagagcatgagcaagctgctgtacatcagactggccctgttcttccccgagatggtgtgggccagcctgggcgccgcctgggtggccgacggcgtgcagtgcgacagaaccgtggtgaacggcatcatcgccaccgtggtggtgagctggatcatcatcgccgccaccgtggtgagcatcatcatcgtgttcgaccccctgggcggcaagatggccccctacagcagcgccggccccagccacctggacagccacgacagcagccagctgctgaacggcctgaagaccgccgccaccagcgtgtgggagaccagaatcaagctgctgtgctgctgcatcggcaaggacgaccacaccagagtggccttcagcagcaccgccgagctgttcagcacctacttcagcgacaccgacctggtgcccagcgacatcgccgccggcctggccctgctgcaccagcagcaggacaacaccagagccaccggcaactgccccagaaacgacggcctgaccctgctgagcctgaactag

SEQ ID NO: 79121 - DNA, 1467 bp, synthetic construct
  misc_feature 1..1467: note = Description of Artificial Sequence: Synthetic coding sequence
  source 1..1467: mol_type = other DNA
atgggcgacagaggcagcagcagaagaagaagaaccggcagcagacccagcagccacggcggcggcggccccgccgccgccgaggaggaggtgagagacgccgccgccggccccgacgtgggcgccgccggcgacgcccccgcccccgcccccaacaaggacggcgacgccggcgtgggcagcggccactgggagctgagatgccacagactgcaggacagcctgttcagcagcgacagcggcttcagcaactacagaggcatcctgaactggtgcgtggtgatgctgatcctgagcaacgccagactgttcctggagaacctgatcaagtacggcatcctggtggaccccatccaggtggtgagcctgttcctgaaggacccctacagctggcccgccccctgcctggtgatcgccgccaacgtgttcgccgtggccgccttccaggtggagaagagactggccgtgggcgccctgaccgagcaggccggcctgctgctgcacgtggccaacctggccaccatcctgtgcttccccgccgccgtggtgctgctggtggagagcatcacccccgtgggcagcctgctggccctgatggcccacaccatcctgttcctgaagctgttcagctacagagacgtgaacagctggtgcagaagagccagagccaaggccgccagcgccggcaagaaggccagcagcgccgccgccccccacaccgtgagctaccccgacaacctgacctacagagacctgtactacttcctgttcgcccccaccctgtgctacgagctgaacttccccagaagccccagaatcagaaagagattcctgctgagaagaatcctggagatgctgttcttcacccagctgcaggtgggcctgatccagcagtggatggtgcccaccatccagaacagcatgaagcccttcaaggacatggactacagcagaatcatcgagagactgctgaagctggccgtgcccaaccacctgatctggctgatcttcttctactggctgttccacagctgcctgaacgccgtggccgagctgatgcagttcggcgacagagagttctacagagactggtggaacagcgagagcgtgacctacttctggcagaactggaacatccccgtgcacaagtggtgcatcagacacttctacaagcccatgctgagaagaggcagcagcaagtggatggccagaaccggcgtgttcctggccagcgccttcttccacgagtacctggtgagcgtgcccctgagaatgttcagactgtgggccttcaccggcatgatggcccagatccccctggcctggttcgtgggcagattcttccagggcaactacggcaacgccgccgtgtggctgagcctgatcatcggccagcccatcgccgtgctgatgtacgtgcacgactactacgtgctgaactacgaggcccccgccgccgaggcctag

SEQ ID NO: 79122 - DNA, 282 bp, synthetic construct
  misc_feature 1..282: note = Description of Artificial Sequence: Synthetic coding sequence
  source 1..282: mol_type = other DNA
atgaagctgctgatggtgctgatgctggccgccctgagccagcactgctacgccggcagcggctgccccctgctggagaacgtgatcagcaagaccatcaacccccaggtgagcaagaccgagtacaaggagctgctgcaggagttcatcgacgacaacgccaccaccaacgccatcgacgagctgaaggagtgcttcctgaaccagaccgacgagaccctgagcaacgtggaggtgttcatgcagctgatctacgacagcagcctgtgcgacctgttctag

SEQ ID NO: 79123 - DNA, 1038 bp, synthetic construct
  misc_feature 1..1038: note = Description of Artificial Sequence: Synthetic coding sequence
  source 1..1038: mol_type = other DNA
atgaagaccctgatcgccgcctacagcggcgtgctgagaggcgagagacaggccgaggccgacagaagccagagaagccacggcggccccgccctgagcagagagggcagcggcagatggggcgtggcctgcagcgccatcctgatgtacatcttctgcaccgactgctggctgatcgccgtgctgtacttcacctggctggtgttcgactggaacacccccaagaagggcggcagaagaagccagtgggtgagaaactgggccgtgtggagatacttcagagactacttccccatccagctggtgaagacccacaacctgctgaccaccagaaactacatcttcggctaccacccccacggcatcatgggcctgggcgccttctgcaacttcagcaccgaggccaccgaggtgagcaagaagttccccggcatcagaccctacctggccaccctggccggcaacttcagaatgcccgtgctgagagagtacctgatgagcggcggcatctgccccgtgagcagagacaccatcgactacctgctgagcaagaacggcagcggcaacgccatcatcatcgtggtgggcggcgccgccgagagcctgagcagcatgcccggcaagaacgccgtgaccctgagaaacagaaagggcttcgtgaagctggccctgagacacggcgccgacctggtgcccatctacagcttcggcgagaacgaggtgtacaagcaggtgatcttcgaggagggcagctggggcagatgggtgcagaagaagttccagaagtacatcggcttcgccccctgcatcttccacggcagaggcctgttcagcagcgacacctggggcctggtgccctacagcaagcccatcaccaccgtggtgggcgagcccatcaccatccccaagctggagcaccccacccagcaggacatcgacctgtaccacaccatgtacatggaggccctggtgaagctgttcgacaagcacaagaccaagttcggcctgcccgagaccgaggtgctggaggtgaactag

SEQ ID NO: 79124 - DNA, 3306 bp, synthetic construct
  misc_feature 1..3306: note = Description of Artificial Sequence: Synthetic coding sequence
  source 1..3306: mol_type = other DNA
atggagcagcccggcgccgccgccagcggcgccggcggcggcagcgaggagcccggcggcggcagaagcaacaagagaagcgccggcaacagagccgccaacgaggaggagaccaagaacaagcccaagctgaacatccagatcaagaccctggccgacgacgtgagagacagaatcaccagcttcagaaagagcaccgtgaagaaggagaagcccctgatccagcaccccatcgacagccaggtggccatgagcgagttccccgccgcccagcccctgtacgacgagagaagcctgaacctgagcgagaaggaggtgctggacctgttcgagaagatgatggaggacatgaacctgaacgaggagaagaaggcccccctgagaaacaaggacttcaccaccaagagagagatggtggtgcagtacatcagcgccaccgccaagagcggcggcctgaagaacagcaagcacgagtgcaccctgagcagccaggagtacgtgcacgagctgagaagcggcatcagcgacgagaagctgctgaactgcctggagagcctgagagtgagcctgaccagcaaccccgtgagctgggtgaacaacttcggccacgagggcctgggcctgctgctggacgagctggagaagctgctggacaagaagcagcaggagaacatcgacaagaagaaccagtacaagctgatccagtgcctgaaggccttcatgaacaacaagttcggcctgcagagaatcctgggcgacgagagaagcctgctgctgctggccagagccatcgaccccaagcagcccaacatgatgaccgagatcgtgaagatcctgagcgccatctgcatcgtgggcgaggagaacatcctggacaagctgctgggcgccatcaccaccgccgccgagagaaacaacagagagagattcagccccatcgtggagggcctggagaaccaggaggccctgcagctgcaggtggcctgcatgcagttcatcaacgccctggtgaccagcccctacgagctggacttcagaatccacctgagaaacgagttcctgagaagcggcctgaagaccatgctgcccgacctgaaggagaaggagaacgacgagctggacatccagctgaaggtgttcgacgagaacaaggaggacgacctgaccgagctgagccacagactgaacgacatcagagccgagatggacgacatgaacgaggtgtaccacctgctgtacaacatgctgaaggacaccgccgccgagaactacttcctgagcatcctgcagcacttcctgctgatcagaaacgactactacatcagaccccagtactacaagatcatcgaggagtgcgtgagccagatcgtgctgcactgcagcggcatggaccccgacttcaagtacagacagagactggacatcgacctgacccacctgatcgacagctgcgtgaacaaggccaaggtggaggagagcgagcagaaggccgccgagttcagcaagaagttcgacgaggagttcaccgccagacaggaggcccaggccgagctgcagaagagagacgagaagatcaaggagctggaggccgagatccagcagctgagaacccaggcccaggtgctgagcagcagcagcggcatccccggcccccccgccgccccccccctgcccggcgtgggcccccccccccccccccccgccccccccctgcccggcggcgcccccctgccccccccccccccccccctgcccggcatgatgggcatccccccccccccccccccccccctgctgttcggcggcccccccccccccccccccctgggcggcgtgccccccccccccggcatcagcctgaacctgccctacggcatgaagcagaagaagatgtacaagcccgaggtgagcatgaagagaatcaactggagcaagatcgagcccaccgagctgagcgagaactgcttctggctgagagtgaaggaggacaagttcgagaaccccgacctgttcgccaagctggccctgaacttcgccacccagatcaaggtgcagaagaacgccgaggccctggaggagaagaagaccggccccaccaagaagaaggtgaaggagctgagaatcctggaccccaagaccgcccagaacctgagcatcttcctgggcagctacagaatgccctacgaggacatcagaaacgtgatcctggaggtgaacgaggacatgctgagcgaggccctgatccagaacctggtgaagcacctgcccgagcagaagatcctgaacgagctggccgagctgaagaacgagtacgacgacctgtgcgagcccgagcagttcggcgtggtgatgagcagcgtgaagatgctgcagcccagactgagcagcatcctgttcaagctgaccttcgaggagcacatcaacaacatcaagcccagcatcatcgccgtgaccctggcctgcgaggagctgaagaagagcgagagcttcaacagactgctggagctggtgctgctggtgggcaactacatgaacagcggcagcagaaacgcccagagcctgggcttcaagatcaacttcctgtgcaagatcagagacaccaagagcgccgaccagaagaccaccctgctgcacttcatcgccgacatctgcgaggagaagtacagagacatcctgaagttccccgaggagctggagcacgtggagagcgccagcaaggtgagcgcccagatcctgaagagcaacctggccagcatggagcagcagatcgtgcacctggagagagacatcaagaagttcccccaggccgagaaccagcacgacaagttcgtggagaagatgaccagcttcaccaagaccgccagagagcagtacgagaagctgagcaccatgcacaacaacatgatgaagctgtacgagaacctgggcgagtacttcatcttcgacagcaagaccgtgagcatcgaggagttcttcggcgacctgaacaacttcagaaccctgttcctggaggccgtgagagagaacaacaagagaagagagatggaggagaagaccagaagagccaagctggccaaggagaaggccgagcaggagaagctggagagacagaagaagaagaagcagctgatcgacatcaacaaggagggcgacgagaccggcgtgatggacaacctgctggaggccctgcagagcggcgccgccttcagagacagaagaaagagaatccccagaaaccccgacaacagaagagtgcccctggagagaagcagaagcagacacaacggcgccatcagcagcaagtag

SEQ ID NO: 79125 - DNA, 3291 bp, synthetic construct
  misc_feature 1..3291: note = Description of Artificial Sequence: Synthetic coding sequence
  source 1..3291: mol_type = other DNA
atggagcagcccggcgccgccgccagcggcgccggcggcggcagcgaggagcccggcggcggcagaagcaacaagagaagcgccggcaacagagccgccaacgaggaggagaccaagaacaagcccaagctgaacatccagatcaagaccctggccgacgacgtgagagacagaatcaccagcttcagaaagagcaccgtgaagaaggagaagcccctgatccagcaccccatcgacagccaggtggccatgagcgagttccccgccgcccagcccctgtacgacgagagaagcctgaacctgagcgagaaggaggtgctggacctgttcgagaagatgatggaggacatgaacctgaacgaggagaagaaggcccccctgagaaacaaggacttcaccaccaagagagagatggtggtgcagtacatcagcgccaccgccaagagcggcggcctgaagaacagcaagcacgagtgcaccctgagcagccaggagtacgtgcacgagctgagaagcggcatcagcgacgagaagctgctgaactgcctggagagcctgagagtgagcctgaccagcaaccccgtgagctgggtgaacaacttcggccacgagggcctgggcctgctgctggacgagctggagaagctgctggacaagaagcagcaggagaacatcgacaagaagaaccagtacaagctgatccagtgcctgaaggccttcatgaacaacaagttcggcctgcagagaatcctgggcgacgagagaagcctgctgctgctggccagagccatcgaccccaagcagcccaacatgatgaccgagatcgtgaagatcctgagcgccatctgcatcgtgggcgaggagaacatcctggacaagctgctgggcgccatcaccaccgccgccgagagaaacaacagagagagattcagccccatcgtggagggcctggagaaccaggaggccctgcagctgcaggtggcctgcatgcagttcatcaacgccctggtgaccagcccctacgagctggacttcagaatccacctgagaaacgagttcctgagaagcggcctgaagaccatgctgcccgacctgaaggagaaggagaacgacgagctggacatccagctgaaggtgttcgacgagaacaaggaggacgacctgaccgagctgagccacagactgaacgacatcagagccgagatggacgacatgaacgaggtgtaccacctgctgtacaacatgctgaaggacaccgccgccgagaactacttcctgagcatcctgcagcacttcctgctgatcagaaacgactactacatcagaccccagtactacaagatcatcgaggagtgcgtgagccagatcgtgctgcactgcagcggcatggaccccgacttcaagtacagacagagactggacatcgacctgacccacctgatcgacagctgcgtgaacaaggccaaggtggaggagagcgagcagaaggccgccgagttcagcaagaagttcgacgaggagttcaccgccagacaggaggcccaggccgagctgcagaagagagacgagaagatcaaggagctggaggccgagatccagcagctgagaacccaggcccaggtgctgagcagcagcagcggcatccccggcccccccgccgccccccccctgcccggcgtgggcccccccccccccccccccgccccccccctgcccggcggcgcccccctgccccccccccccccccccctgcccggcatgatgggcatccccccccccccccccccccccctgctgttcggcggcccccccccccccccccccctgggcggcgtgccccccccccccggcatcagcctgaacctgccctacggcatgaagcagaagaagatgtacaagcccgaggtgagcatgaagagaatcaactggagcaagatcgagcccaccgagctgagcgagaactgcttctggctgagagtgaaggaggacaagttcgagaaccccgacctgttcgccaagctggccctgaacttcgccacccagatcaaggtgcagaagaacgccgaggccctggaggagaagaagaccggccccaccaagaagaaggtgaaggagctgagaatcctggaccccaagaccgcccagaacctgagcatcttcctgggcagctacagaatgccctacgaggacatcagaaacgtgatcctggaggtgaacgaggacatgctgagcgaggccctgatccagaacctggtgaagcacctgcccgagcagaagatcctgaacgagctggccgagctgaagaacgagtacgacgacctgtgcgagcccgagcagttcggcgtggtgatgagcagcgtgaagatgctgcagcccagactgagcagcatcctgttcaagctgaccttcgaggagcacatcaacaacatcaagcccagcatcatcgccgtgaccctggcctgcgaggagctgaagaagagcgagagcttcaacagactgctggagctggtgctgctggtgggcaactacatgaacagcggcagcagaaacgcccagagcctgggcttcaagatcaacttcctgtgcaagatcagagacaccaagagcgccgaccagaagaccaccctgctgcacttcatcgccgacatctgcgaggagaagtacagagacatcctgaagttccccgaggagctggagcacgtggagagcgccagcaaggtgagcgcccagatcctgaagagcaacctggccagcatggagcagcagatcgtgcacctggagagagacatcaagaagttcccccaggccgagaaccagcacgacaagttcgtggagaagatgaccatcttcaccaagaccgccagagagcagtacgagaagctgagcaccatgcacaacaacatgatgaagctgtacgagaacctgggcgagtacttcatcttcgacagcaagaccgtgagcatcgaggagttcttcggcgacctgaacaacttcagaaccctgttcctggaggccgtgagagagaacaacaagagaagagagatggaggagaagaccagaagagccaagctggccaaggagaaggccgagcaggagaagctggagagacagaagaagaagaagcagctgatcgacatcaacaaggagggcgacgagaccggcgtgatggacaacctgctggaggccctgcagagcggcgccgccttcagagacagaagaaagagaatccccagaaaccccgtggtgaaccacccctgcgccaccagagccaaccccagaagcgccacctag

SEQ ID NO: 79126 - DNA, 3291 bp, synthetic construct
  misc_feature 1..3291: note = Description of Artificial Sequence: Synthetic coding sequence
  source 1..3291: mol_type = other DNA
atggagcagcccggcgccgccgccagcggcgccggcggcggcagcgaggagcccggcggcggcagaagcaacaagagaagcgccggcaacagagccgccaacgaggaggagaccaagaacaagcccaagctgaacatccagatcaagaccctggccgacgacgtgagagacagaatcaccagcttcagaaagagcaccgtgaagaaggagaagcccctgatccagcaccccatcgacagccaggtggccatgagcgagttccccgccgcccagcccctgtacgacgagagaagcctgaacctgagcgagaaggaggtgctggacctgttcgagaagatgatggaggacatgaacctgaacgaggagaagaaggcccccctgagaaacaaggacttcaccaccaagagagagatggtggtgcagtacatcagcgccaccgccaagagcggcggcctgaagaacagcaagcacgagtgcaccctgagcagccaggagtacgtgcacgagctgagaagcggcatcagcgacgagaagctgctgaactgcctggagagcctgagagtgagcctgaccagcaaccccgtgagctgggtgaacaacttcggccacgagggcctgggcctgctgctggacgagctggagaagctgctggacaagaagcagcaggagaacatcgacaagaagaaccagtacaagctgatccagtgcctgaaggccttcatgaacaacaagttcggcctgcagagaatcctgggcgacgagagaagcctgctgctgctggccagagccatcgaccccaagcagcccaacatgatgaccgagatcgtgaagatcctgagcgccatctgcatcgtgggcgaggagaacatcctggacaagctgctgggcgccatcaccaccgccgccgagagaaacaacagagagagattcagccccatcgtggagggcctggagaaccaggaggccctgcagctgcaggtggcctgcatgcagttcatcaacgccctggtgaccagcccctacgagctggacttcagaatccacctgagaaacgagttcctgagaagcggcctgaagaccatgctgcccgacctgaaggagaaggagaacgacgagctggacatccagctgaaggtgttcgacgagaacaaggaggacgacctgaccgagctgagccacagactgaacgacatcagagccgagatggacgacatgaacgaggtgtaccacctgctgtacaacatgctgaaggacaccgccgccgagaactacttcctgagcatcctgcagcacttcctgctgatcagaaacgactactacatcagaccccagtactacaagatcatcgaggagtgcgtgagccagatcgtgctgcactgcagcggcatggaccccgacttcaagtacagacagagactggacatcgacctgacccacctgatcgacagctgcgtgaacaaggccaaggtggaggagagcgagcagaaggccgccgagttcagcaagaagttcgacgaggagttcaccgccagacaggaggcccaggccgagctgcagaagagagacgagaagatcaaggagctggaggccgagatccagcagctgagaacccaggcccaggtgctgagcagcagcagcggcatccccggcccccccgccgccccccccctgcccggcgtgggcccccccccccccccccccgccccccccctgcccggcggcgcccccctgccccccccccccccccccctgcccggcatgatgggcatccccccccccccccccccccccctgctgttcggcggcccccccccccccccccccctgggcggcgtgccccccccccccggcatcagcctgaacctgccctacggcatgaagcagaagaagatgtacaagcccgaggtgagcatgaagagaatcaactggagcaagatcgagcccaccgagctgagcgagaactgcttctggctgagagtgaaggaggacaagttcgagaaccccgacctgttcgccaagctggccctgaacttcgccacccagatcaaggtgcagaagaacgccgaggccctggaggagaagaagaccggccccaccaagaagaaggtgaaggagctgagaatcctggaccccaagaccgcccagaacctgagcatcttcctgggcagctacagaatgccctacgaggacatcagaaacgtgatcctggaggtgaacgaggacatgctgagcgaggccctgatccagaacctggtgaagcacctgcccgagcagaagatcctgaacgagctggccgagctgaagaacgagtacgacgacctgtgcgagcccgagcagttcggcgtggtgatgagcagcgtgaagatgctgcagcccagactgagcagcatcctgttcaagctgaccttcgaggagcacatcaacaacatcaagcccagcatcatcgccgtgaccctggcctgcgaggagctgaagaagagcgagagcttcaacagactgctggagctggtgctgctggtgggcaactacatgaacagcggcagcagaaacgcccagagcctgggcttcaagatcaacttcctgtgcaagatcagagacaccaagagcgccgaccagaagaccaccctgctgcacttcatcgccgacatctgcgaggagaagtacagagacatcctgaagttccccgaggagctggagcacgtggagagcgccagcaaggtgagcgcccagatcctgaagagcaacctggccagcatggagcagcagatcgtgcacctggagagagacatcaagaagttcccccaggccgagaaccagcacgacaagttcgtggagaagatgaccagcttcaccaagaccgccagagagcagtacgagaagctgagcaccatgcacaacaacatgatgaagctgtacgagaacctgggcgagtacttcatcttcgacagcaagaccgtgagcatcgaggagttcttcggcgacctgaacaacttcagaaccctgttcctggaggccgtgagagagaacaacaagagaagagagatggaggagaagaccagaagagccaagctggccaaggagaaggccgagcaggagaagctggagagacagaagaagaagaagcagctgatcgacatcaacaaggagggcgacgagaccggcgtgatggacaacctgctggaggccctgcagagcggcgccgccttcagagacagaagaaagagaatccccagaaaccccgtggtgaaccacccctgcgccaccagagccaaccccagaagcgccacctag

SEQ ID NO: 79127 - DNA, 3294 bp, synthetic construct
  misc_feature 1..3294: note = Description of Artificial Sequence: Synthetic coding sequence
  source 1..3294: mol_type = other DNA
atggagcagcccggcgccgccgccagcggcgccggcggcggcagcgaggagcccggcggcggcagaagcaacaagagaagcgccggcaacagagccgccaacgaggaggagaccaagaacaagcccaagctgagagacagaatcaccagcttcagaaagagcaccgtgaagaaggagaagcccctgatccagcaccccatcgacagccaggtggccatgagcgagttccccgccgcccagcccctgtacgacgagagaagcctgaacctgagcgagaaggaggtgctggacctgttcgagaagatgatggaggacatgaacctgaacgaggagaagaaggcccccctgagaaacaaggacttcaccaccaagagagagatggtggtgcagtacatcagcgccaccgccaagagcgtgatcagcagccacatcaagggcggcctgaagaacagcaagcacgagtgcaccctgagcagccaggagtacgtgcacgagctgagaagcggcatcagcgacgagaagctgctgaactgcctggagagcctgagagtgagcctgaccagcaaccccgtgagctgggtgaacaacttcggccacgagggcctgggcctgctgctggacgagctggagaagctgctggacaagaagcagcaggagaacatcgacaagaagaaccagtacaagctgatccagtgcctgaaggccttcatgaacaacaagttcggcctgcagagaatcctgggcgacgagagaagcctgctgctgctggccagagccatcgaccccaagcagcccaacatgatgaccgagatcgtgaagatcctgagcgccatctgcatcgtgggcgaggagaacatcctggacaagctgctgggcgccatcaccaccgccgccgagagaaacaacagagagagattcagccccatcgtggagggcctggagaaccaggaggccctgcagctgcaggtggcctgcatgcagttcatcaacgccctggtgaccagcccctacgagctggacttcagaatccacctgagaaacgagttcctgagaagcggcctgaagaccatgctgcccgacctgaaggagaaggagaacgacgagctggacatccagctgaaggtgttcgacgagaacaaggaggacgacctgaccgagctgagccacagactgaacgacatcagagccgagatggacgacatgaacgaggtgtaccacctgctgtacaacatgctgaaggacaccgccgccgagaactacttcctgagcatcctgcagcacttcctgctgatcagaaacgactactacatcagaccccagtactacaagatcatcgaggagtgcgtgagccagatcgtgctgcactgcagcggcatggaccccgacttcaagtacagacagagactggacatcgacctgacccacctgatcgacagctgcgtgaacaaggccaaggtggaggagagcgagcagaaggccgccgagttcagcaagaagttcgacgaggagttcaccgccagacaggaggcccaggccgagctgcagaagagagacgagaagatcaaggagctggaggccgagatccagcagctgagaacccaggcccaggtgctgagcagcagcagcggcatccccggcccccccgccgccccccccctgcccggcgtgggcccccccccccccccccccgccccccccctgcccggcggcgcccccctgccccccccccccccccccctgcccggcatgatgggcatccccccccccccccccccccccctgctgttcggcggcccccccccccccccccccctgggcggcgtgccccccccccccggcatcagcctgaacctgccctacggcatgaagcagaagaagatgtacaagcccgaggtgagcatgaagagaatcaactggagcaagatcgagcccaccgagctgagcgagaactgcttctggctgagagtgaaggaggacaagttcgagaaccccgacctgttcgccaagctggccctgaacttcgccacccagatcaaggtgcagaagaacgccgaggccctggaggagaagaagaccggccccaccaagaagaaggtgaaggagctgagaatcctggaccccaagaccgcccagaacctgagcatcttcctgggcagctacagaatgccctacgaggacatcagaaacgtgatcctggaggtgaacgaggacatgctgagcgaggccctgatccagaacctggtgaagcacctgcccgagcagaagatcctgaacgagctggccgagctgaagaacgagtacgacgacctgtgcgagcccgagcagttcggcgtggtgatgagcagcgtgaagatgctgcagcccagactgagcagcatcctgttcaagctgaccttcgaggagcacatcaacaacatcaagcccagcatcatcgccgtgaccctggcctgcgaggagctgaagaagagcgagagcttcaacagactgctggagctggtgctgctggtgggcaactacatgaacagcggcagcagaaacgcccagagcctgggcttcaagatcaacttcctgtgcaagatcagagacaccaagagcgccgaccagaagaccaccctgctgcacttcatcgccgacatctgcgaggagaagtacagagacatcctgaagttccccgaggagctggagcacgtggagagcgccagcaaggtgagcgcccagatcctgaagagcaacctggccagcatggagcagcagatcgtgcacctggagagagacatcaagaagttcccccaggccgagaaccagcacgacaagttcgtggagaagatgaccatcttcaccaagaccgccagagagcagtacgagaagctgagcaccatgcacaacaacatgatgaagctgtacgagaacctgggcgagtacttcatcttcgacagcaagaccgtgagcatcgaggagttcttcggcgacctgaacaacttcagaaccctgttcctggaggccgtgagagagaacaacaagagaagagagatggaggagaagaccagaagagccaagctggccaaggagaaggccgagcaggagaagctggagagacagaagaagaagaagcagctgatcgacatcaacaaggagggcgacgagaccggcgtgatggacaacctgctggaggccctgcagagcggcgccgccttcagagacagaagaaagagaatccccagaaaccccgacaacagaagagtgcccctggagagaagcagaagcagacacaacggcgccatcagcagcaagtag

SEQ ID NO: 79128 - DNA, 3306 bp, synthetic construct
  misc_feature 1..3306: note = Description of Artificial Sequence: Synthetic coding sequence
  source 1..3306: mol_type = other DNA
atggagcagcccggcgccgccgccagcggcgccggcggcggcagcgaggagcccggcggcggcagaagcaacaagagaagcgccggcaacagagccgccaacgaggaggagaccaagaacaagcccaagctgaacatccagatcaagaccctggccgacgacgtgagagacagaatcaccagcttcagaaagagcaccgtgaagaaggagaagcccctgatccagcaccccatcgacagccaggtggccatgagcgagttccccgccgcccagcccctgtacgacgagagaagcctgaacctgagcgagaaggaggtgctggacctgttcgagaagatgatggaggacatgaacctgaacgaggagaagaaggcccccctgagaaacaaggacttcaccaccaagagagagatggtggtgcagtacatcagcgccaccgccaagagcggcggcctgaagaacagcaagcacgagtgcaccctgagcagccaggagtacgtgcacgagctgagaagcggcatcagcgacgagaagctgctgaactgcctggagagcctgagagtgagcctgaccagcaaccccgtgagctgggtgaacaacttcggccacgagggcctgggcctgctgctggacgagctggagaagctgctggacaagaagcagcaggagaacatcgacaagaagaaccagtacaagctgatccagtgcctgaaggccttcatgaacaacaagttcggcctgcagagaatcctgggcgacgagagaagcctgctgctgctggccagagccatcgaccccaagcagcccaacatgatgaccgagatcgtgaagatcctgagcgccatctgcatcgtgggcgaggagaacatcctggacaagctgctgggcgccatcaccaccgccgccgagagaaacaacagagagagattcagccccatcgtggagggcctggagaaccaggaggccctgcagctgcaggtggcctgcatgcagttcatcaacgccctggtgaccagcccctacgagctggacttcagaatccacctgagaaacgagttcctgagaagcggcctgaagaccatgctgcccgacctgaaggagaaggagaacgacgagctggacatccagctgaaggtgttcgacgagaacaaggaggacgacctgaccgagctgagccacagactgaacgacatcagagccgagatggacgacatgaacgaggtgtaccacctgctgtacaacatgctgaaggacaccgccgccgagaactacttcctgagcatcctgcagcacttcctgctgatcagaaacgactactacatcagaccccagtactacaagatcatcgaggagtgcgtgagccagatcgtgctgcactgcagcggcatggaccccgacttcaagtacagacagagactggacatcgacctgacccacctgatcgacagctgcgtgaacaaggccaaggtggaggagagcgagcagaaggccgccgagttcagcaagaagttcgacgaggagttcaccgccagacaggaggcccaggccgagctgcagaagagagacgagaagatcaaggagctggaggccgagatccagcagctgagaacccaggcccaggtgctgagcagcagcagcggcatccccggcccccccgccgccccccccctgcccggcgtgggcccccccccccccccccccgccccccccctgcccggcggcgcccccctgccccccccccccccccccctgcccggcatgatgggcatccccccccccccccccccccccctgctgttcggcggcccccccccccccccccccctgggcggcgtgccccccccccccggcatcagcctgaacctgccctacggcatgaagcagaagaagatgtacaagcccgaggtgagcatgaagagaatcaactggagcaagatcgagcccaccgagctgagcgagaactgcttctggctgagagtgaaggaggacaagttcgagaaccccgacctgttcgccaagctggccctgaacttcgccacccagatcaaggtgcagaagaacgccgaggccctggaggagaagaagaccggccccaccaagaagaaggtgaaggagctgagaatcctggaccccaagaccgcccagaacctgagcatcttcctgggcagctacagaatgccctacgaggacatcagaaacgtgatcctggaggtgaacgaggacatgctgagcgaggccctgatccagaacctggtgaagcacctgcccgagcagaagatcctgaacgagctggccgagctgaagaacgagtacgacgacctgtgcgagcccgagcagttcggcgtggtgatgagcagcgtgaagatgctgcagcccagactgagcagcatcctgttcaagctgaccttcgaggagcacatcaacaacatcaagcccagcatcatcgccgtgaccctggcctgcgaggagctgaagaagagcgagagcttcaacagactgctggagctggtgctgctggtgggcaactacatgaacagcggcagcagaaacgcccagagcctgggcttcaagatcaacttcctgtgcaagatcagagacaccaagagcgccgaccagaagaccaccctgctgcacttcatcgccgacatctgcgaggagaagtacagagacatcctgaagttccccgaggagctggagcacgtggagagcgccagcaaggtgagcgcccagatcctgaagagcaacctggccagcatggagcagcagatcgtgcacctggagagagacatcaagaagttcccccaggccgagaaccagcacgacaagttcgtggagaagatgaccatcttcaccaagaccgccagagagcagtacgagaagctgagcaccatgcacaacaacatgatgaagctgtacgagaacctgggcgagtacttcatcttcgacagcaagaccgtgagcatcgaggagttcttcggcgacctgaacaacttcagaaccctgttcctggaggccgtgagagagaacaacaagagaagagagatggaggagaagaccagaagagccaagctggccaaggagaaggccgagcaggagaagctggagagacagaagaagaagaagcagctgatcgacatcaacaaggagggcgacgagaccggcgtgatggacaacctgctggaggccctgcagagcggcgccgccttcagagacagaagaaagagaatccccagaaaccccgacaacagaagagtgcccctggagagaagcagaagcagacacaacggcgccatcagcagcaagtag

SEQ ID NO: 79129 - DNA, 3312 bp, synthetic construct
  misc_feature 1..3312: note = Description of Artificial Sequence: Synthetic coding sequence
  source 1..3312: mol_type = other DNA
atggagcagcccggcgccgccgccagcggcgccggcggcggcagcgaggagcccggcggcggcagaagcaacaagagaagcgccggcaacagagccgccaacgaggaggagaccaagaacaagcccaagctgaacatccagatcaagaccctggccgacgacgtgagagacagaatcaccagcttcagaaagagcaccgtgaagaaggagaagcccctgatccagcaccccatcgacagccaggtggccatgagcgagttccccgccgcccagcccctgtacgacgagagaagcctgaacctgagcgagaaggaggtgctggacctgttcgagaagatgatggaggacatgaacctgaacgaggagaagaaggcccccctgagaaacaaggacttcaccaccaagagagagatggtggtgcagtacatcagcgccaccgccaagagcatcgtgggcagcaaggtgaccggcggcctgaagaacagcaagcacgagtgcaccctgagcagccaggagtacgtgcacgagctgagaagcggcatcagcgacgagaagctgctgaactgcctggagagcctgagagtgagcctgaccagcaaccccgtgagctgggtgaacaacttcggccacgagggcctgggcctgctgctggacgagctggagaagctgctggacaagaagcagcaggagaacatcgacaagaagaaccagtacaagctgatccagtgcctgaaggccttcatgaacaacaagttcggcctgcagagaatcctgggcgacgagagaagcctgctgctgctggccagagccatcgaccccaagcagcccaacatgatgaccgagatcgtgaagatcctgagcgccatctgcatcgtgggcgaggagaacatcctggacaagctgctgggcgccatcaccaccgccgccgagagaaacaacagagagagattcagccccatcgtggagggcctggagaaccaggaggccctgcagctgcaggtggcctgcatgcagttcatcaacgccctggtgaccagcccctacgagctggacttcagaatccacctgagaaacgagttcctgagaagcggcctgaagaccatgctgcccgacctgaaggagaaggagaacgacgagctggacatccagctgaaggtgttcgacgagaacaaggaggacgacctgaccgagctgagccacagactgaacgacatcagagccgagatggacgacatgaacgaggtgtaccacctgctgtacaacatgctgaaggacaccgccgccgagaactacttcctgagcatcctgcagcacttcctgctgatcagaaacgactactacatcagaccccagtactacaagatcatcgaggagtgcgtgagccagatcgtgctgcactgcagcggcatggaccccgacttcaagtacagacagagactggacatcgacctgacccacctgatcgacagctgcgtgaacaaggccaaggtggaggagagcgagcagaaggccgccgagttcagcaagaagttcgacgaggagttcaccgccagacaggaggcccaggccgagctgcagaagagagacgagaagatcaaggagctggaggccgagatccagcagctgagaacccaggcccaggtgctgagcagcagcagcggcatccccggcccccccgccgccccccccctgcccggcgtgggcccccccccccccccccccgccccccccctgcccggcggcgcccccctgccccccccccccccccccctgcccggcatgatgggcatccccccccccccccccccccccctgctgttcggcggcccccccccccccccccccctgggcggcgtgccccccccccccggcatcagcctgaacctgccctacggcatgaagcagaagaagatgtacaagcccgaggtgagcatgaagagaatcaactggagcaagatcgagcccaccgagctgagcgagaactgcttctggctgagagtgaaggaggacaagttcgagaaccccgacctgttcgccaagctggccctgaacttcgccacccagatcaaggtgcagaagaacgccgaggccctggaggagaagaagaccggccccaccaagaagaaggtgaaggagctgagaatcctggaccccaagaccgcccagaacctgagcatcttcctgggcagctacagaatgccctacgaggacatcagaaacgtgatcctggaggtgaacgaggacatgctgagcgaggccctgatccagaacctggtgaagcacctgcccgagcagaagatcctgaacgagctggccgagctgaagaacgagtacgacgacctgtgcgagcccgagcagttcggcgtggtgatgagcagcgtgaagatgctgcagcccagactgagcagcatcctgttcaagctgaccttcgaggagcacatcaacaacatcaagcccagcatcatcgccgtgaccctggcctgcgaggagctgaagaagagcgagagcttcaacagactgctggagctggtgctgctggtgggcaactacatgaacagcggcagcagaaacgcccagagcctgggcttcaagatcaacttcctgtgcaagatcagagacaccaagagcgccgaccagaagaccaccctgctgcacttcatcgccgacatctgcgaggagaagtacagagacatcctgaagttccccgaggagctggagcacgtggagagcgccagcaaggtgagcgcccagatcctgaagagcaacctggccagcatggagcagcagatcgtgcacctggagagagacatcaagaagttcccccaggccgagaaccagcacgacaagttcgtggagaagatgaccatcttcaccaagaccgccagagagcagtacgagaagctgagcaccatgcacaacaacatgatgaagctgtacgagaacctgggcgagtacttcatcttcgacagcaagaccgtgagcatcgaggagttcttcggcgacctgaacaacttcagaaccctgttcctggaggccgtgagagagaacaacaagagaagagagatggaggagaagaccagaagagccaagctggccaaggagaaggccgagcaggagaagctggagagacagaagaagaagaagcagctgatcgacatcaacaaggagggcgacgagaccggcgtgatggacaacctgctggaggccctgcagagcggcgccgccttcagagacagaagaaagagaatccccagaaaccccgtggtgaaccacccctgcgccaccagagccaaccccagaagcgccacctag

SEQ ID NO: 79130 - DNA, 735 bp, synthetic construct
  misc_feature 1..735: note = Description of Artificial Sequence: Synthetic coding sequence
  source 1..735: mol_type = other DNA
atggagctgttcctggccggcagaagagtgctggtgaccggcgccggcaagggcatcggcagaggcaccgtgcaggccctgcacgccaccggcgccagagtggtggccgtgagcagaacccaggccgacctggacagcctggtgagagagtgccccggcatcgagcccgtgtgcgtggacctgggcgactgggaggccaccgagagagccctgggcagcgtgggccccgtggacctgctggtgaacaacgccgccgtggccctgctgcagcccttcctggaggtgaccaaggaggccttcgacagaagcttcgaggtgaacctgagagccgtgatccaggtgagccagatcgtggccagaggcctgatcgccagaggcgtgcccggcgccatcgtgaacgtgagcagccagtgcagccagagagccgtgaccaaccacagcgtgtactgcagcaccaagggcgccctggacatgctgaccaaggtgatggccctggagctgggcccccacaagatcagagtgaacgccgtgaaccccaccgtggtgatgaccagcatgggccaggccacctggagcgacccccacaaggccaagaccatgctgaacagaatccccctgggcaagttcgccgaggtggagcacgtggtgaacgccatcctgttcctgctgagcgacagaagcggcatgaccaccggcagcaccctgcccgtggagggcggcttctgggcctgctag

SEQ ID NO: 79131 - DNA, 5769 bp, synthetic construct
  misc_feature 1..5769: note = Description of Artificial Sequence: Synthetic coding sequence
  source 1..5769: mol_type = other DNA
atgaagagccccgccctgcagcccctgagcatggccggcctgcagctgatgacccccgccagcagccccatgggccccttcttcggcctgccctggcagcaggaggccatccacgacaacatctacacccccagaaagtaccaggtggagctgctggaggccgccctggaccacaacaccatcgtgtgcctgaacaccggcagcggcaagaccttcatcgccgtgctgctgaccaaggagctgagctaccagatcagaggcgacttcagcagaaacggcaagagaaccgtgttcctggtgaacagcgccaaccaggtggcccagcaggtgagcgccgtgagaacccacagcgacctgaaggtgggcgagtacagcaacctggaggtgaacgccagctggaccaaggagagatggaaccaggagttcaccaagcaccaggtgctgatcatgacctgctacgtggccctgaacgtgctgaagaacggctacctgagcctgagcgacatcaacctgctggtgttcgacgagtgccacctggccatcctggaccacccctacagagagatcatgaagctgtgcgagaactgccccagctgccccagaatcctgggcctgaccgccagcatcctgaacggcaagtgcgaccccgaggagctggaggagaagatccagaagctggagaagatcctgaagagcaacgccgagaccgccaccgacctggtggtgctggacagatacaccagccagccctgcgagatcgtggtggactgcggccccttcaccgacagaagcggcctgtacgagagactgctgatggagctggaggaggccctgaacttcatcaacgactgcaacatcagcgtgcacagcaaggagagagacagcaccctgatcagcaagcagatcctgagcgactgcagagccgtgctggtggtgctgggcccctggtgcgccgacaaggtggccggcatgatggtgagagagctgcagaagtacatcaagcacgagcaggaggagctgcacagaaagttcctgctgttcaccgacaccttcctgagaaagatccacgccctgtgcgaggagcacttcagccccgccagcctggacctgaagttcgtgacccccaaggtgatcaagctgctggagatcctgagaaagtacaagccctacgagagacagcagttcgagagcgtggagtggtacaacaacagaaaccaggacaactacgtgagctggagcgacagcgaggacgacgacgaggacgaggagatcgaggagaaggagaagcccgagaccaacttccccagccccttcaccaacatcctgtgcggcatcatcttcgtggagagaagatacaccgccgtggtgctgaacagactgatcaaggaggccggcaagcaggaccccgagctggcctacatcagcagcaacttcatcaccggccacggcatcggcaagaaccagcccagaaacaagcagatggaggccgagttcagaaagcaggaggaggtgctgagaaagttcagagcccacgagaccaacctgctgatcgccaccagcatcgtggaggagggcgtggacatccccaagtgcaacctggtggtgagattcgacctgcccaccgagtacagaagctacgtgcagagcaagggcagagccagagcccccatcagcaactacatcatgctggccgacaccgacaagatcaagagcttcgaggaggacctgaagacctacaaggccatcgagaagatcctgagaaacaagtgcagcaagagcgtggacaccggcgagaccgacatcgaccccgtgatggacgacgacgacgtgttccccccctacgtgctgagacccgacgacggcggccccagagtgaccatcaacaccgccatcggccacatcaacagatactgcgccagactgcccagcgaccccttcacccacctggcccccaagtgcagaaccagagagctgcccgacggcaccttctacagcaccctgtacctgcccatcaacagccccctgagagccagcatcgtgggcccccccatgagctgcgtgagactggccgagagagtggtggccctgatctgctgcgagaagctgcacaagatcggcgagctggacgaccacctgatgcccgtgggcaaggagaccgtgaagtacgaggaggagctggacctgcacgacgaggaggagaccagcgtgcccggcagacccggcagcaccaagagaagacagtgctaccccaaggccatccccgagtgcctgagagacagctaccccagacccgaccagccctgctacctgtacgtgatcggcatggtgctgaccacccccctgcccgacgagctgaacttcagaagaagaaagctgtacccccccgaggacaccaccagatgcttcggcatcctgaccgccaagcccatcccccagatcccccacttccccgtgtacaccagaagcggcgaggtgaccatcagcatcgagctgaagaagagcggcttcatgctgagcctgcagatgctggagctgatcaccagactgcaccagtacatcttcagccacatcctgagactggagaagcccgccctggagttcaagcccaccgacgccgacagcgcctactgcgtgctgcccctgaacgtggtgaacgacagcagcaccctggacatcgacttcaagttcatggaggacatcgagaagagcgaggccagaatcggcatccccagcaccaagtacaccaaggagacccccttcgtgttcaagctggaggactaccaggacgccgtgatcatccccagatacagaaacttcgaccagccccacagattctacgtggccgacgtgtacaccgacctgacccccctgagcaagttccccagccccgagtacgagaccttcgccgagtactacaagaccaagtacaacctggacctgaccaacctgaaccagcccctgctggacgtggaccacaccagcagcagactgaacctgctgacccccagacacctgaaccagaagggcaaggccctgcccctgagcagcgccgagaagagaaaggccaagtgggagagcctgcagaacaagcagatcctggtgcccgagctgtgcgccatccaccccatccccgccagcctgtggagaaaggccgtgtgcctgcccagcatcctgtacagactgcactgcctgctgaccgccgaggagctgagagcccagaccgccagcgacgccggcgtgggcgtgagaagcctgcccgccgacttcagataccccaacctggacttcggctggaagaagagcatcgacagcaagagcttcatcagcatcagcaacagcagcagcgccgagaacgacaactactgcaagcacagcaccatcgtgcccgagaacgccgcccaccagggcgccaacagaaccagcagcctggagaaccacgaccagatgagcgtgaactgcagaaccctgctgagcgagagccccggcaagctgcacgtggaggtgagcgccgacctgaccgccatcaacggcctgagctacaaccagaacctggccaacggcagctacgacctggccaacagagacttctgccagggcaaccagctgaactactacaagcaggagatccccgtgcagcccaccaccagctacagcatccagaacctgtacagctacgagaaccagccccagcccagcgacgagtgcaccctgctgagcaacaagtacctggacggcaacgccaacaagagcaccagcgacggcagccccgtgatggccgtgatgcccggcaccaccgacaccatccaggtgctgaagggcagaatggacagcgagcagagccccagcatcggctacagcagcagaaccctgggccccaaccccggcctgatcctgcaggccctgaccctgagcaacgccagcgacggcttcaacctggagagactggagatgctgggcgacagcttcctgaagcacgccatcaccacctacctgttctgcacctaccccgacgcccacgagggcagactgagctacatgagaagcaagaaggtgagcaactgcaacctgtacagactgggcaagaagaagggcctgcccagcagaatggtggtgagcatcttcgacccccccgtgaactggctgccccccggctacgtggtgaaccaggacaagagcaacaccgacaagtgggagaaggacgagatgaccaaggactgcatgctggccaacggcaagctggacgaggactacgaggaggaggacgaggaggaggagagcctgatgtggagagcccccaaggaggaggccgactacgaggacgacttcctggagtacgaccaggagcacatcagattcatcgacaacatgctgatgggcagcggcgccttcgtgaagaagatcagcctgagccccttcagcaccaccgacagcgcctacgagtggaagatgcccaagaagagcagcctgggcagcatgcccttcagcagcgacttcgaggacttcgactacagcagctgggacgccatgtgctacctggaccccagcaaggccgtggaggaggacgacttcgtggtgggcttctggaaccccagcgaggagaactgcggcgtggacaccggcaagcagagcatcagctacgacctgcacaccgagcagtgcatcgccgacaagagcatcgccgactgcgtggaggccctgctgggctgctacctgaccagctgcggcgagagagccgcccagctgttcctgtgcagcctgggcctgaaggtgctgcccgtgatcaagagaaccgacagagagaaggccctgtgccccaccagagagaacttcaacagccagcagaagaacctgagcgtgagctgcgccgccgccagcgtggccagcagcagaagcagcgtgctgaaggacagcgagtacggctgcctgaagatcccccccagatgcatgttcgaccaccccgacgccgacaagaccctgaaccacctgatcagcggcttcgagaacttcgagaagaagatcaactacagattcaagaacaaggcctacctgctgcaggccttcacccacgccagctaccactacaacaccatcaccgactgctaccagagactggagttcctgggcgacgccatcctggactacctgatcaccaagcacctgtacgaggaccccagacagcacagccccggcgtgctgaccgacctgagaagcgccctggtgaacaacaccatcttcgccagcctggccgtgaagtacgactaccacaagtacttcaaggccgtgagccccgagctgttccacgtgatcgacgacttcgtgcagttccagctggagaagaacgagatgcagggcatggacagcgagctgagaagaagcgaggaggacgaggagaaggaggaggacatcgaggtgcccaaggccatgggcgacatcttcgagagcctggccggcgccatctacatggacagcggcatgagcctggagaccgtgtggcaggtgtactaccccatgatgagacccctgatcgagaagttcagcgccaacgtgcccagaagccccgtgagagagctgctggagatggagcccgagaccgccaagttcagccccgccgagagaacctacgacggcaaggtgagagtgaccgtggaggtggtgggcaagggcaagttcaagggcgtgggcagaagctacagaatcgccaagagcgccgccgccagaagagccctgagaagcctgaaggccaaccagccccaggtgcccaacagctag

SEQ ID NO: 79132 - DNA, 5769 bp, synthetic construct; identical to SEQ ID NO: 79131
  misc_feature 1..5769: note = Description of Artificial Sequence: Synthetic coding sequence
  source 1..5769: mol_type = other DNA

SEQ ID NO: 79133 - DNA, 5769 bp, synthetic construct; identical to SEQ ID NO: 79131
  misc_feature 1..5769: note = Description of Artificial Sequence: Synthetic coding sequence
  source 1..5769: mol_type = other DNA

SEQ ID NO: 79134 - DNA, 5769 bp, synthetic construct; identical to SEQ ID NO: 79131
  misc_feature 1..5769: note = Description of Artificial Sequence: Synthetic coding sequence
  source 1..5769: mol_type = other DNA

SEQ ID NO: 79135 - DNA, 213 bp, synthetic construct
  misc_feature 1..213: note = Description of Artificial Sequence: Synthetic coding sequence
  source 1..213: mol_type = other DNA
atgaagagccccgccctgcagcccctgagcatggccggcctgcagctgatgacccccgccagcagccccatgggccccttcttcggcctgccctggcagcaggaggccatccacgacaacatctacacccccagaaagtaccaggtggagctgctggaggccgccctggaccacaacaccatcgtgtgcctgaacaccggcagcggcaagtag

SEQ ID NO: 79136 - DNA, 213 bp, synthetic construct; identical to SEQ ID NO: 79135
  misc_feature 1..213: note = Description of Artificial Sequence: Synthetic coding sequence
  source 1..213: mol_type = other DNA

SEQ ID NO: 79137 - DNA, 5490 bp, synthetic construct
  misc_feature 1..5490: note = Description of Artificial Sequence: Synthetic coding sequence
  source 1..5490: mol_type = other DNA
atgaagagccccgccctgcagcccctgagcatggccggcctgcagctgatgacccccgccagcagccccatgggccccttcttcggcctgccctggcagcaggaggccatccacgacaacatctacacccccagaaagtaccaggtggagctgctggaggccgccctggaccacaacaccatcgtgtgcctgaacaccggcagcggcaagaccttcatcgccgtgctgctgaccaaggagctgagctaccagatcagaggcgacttcagcagaaacggcaagagaaccgtgttcctggtgaacagcgccaaccaggtggcccagcaggtgagcgccgtgagaacccacagcgacctgaaggtgggcgagtacagcaacctggaggtgaacgccagctggaccaaggagagatggaaccaggagttcaccaagcaccaggtgctgatcatgacctgctacgtggccctgaacgtgctgaagaacggctacctgagcctgagcgacatcaacctgctggtgttcgacgagtgccacctggccatcctggaccacccctacagagagatcatgaagctgtgcgagaactgccccagctgccccagaatcctgggcctgaccgccagcatcctgaacggcaagtgcgaccccgaggagctggaggagaagatccagaagctggagaagatcctgaagagcaacgccgagaccgccaccgacctggtggtgctggacagatacaccagccagccctgcgagatcgtggtggactgcggccccttcaccgacagaagcggcctgtacgagagactgctgatggagctggaggaggccctgaacttcatcaacgactgcaacatcagcgtgcacagcaaggagagagacagcaccctgatcagcaagcagatcctgagcgactgcagagccgtgctggtggtgctgggcccctggtgcgccgacaaggtggccggcatgatggtgagagagctgcagaagtacatcaagcacgagcaggaggagctgcacagaaagttcctgctgttcaccgacaccttcctgagaaagatccacgccctgtgcgaggagcacttcagccccgccagcctggacctgaagttcgtgacccccaaggtgatcaagctgctggagatcctgagaaagtacaagccctacgagagacagcagttcgagagcgtggagtggtacaacaacagaaaccaggacaactacgtgagctggagcgacagcgaggacgacgacgaggacgaggagatcgaggagaaggagaagcccgagaccaacttccccagccccttcaccaacatcctgtgcggcatcatcttcgtggagagaagatacaccgccgtggtgctgaacagactgatcaaggaggccggcaagcaggaccccgagctggcctacatcagcagcaacttcatcaccggccacggcatcggcaagaaccagcccagaaacaagcagatggaggccgagttcagaaagcaggaggaggtgctgagaaagttcagagcccacgagaccaacctgctgatcgccaccagcatcgtggaggagggcgtggacatccccaagtgcaacctggtggtgagattcgacctgcccaccgagtacagaagctacgtgcagagcaagggcagagccagagcccccatcagcaactacatcatgctggccgacaccgacaagatcaagagcttcgaggaggacctgaagacctacaaggccatcgagaagatcctgagaaacaagtgcagcaagagcgtggacaccggcgagaccgacatcgaccccgtgatggacgacgacgacgtgttccccccctacgtgctgagacccgacgacggcggccccagagtgaccatcaacaccgccatcggccacatcaacagatactgcgccagactgcccagcgaccccttcacccacctggcccccaagtgcagaaccagagagctgcccgacggcaccttctacagcaccctgtacctgcccatcaacagccccctgagagccagcatcgtgggcccccccatgagctgcgtgagactggccgagagagtggtggccctgatctgctgcgagaagctgcacaagatcggcgagctggacgaccacctgatgcccgtgggcaaggagaccgtgaagtacgaggaggagctggacctgcacgacgaggaggagaccagcgtgcccggcagacccggcagcaccaagagaagacagtgctaccccaaggccatccccgagtgcctgagagacagctaccccagacccgaccagccctgctacctgtacgtgatcggcatggtgctgaccacccccctgcccgacgagctgaacttcagaagaagaaagctgtacccccccgaggacaccaccagatgcttcggcatcctgaccgccaagcccatcccccagatcccccacttccccgtgtacaccagaagcggcgaggtgaccatcagcatcgagctgaagaagagcggcttcatgctgagcctgcagatgctggagctgatcaccagactgcaccagtacatcttcagccacatcctgagactggagaagcccgccctggagttcaagcccaccgacgccgacagcgcctactgcgtgctgcccctgaacgtggtgaacgacagcagcaccctggacatcgacttcaagttcatggaggacatcgagaagagcgaggccagaatcggcatccccagcaccaagtacaccaaggagacccccttcgtgttcaagctggaggactaccaggacgccgtgatcatccccagatacagaaacttcgaccagccccacagattctacgtggccgacgtgtacaccgacctgacccccctgagcaagttccccagccccgagtacgagaccttcgccgagtactacaagaccaagtacaacctggacctgaccaacctgaaccagcccctgctggacgtggaccacaccagcagcagactgaacctgctgacccccagacacctgaaccagaagggcaaggccctgcccctgagcagcgccgagaagagaaaggccaagtgggagagcctgcagaacaagcagatcctggtgcccgagctgtgcgccatccaccccatccccgccagcctgtggagaaaggccgtgtgcctgcccagcatcctgtacagactgcactgcctgctgaccgccgaggagctgagagcccagaccgccagcgacgccggcgtgggcgtgagaagcctgcccgccgacttcagataccccaacctggacttcggctggaagaagagcatcgacagcaagagcttcatcagcatcagcaacagcagcagcgccgagaacgacaactactgcaagcacagcaccatcgtgcccgagaacgccgcccaccagggcgccaacagaaccagcagcctggagaaccacgaccagatgagcgtgaactgcagaaccctgctgagcgagagccccggcaagctgcacgtggaggtgagcgccgacctgaccgccatcaacggcctgagctacaaccagaacctggccaacggcagctacgacctggccaacagagacttctgccagggcaaccagctgaactactacaagcaggagatccccgtgcagcccaccaccagctacagcatccagaacctgtacagctacgagaaccagccccagcccagcgacgagtgcaccctgctgagcaacaagtacctggacggcaacgccaacaagagcaccagcgacggcagccccgtgatggccgtgatgcccggcaccaccgacaccatccaggtgctgaagggcagaatggacagcgagcagagccccagcatcggctacagcagcagaaccctgggccccaaccccggcctgatcctgcaggccctgaccctgagcaacgccagcgacggcttcaacctggagagactggagatgctgggcgacagcttcctgaagcacgccatcaccacctacctgttctgcacctaccccgacgcccacgagggcagactgagctacatgagaagcaagaaggtgagcaactgcaacctgtacagactgggcaagaagaagggcctgcccagcagaatggtggtgagcatcttcgacccccccgtgaactggctgccccccggctacgtggtgaaccaggacaagagcaacaccgacaagtgggagaaggacgagatgaccaaggactgcatgctggccaacggcaagctggacgaggactacgaggaggaggacgaggaggaggagagcctgatgtggagagcccccaaggaggaggccgactacgaggacgacttcctggagtacgaccaggagcacatcagattcatcgacaacatgctgatgggcagcggcgccttcgtgaagaagatcagcctgagccccttcagcaccaccgacagcgcctacgagtggaagatgcccaagaagagcagcctgggcagcatgcccttcagcagcgacttcgaggacttcgactacagcagctgggacgccatgtgctacctggaccccagcaaggccgtggaggaggacgacttcgtggtgggcttctggaaccccagcgaggagaactgcggcgtggacaccggcaagcagagcatcagctacgacctgcacaccgagcagtgcatcgccgacaagagcatcgccgactgcgtggaggccctgctgggctgctacctgaccagctgcggcgagagagccgcccagctgttcctgtgcagcctgggcctgaaggtgctgcccgtgatcaagagaaccgacagagagaaggccctgtgccccaccagagagaacttcaacagccagcagaagaacctgagcgtgagctgcgccgccgccagcgtggccagcagcagaagcagcgtgctgaaggacagcgagtacggctgcctgaagatcccccccagatgcatgttcgaccaccccgacgccgacaagaccctgaaccacctgatcagcggcttcgagaacttcgagaagaagatcaactacagattcaagaacaaggcctacctgctgcaggccttcacccacgccagctaccactacaacaccatcaccgactgctaccagagactggagttcctgggcgacgccatcctggactacctgatcaccaagcacctgtacgaggaccccagacagcacagccccggcgtgctgaccgacctgagaagcgccctggtgaacaacaccatcttcgccagcctggccgtgaagtacgactaccacaagtacttcaaggccgtgagccccgagctgttccacgtgatcgacgacttcgtgcagttccagctggagaagaacgagatgcagggcatggacagcgagaagagcttcctgcagatgtaccccgtgcccctgtgcgagaactgcctgaagtggaaccagaagctgcccaacctggccagactgagagagctgaccaccggcagaagcgagagcctgtggaagtag

SEQ ID NO: 79138 - DNA, 2463 bp, synthetic construct
  misc_feature 1..2463: note = Description of Artificial Sequence: Synthetic coding sequence
  source 1..2463: mol_type = other DNA
atgctggcctgggagagcgaccacttcctgagaatcctggccgagaacgacaactactgcaagcacagcaccatcgtgcccgagaacgccgcccaccagggcgccaacagaaccagcagcctggagaaccacgaccagatgagcgtgaactgcagaaccctgctgagcgagagccccggcaagctgcacgtggaggtgagcgccgacctgaccgccatcaacggcctgagctacaaccagaacctggccaacggcagctacgacctggccaacagagacttctgccagggcaaccagctgaactactacaagcaggagatccccgtgcagcccaccaccagctacagcatccagaacctgtacagctacgagaaccagccccagcccagcgacgagtgcaccctgctgagcaacaagtacctggacggcaacgccaacaagagcaccagcgacggcagccccgtgatggccgtgatgcccggcaccaccgacaccatccaggtgctgaagggcagaatggacagcgagcagagccccagcatcggctacagcagcagaaccctgggccccaaccccggcctgatcctgcaggccctgaccctgagcaacgccagcgacggcttcaacctggagagactggagatgctgggcgacagcttcctgaagcacgccatcaccacctacctgttctgcacctaccccgacgcccacgagggcagactgagctacatgagaagcaagaaggtgagcaactgcaacctgtacagactgggcaagaagaagggcctgcccagcagaatggtggtgagcatcttcgacccccccgtgaactggctgccccccggctacgtggtgaaccaggacaagagcaacaccgacaagtgggagaaggacgagatgaccaaggactgcatgctggccaacggcaagctggacgaggactacgaggaggaggacgaggaggaggagagcctgatgtggagagcccccaaggaggaggccgactacgaggacgacttcctggagtacgaccaggagcacatcagattcatcgacaacatgctgatgggcagcggcgccttcgtgaagaagatcagcctgagccccttcagcaccaccgacagcgcctacgagtggaagatgcccaagaagagcagcctgggcagcatgcccttcagcagcgacttcgaggacttcgactacagcagctgggacgccatgtgctacctggaccccagcaaggccgtggaggaggacgacttcgtggtgggcttctggaaccccagcgaggagaactgcggcgtggacaccggcaagcagagcatcagctacgacctgcacaccgagcagtgcatcgccgacaagagcatcgccgactgcgtggaggccctgctgggctgctacctgaccagctgcggcgagagagccgcccagctgttcctgtgcagcctgggcctgaaggtgctgcccgtgatcaagagaaccgacagagagaaggccctgtgccccaccagagagaacttcaacagccagcagaagaacctgagcgtgagctgcgccgccgccagcgtggccagcagcagaagcagcgtgctgaaggacagcgagtacggctgcctgaagatcccccccagatgcatgttcgaccaccccgacgccgacaagaccctgaaccacctgatcagcggcttcgagaacttcgagaagaagatcaactacagattcaagaacaaggcctacctgctgcaggccttcacccacgccagctaccactacaacaccatcaccgactgctaccagagactggagttcctgggcgacgccatcctggactacctgatcaccaagcacctgtacgaggaccccagacagcacagccccggcgtgctgaccgacctgagaagcgccctggtgaacaacaccatcttcgccagcctggccgtgaagtacgactaccacaagtacttcaaggccgtgagccccgagctgttccacgtgatcgacgacttcgtgcagttccagctggagaagaacgagatgcagggcatggacagcgagctgagaagaagcgaggaggacgaggagaaggaggaggacatcgaggtgcccaaggccatgggcgacatcttcgagagcctggccggcgccatctacatggacagcggcatgagcctggagaccgtgtggcaggtgtactaccccatgatgagacccctgatcgagaagttcagcgccaacgtgcccagaagccccgtgagagagctgctggagatggagcccgagaccgccaagttcagccccgccgagagaacctacgacggcaaggtgagagtgaccgtggaggtggtgggcaagggcaagttcaagggcgtgggcagaagctacagaatcgccaagagcgccgccgccagaagagccctgagaagcctgaaggccaaccagccccaggtgcccaacagctag

SEQ ID NO: 79139 - DNA, 801 bp, synthetic construct
  misc_feature 1..801: note = Description of Artificial Sequence: Synthetic coding sequence
  source 1..801: mol_type = other DNA
atgatggccctgggcgccgccggcgccaccagagtgttcgtggccatggtggccgccgccctgggcggccaccccctgctgggcgtgagcgccaccctgaacagcgtgctgaacagcaacgccatcaagaacctgcccccccccctgggcggcgccgccggccaccccggcagcgccgtgagcgccgcccccggcatcctgtaccccggcggcaacaagtaccagaccatcgacaactaccagccctacccctgcgccgaggacgaggagtgcggcaccgacgagtactgcgccagccccaccagaggcggcgacgccggcgtgcagatctgcctggcctgcagaaagagaagaaagagatgcatgagacacgccatgtgctgccccggcaactactgcaagaacggcatctgcgtgagcagcgaccagaaccacttcagaggcgagatcgaggagaccatcaccgagagcttcggcaacgaccacagcaccctggacggctacagcagaagaaccaccctgagcagcaagatgtaccacaccaagggccaggagggcagcgtgtgcctgagaagcagcgactgcgccagcggcctgtgctgcgccagacacttctggagcaagatctgcaagcccgtgctgaaggagggccaggtgtgcaccaagcacagaagaaagggcagccacggcctggagatcttccagagatgctactgcggcgagggcctgagctgcagaatccagaaggaccaccaccaggccagcaacagcagcagactgcacacctgccagagacactag

SEQ ID NO: 79140 - DNA, 1689 bp, synthetic construct
  misc_feature 1..1689: note = Description of Artificial Sequence: Synthetic coding sequence
  source 1..1689: mol_type = other DNA
atggacgccatgaagagaggcctgtgctgcgtgctgctgctgtgcggcgccgtgttcgtgagccccagccaggagatccacgccagattcagaagaggcgccagaagctaccaggtgatctgcagagacgagaagacccagatgatctaccagcagcaccagagctggctgagacccgtgctgagaagcaacagagtggagtactgctggtgcaacagcggcagagcccagtgccacagcgtgcccgtgaagagctgcagcgagcccagatgcttcaacggcggcacctgccagcaggccctgtacttcagcgacttcgtgtgccagtgccccgagggcttcgccggcaagtgctgcgagatcgacaccagagccacctgctacgaggaccagggcatcagctacagaggcacctggagcaccgccgagagcggcgccgagtgcaccaactggaacagcagcgccctggcccagaagccctacagcggcagaagacccgacgccatcagactgggcctgggcaaccacaactactgcagaaaccccgacagagacagcaagccctggtgctacgtgttcaaggccggcaagtacagcagcgagttctgcagcacccccgcctgcagcgagggcaacagcgactgctacttcggcaacggcagcgcctacagaggcacccacagcctgaccgagagcggcgccagctgcctgccctggaacagcatgatcctgatcggcaaggtgtacaccgcccagaaccccagcgcccaggccctgggcctgggcaagcacaactactgcagaaaccccgacggcgacgccaagccctggtgccacgtgctgaagaacagaagactgacctgggagtactgcgacgtgcccagctgcagcacctgcggcctgagacagtacagccagccccagttcagaatcaagggcggcctgttcgccgacatcgccagccacccctggcaggccgccatcttcgccaagcacagaagaagccccggcgagagattcctgtgcggcggcatcctgatcagcagctgctggatcctgagcgccgcccactgcttccaggagagattccccccccaccacctgaccgtgatcctgggcagaacctacagagtggtgcccggcgaggaggagcagaagttcgaggtggagaagtacatcgtgcacaaggagttcgacgacgacacctacgacaacgacatcgccctgctgcagctgaagagcgacagcagcagatgcgcccaggagagcagcgtggtgagaaccgtgtgcctgccccccgccgacctgcagctgcccgactggaccgagtgcgagctgagcggctacggcaagcacgaggccctgagccccttctacagcgagagactgaaggaggcccacgtgagactgtaccccagcagcagatgcaccagccagcacctgctgaacagaaccgtgaccgacaacatgctgtgcgccggcgacaccagaagcggcggcccccaggccaacctgcacgacgcctgccagggcgacagcggcggccccctggtgtgcctgaacgacggcagaatgaccctggtgggcatcatcagctggggcctgggctgcggccagaaggacgtgcccggcgtgtacaccaaggtgaccaactacctggactggatcagagacaacatgagaccctag

SEQ ID NO: 79141 - DNA, 420 bp, synthetic construct
  misc_feature 1..420: note = Description of Artificial Sequence: Synthetic coding sequence
  source 1..420: mol_type = other DNA
atggtggccgccgtgctgctgggcctgagctggctgtgcagccccctgggcgccctggtgctggacttcaacaacatcagaagcagcgccgacctgcacggcgccagaaagggcagccagtgcctgagcgacaccgactgcaacaccagaaagttctgcctgcagcccagagacgagaagcccttctgcgccacctgcagaggcctgagaagaagatgccagagagacgccatgtgctgccccggcaccctgtgcgtgaacgacgtgtgcaccaccatggaggacgccacccccatcctggagagacagctggacgagcaggacggcacccacgccgagggcaccaccggccaccccgtgcaggagaaccagcccaagagaaagcccagcatcaagaagagcagcagcatgctggactag

SEQ ID NO: 79142 - DNA, 1683 bp, synthetic construct
  misc_feature 1..1683: note = Description of Artificial Sequence: Synthetic coding sequence
  source 1..1683: mol_type = other DNA
atgagagacctgcccctgaccagcctggccctggtgctgagcgccctgggcgccctgctgggcaccgaggccctgagagccgaggagcccgccgtgggcaccagcggcctgatcttcagagaggacctggactggccccccggcagcccccaggagcccctgtgcctggtggccctgggcggcgacagcaacggcagcagcagccccctgagagtggtgggcgccctgagcgcctacgagcaggccttcctgggcgccgtgcagagagccagatggggccccagagacctggccaccttcggcgtgtgcaacaccggcgacagacaggccgccctgcccagcctgagaagactgggcgcctggctgagagaccccggcggccagagactggtggtgctgcacctggaggaggtgacctgggagcccacccccagcctgagattccaggagcccccccccggcggcgccggcccccccgagctggccctgctggtgctgtaccccggccccggccccgaggtgaccgtgaccagagccggcctgcccggcgcccagagcctgtgccccagcagagacaccagatacctggtgctggccgtggacagacccgccggcgcctggagaggcagcggcctggccctgaccctgcagcccagaggcgaggacagcagactgagcaccgccagactgcaggccctgctgttcggcgacgaccacagatgcttcaccagaatgacccccgccctgctgctgctgcccagaagcgagcccgcccccctgcccgcccacggccagctggacaccgtgcccttccccccccccagacccagcgccgagctggaggagagcccccccagcgccgaccccttcctggagaccctgaccagactggtgagagccctgagagtgccccccgccagagccagcgcccccagactggccctggaccccgacgccctggccggcttcccccagggcctggtgaacctgagcgaccccgccgccctggagagactgctggacggcgaggagcccctgctgctgctgctgagacccaccgccgccaccaccggcgaccccgcccccctgcacgaccccaccagcgccccctgggccaccgccctggccagaagagtggccgccgagctgcaggccgccgccgccgagctgagaagcctgcccggcctgccccccgccaccgcccccctgctggccagactgctggccctgtgccccggcggccccggcggcctgggcgaccccctgagagccctgctgctgctgaaggccctgcagggcctgagagtggagtggagaggcagagaccccagaggccccggcagagcccagagaagcgccggcgccaccgccgccgacggcccctgcgccctgagagagctgagcgtggacctgagagccgagagaagcgtgctgatccccgagacctaccaggccaacaactgccagggcgtgtgcggctggccccagagcgacagaaaccccagatacggcaaccacgtggtgctgctgctgaagatgcaggtgagaggcgccgccctggccagacccccctgctgcgtgcccaccgcctacgccggcaagctgctgatcagcctgagcgaggagagaatcagcgcccaccacgtgcccaacatggtggccaccgagtgcggctgcagatag

SEQ ID NO: 79143 - DNA, 600 bp, synthetic construct
  misc_feature 1..600: note = Description of Artificial Sequence: Synthetic coding sequence
  source 1..600: mol_type = other DNA
atgggcgaggccagcccccccgcccccgccagaagacacctgctggtgctgctgctgctgctgagcaccctggtgatccccagcgccgccgcccccatccacgacgccgacgcccaggagagcagcctgggcctgaccggcctgcagagcctgctgcagggcttcagcagactgttcctgaagggcaacctgctgagaggcatcgacagcctgttcagcgcccccatggacttcagaggcctgcccggcaactaccacaaggaggagaaccaggagcaccagctgggcaacaacaccctgagcagccacctgcagatcgacaaggtgcccagaatggaggagaaggaggccctggtgcccatccagaaggccaccgacagcttccacaccgagctgcaccccagagtggccttctggatcatcaagctgcccagaagaagaagccaccaggacgccctggagggcggccactggctgagcgagaagagacacagactgcaggccatcagagacggcctgagaaagggcacccacaaggacgtgctggaggagggcaccgagagcagcagccacagcagactgagccccagaaagacctag

SEQ ID NO: 79144 - DNA, 1896 bp, synthetic construct
  misc_feature 1..1896: note = Description of Artificial Sequence: Synthetic coding sequence
  source 1..1896: mol_type = other DNA
atggccctgagaaaggagctgctgaagagcatctggtacgccttcaccgccctggacgtggagaagagcggcaaggtgagcaagagccagctgaaggtgctgagccacaacctgtacaccgtgctgcacatcccccacgaccccgtggccctggaggagcacttcagagacgacgacgacggccccgtgagcagccagggctacatgccctacctgaacaagtacatcctggacaaggtggaggagggcgccttcgtgaaggagcacttcgacgagctgtgctggaccctgaccgccaagaagaactacagagccgacagcaacggcaacagcatgctgagcaaccaggacgccttcagactgtggtgcctgttcaacttcctgagcgaggacaagtaccccctgatcatggtgcccgacgaggtggagtacctgctgaagaaggtgctgagcagcatgagcctggaggtgagcctgggcgagctggaggagctgctggcccaggaggcccaggtggcccagaccaccggcggcctgagcgtgtggcagttcctggagctgttcaacagcggcagatgcctgagaggcgtgggcagagacaccctgagcatggccatccacgaggtgtaccaggagctgatccaggacgtgctgaagcagggctacctgtggaagagaggccacctgagaagaaactgggccgagagatggttccagctgcagcccagctgcctgtgctacttcggcagcgaggagtgcaaggagaagagaggcatcatccccctggacgcccactgctgcgtggaggtgctgcccgacagagacggcaagagatgcatgttctgcgtgaagaccgccaacagaacctacgagatgagcgccagcgacaccagacagagacaggagtggaccgccgccatccagatggccatcagactgcaggccgagggcaagaccagcctgcacaaggacctgaagcagaagagaagagagcagagagagcagagagagagaagaagagccgccaaggaggaggagctgctgagactgcagcagctgcaggaggagaaggagagaaagctgcaggagctggagctgctgcaggaggcccagagacaggccgagagactgctgcaggaggaggaggagagaagaagaagccagcacagagagctgcagcaggccctggagggccagctgagagaggccgagcaggccagagccagcatgcaggccgagatggagctgaaggaggaggaggccgccagacagagacagagaatcaaggagctggaggagatgcagcagagactgcaggaggccctgcagctggaggtgaaggccagaagagacgaggagagcgtgagaatcgcccagaccagactgctggaggaggaggaggagaagctgaagcagctgatgcagctgaaggaggagcaggagagatacatcgagagagcccagcaggagaaggaggagctgcagcaggagatggcccagcagagcagaagcctgcagcaggcccagcagcagctggaggaggtgagacagaacagacagagagccgacgaggacgtggaggccgcccagagaaagctgagacaggccagcaccaacgtgaagcactggaacgtgcagatgaacagactgatgcaccccatcgagcccggcgacaagagacccgtgaccagcagcagcttcagcggcttccagccccccctgctggcccacagagacagcagcctgaagagactgaccagatggggcagccagggcaacagaacccccagccccaacagcaacgagcagcagaagagcctgaacggcggcgacgaggcccccgcccccgccagcaccccccaggaggacaagctggaccccgcccccgagaactag

SEQ ID NO: 79145 - DNA, 555 bp, synthetic construct
  misc_feature 1..555: note = Description of Artificial Sequence: Synthetic coding sequence
  source 1..555: mol_type = other DNA
atggccctgagaaaggagctgctgaagagcatctggtacgccttcaccgccctggacgtggagaagagcggcaaggtgagcaagagccagctgaaggtgctgagccacaacctgtacaccgtgctgcacatcccccacgaccccgtggccctggaggagcacttcagagacgacgacgacggccccgtgagcagccagggctacatgccctacctgaacaagtacatcctggacaaggacgccttcagactgtggtgcctgttcaacttcctgagcgaggacaagtaccccctgatcatggtgcccgacgaggtggagtacctgctgaagaaggtgctgagcagcatgagcctggaggtgagcctgggcgagctggaggagctgctggcccaggaggcccaggtggcccagaccaccggcggcctgagcgtgtggcagttcctggagctgttcaacagcggcagatgcctgagaggcgtgggcagagacaccctgagcatggccatccacgaggtgtaccaggagctgatccaggacgtgctgaagcagggctag

SEQ ID NO: 79146 - DNA, 393 bp, synthetic construct
  misc_feature 1..393: note = Description of Artificial Sequence: Synthetic coding sequence
  source 1..393: mol_type = other DNA
tgaagagacgacgacgacggccccgtgagcagccagggctacatgccctacctgaacaagtacatcctggacaaggacgccttcagactgtggtgcctgttcaacttcctgagcgaggacaagtaccccctgatcatggtgcccgacgaggtggagtacctgctgaagaaggtgctgagcagcatgagcctggaggtgagcctgggcgagctggaggagctgctggcccaggaggcccaggtggcccagaccaccggcggcctgagcgtgtggcagttcctggagctgttcaacagcggcagatgcctgagaggcgtgggcagagacaccctgagcatggccatccacgaggtgtaccaggagctgatccaggacgtgctgaagcagggctag

SEQ ID NO: 79147 - DNA, 1131 bp, synthetic construct
  misc_feature 1..1131: note = Description of Artificial Sequence: Synthetic coding sequence
  source 1..1131: mol_type = other DNA
atgatctgcccccccagaccccccaaggtgctgggcctgcaggtgctgcccgacagagacggcaagagatgcatgttctgcgtgaagaccgccaacagaacctacgagatgagcgccagcgacaccagacagagacaggagtggaccgccgccatccagatggccatcagactgcaggccgagggcaagaccagcctgcacaaggacctgaagcagaagagaagagagcagagagagcagagagagagaagaagagccgccaaggaggaggagctgctgagactgcagcagctgcaggaggagaaggagagaaagctgcaggagctggagctgctgcaggaggcccagagacaggccgagagactgctgcaggaggaggaggagagaagaagaagccagcacagagagctgcagcaggccctggagggccagctgagagaggccgagcaggccagagccagcatgcaggccgagatggagctgaaggaggaggaggccgccagacagagacagagaatcaaggagctggaggagatgcagcagagactgcaggaggccctgcagctggaggtgaaggccagaagagacgaggagagcgtgagaatcgcccagaccagactgctggaggaggaggaggagaagctgaagcagctgatgcagctgaaggaggagcaggagagatacatcgagagagcccagcaggagaaggaggagctgcagcaggagatggcccagcagagcagaagcctgcagcaggcccagcagcagctggaggaggtgagacagaacagacagagagccgacgaggacgtggaggccgcccagagaaagctgagacaggccagcaccaacgtgaagcactggaacgtgcagatgaacagactgatgcaccccatcgagcccggcgacaagagacccgtgaccagcagcagcttcagcggcttccagccccccctgctggcccacagagacagcagcctgaagagactgaccagatggggcagccagggcaacagaacccccagccccaacagcaacgagcagcagaagagcctgaacggcggcgacgaggcccccgcccccgccagcaccccccaggaggacaagctggaccccgcccccgagaactag

SEQ ID NO: 79148 - DNA, 708 bp, synthetic construct
  misc_feature 1..708: note = Description of Artificial Sequence: Synthetic coding sequence
  source 1..708: mol_type = other DNA
atgacccaggtgaccgagaagagcaccgagcaccccgagaagaccaccagcaccaccgagaagaccaccagaacccccgagaagcccaccctgtacagcgagaagaccatctgcaccaagggcaagaacacccccgtgcccgagaagcccaccgagaacctgggcaacaccaccctgaccaccgagaccatcaaggcccccgtgaagagcaccgagaaccccgagaagaccgccgccgtgaccaagaccatcaagcccagcgtgaaggtgaccggcgacaagagcctgaccaccaccagcagccacctgaacaagaccgaggtgacccaccaggtgcccaccggcagcttcaccctgatcaccagcagaaccaagctgagcagcatcaccagcgaggccaccggcaacgagagccacccctacctgaacaaggacggcagccagaagggcatccacgccggccagatgggcgagaacgacagcttccccgcctgggccatcgtgatcgtggtgctggtggccgtgatcctgctgctggtgttcctgggcctgatcttcctggtgagctacatgatgagaaccagaagaaccctgacccagaacacccagtacaacgacgccgaggacgagggcggccccaacagctaccccgtgtacctgatggagcagcagaacctgggcatgggccagatccccagccccagatag

SEQ ID NO: 79149 - DNA, 1524 bp, synthetic construct
  misc_feature 1..1524: note = Description of Artificial Sequence: Synthetic coding sequence
  source 1..1524: mol_type = other DNA
cccctggccaacgagaagaccaccctgagccccgccgagcccaccgagaacggcgagagaacccccttcaccaacgagaagaccacccccagcagcgccgagcccaccgagcacggcgagagaacccccctggccaacgagatcaccacccccagcagagccgagcccaccgagcacggcgagagaatcgccaacgagaaggccacccccagccccgccaagcccaccgagcacggcgagaccaccgtgaacgaggacaccacccccagcagcgccgagcccaccgagaacggcgagagaacccccctggccaacgagaacaccaccaccagccccaccgagagcaccgagcacggcgagagaaccgccaacgagaagaccacccccagccccgccgagcccaccgagcacggcgagagaacccccagcgccaacgagaagaccatccccagccccgccaagcccaccgagcacgaggagatgacccccagcgccaacgagaacaccacccccagccccgtgaagcccaccgagcacggcgagaagaccaccctggccaacgagaagatcaccctgagccccgagggccccaccgagcacggcgccaagaccaccagcgccaacgagaagatcacccccagcctggccaagcccaccgagcacggcgagagaaccaccagccccaacgacaagatcaccagcagcgccgccgagagcaccgagcacagagacagagccaccagcgccaacgtgatcacccccgcccccgccgagcccatcaagcacgccaagagaaccaccctggcccacgagaagatgacccaggtgaccgagaagagcaccgagcaccccgagaagaccaccagcaccaccgagaagaccaccagaacccccgagaagcccaccctgtacagcgagaagaccatctgcaccaagggcaagaacacccccgtgcccgagaagcccaccgagaacctgggcaacaccaccctgaccaccgagaccatcaaggcccccgtgaagagcaccgagaaccccgagaagaccgccgccgtgaccaagaccatcaagcccagcgtgaaggtgaccggcgacaagagcctgaccaccaccagcagccacctgaacaagaccgaggtgacccaccaggtgcccaccggcagcttcaccctgatcaccagcagaaccaagctgagcagcatcaccagcgaggccaccggcaacgagagccacccctacctgaacaaggacggcagccagaagggcatccacgccggccagatgggcgagaacgacagcttccccgcctgggccatcgtgatcgtggtgctggtggccgtgatcctgctgctggtgttcctgggcctgatcttcctggtgagctacatgatgagaaccagaagaaccctgacccagaacacccagtacaacgacgccgaggacgagggcggccccaacagctaccccgtgtacctgatggagcagcagaacctgggcatgggccagatccccagccccagatag

SEQ ID NO: 79150 - DNA, 1524 bp, synthetic construct
  misc_feature 1..1524: note = Description of Artificial Sequence: Synthetic coding sequence
  source 1..1524: mol_type = other DNA
cccctggccaacgagaagaccaccctgagccccgccgagcccaccgagaacggcgagagaacccccttcaccaacgagaagaccacccccagcagcgccgagcccaccgagcacggcgagagaacccccctggccaacgagatcaccacccccagcagagccgagcccaccgagcacggcgagagaatcgccaacgagaaggccacccccagccccgccaagcccaccgagcacggcgagaccaccgtgaacgaggacaccacccccagcagcgccgagcccaccgagaacggcgagagaacccccctggccaacgagaacaccaccaccagccccaccgagagcaccgagcacggcgagagaaccgccaacgagaagaccacccccagccccgccgagcccaccgagcacggcgagagaacccccagcgccaacgagaagaccatccccagccccgccaagcccaccgagcacgaggagatgacccccagcgccaacgagaacaccacccccagccccgtgaagcccaccgagcacggcgagaagaccaccctggccaacgagaagatcaccctgagccccgagggccccaccgagcacggcgccaagaccaccagcgccaacgagaagatcacccccagcctggccaagcccaccgagcacggcgagagaaccaccagccccaacgacaagatcaccagcagcgccgccgagagcaccgagcacagagacagagccaccagcgccaacgtgatcacccccgcccccgccgagcccatcaagcacgccaagagaaccaccctggcccacgagaagatgacccaggtgaccgagaagagcaccgagcaccccgagaagaccaccagcaccaccgagaagaccaccagaacccccgagaagcccaccctgtacagcgagaagaccatctgcaccaagggcaagaacacccccgtgcccgagaagcccaccgagaacctgggcaacaccaccctgaccaccgagaccatcaaggcccccgtgaagagcaccgagaaccccgagaagaccgccgccgtgaccaagaccatcaagcccagcgtgaaggtgaccggcgacaagagcctgaccaccaccagcagccacctgaacaagaccgaggtgacccaccaggtgcccaccggcagcttcaccctgatcaccagcagaaccaagctgagcagcatcaccagcgaggccaccggcaacaagagccacccctacctgaacaaggacggcagccagaagggcatccacgccggccagatgggcgagaacgacagcttccccgcctgggccatcgtgatcgtggtgctggtggccgtgatcctgctgctggtgttcctgggcctgatcttcctggtgagctacatgatgagaaccagaagaaccctgacccagaacacccagtacaacgacgccgaggacgagggcggccccaacagctaccccgtgtacctgatggagcagcagaacctgggcatgggccagatccccagccccagatag

SEQ ID NO: 79151 - DNA, 1524 bp, synthetic construct; identical to SEQ ID NO: 79149
  misc_feature 1..1524: note = Description of Artificial Sequence: Synthetic coding sequence
  source 1..1524: mol_type = other DNA

SEQ ID NO: 79152 - DNA, 1554 bp, synthetic construct
  misc_feature 1..1554: note = Description of Artificial Sequence: Synthetic coding sequence
  source 1..1554: mol_type = other DNA
atggcccagcccgtgcacagcctgtgcagcgccttcggcctgcagtgctgcctgctgttcctgctggccagctggggcgccggcgccaccaccttccaggagtaccagaagaccggcgagctgagcaccagcgaccacatcttccccctgacccccggcctggtgtacagcatccccttcgaccacatcgtgctgcacagcggccagagaccccccgagctgcccaagagcaccgagatccacgagcagaagagacactgcaacaccaccagacacagcaagcccaccgacaagcccaccggcaacagcaagaccatcgaccacaagagcagcaccgacaaccacgaggccccccccaccagcgaggagaacagcagcaaccagggcaaggaccccatgatcagaaaccagagaagcgtggaccccgccgacagcaccaccacccacaaggagagcgccggcaagaagcacatcacccccgcccccaagagcaagatcaactgcagaaagagcaccaccggcaagagcaccgtgaccagaaagagcgacaagaccggcagacccctggagaagagcatgagcaccctggacaagaccagcaccagcagccacaagaccaccaccagcttccacaacagcggcaacagccagaccaagcagaagagcaccagcttccccgagaagatcaccgccgccagcaagaccacctacaagaccaccggcacccccgaggagagcgagaagaccgaggacagcagaaccaccgtggccagcgacaagctgctgaccaagaccaccaagaacatccaggagaccatcagcgccaacgagctgacccagagcctggccgagcccaccgagcacggcggcagaaccgccaacgagaacaacacccccagccccgccgagcccaccgagaacagagagagaaccgccaacgagaacaagaagaccatctgcaccaagggcaagaacacccccgtgcccgagaagcccaccgagaacctgggcaacaccaccctgaccaccgagaccatcaaggcccccgtgaagagcaccgagaaccccgagaagaccgccgccgtgaccaagaccatcaagcccagcgtgaaggtgaccggcgacaagagcctgaccaccaccagcagccacctgaacaagaccgaggtgacccaccaggtgcccaccggcagcttcaccctgatcaccagcagaaccaagctgagcagcatcaccagcgaggccaccggcaacgagagccacccctacctgaacaaggacggcagccagaagggcatccacgccggccagatgggcgagaacgacagcttccccgcctgggccatcgtgatcgtggtgctggtggccgtgatcctgctgctggtgttcctgggcctgatcttcctggtgagctacatgatgagaaccagaagaaccctgacccagaacacccagtacaacgacgccgaggacgagggcggccccaacagctaccccgtgtacctgatggagcagcagaacctgggcatgggccagatccccagccccagatag

SEQ ID NO: 79153 - DNA, 1554 bp, synthetic construct; identical to SEQ ID NO: 79152
  misc_feature 1..1554: note = Description of Artificial Sequence: Synthetic coding sequence
  source 1..1554: mol_type = other DNA

SEQ ID NO: 79154 - DNA, 1554 bp, synthetic construct; identical to SEQ ID NO: 79152
  misc_feature 1..1554: note = Description of Artificial Sequence: Synthetic coding sequence
  source 1..1554: mol_type = other DNA

SEQ ID NO: 79155 - DNA, 4182 bp, synthetic construct
  misc_feature 1..4182: note = Description of Artificial Sequence: Synthetic coding sequence
  source 1..4182: mol_type = other DNA
atggcccagcccgtgcacagcctgtgcagcgccttcggcctgcagtgctgcctgctgttcctgctggccagctggggcgccggcgccaccaccttccaggagtaccagaagaccggcgagctgagcaccagcgaccacatcttccccctgacccccggcctggtgtacagcatccccttcgaccacatcgtgctgcacagcggccagagaccccccgagctgcccaagagcaccgagatccacgagcagaagagacactgcaacaccaccagacacagcaagcccaccgacaagcccaccggcaacagcaagaccatcgaccacaagagcagcaccgacaaccacgaggccccccccaccagcgaggagaacagcagcaaccagggcaaggaccccatgatcagaaaccagagaagcgtggaccccgccgacagcaccaccacccacaaggagagcgccggcaagaagcacatcacccccgcccccaagagcaagatcaactgcagaaagagcaccaccggcaagagcaccgtgaccagaaagagcgacaagaccggcagacccctggagaagagcatgagcaccctggacaagaccagcaccagcagccacaagaccaccaccagcttccacaacagcggcaacagccagaccaagcagaagagcaccagcttccccgagaagatcaccgccgccagcaagaccacctacaagaccaccggcacccccgaggagagcgagaagaccgaggacagcagaaccaccgtggccagcgacaagctgctgaccaagaccaccaagaacatccaggagaccatcagcgccaacgagctgacccagagcctggccgagcccaccgagcacggcggcagaaccgccaacgagaacaacacccccagccccgccgagcccaccgagaacagagagagaaccgccaacgagaacaccaccctgagccccgccgagcccaccgagaacagagagagaaccgccaacgagaacaccgcccccttccccgccggccccaccgagaacagagagatgaccgccaacgagaacaccaccctgttccccgccgagcccaccgagcacggcgagagaaccgccaacgagaacaccacccccagccccgccgagcccaccgagcacggcgagagaaccgccaacgagaacaccacccccagccccgccgagcccaccgagcacggcgagagaacccccttcgccaacgacaagaccaccagcagcagcgccgagagcaccgagcacggcgagagaacccccctggccaacgagaacaccacccccagccccgccgagcccaccgagaacagagagagaaccgccaacgagaacaccacccccagccccgccggccccaccgagaacagagagaccaccgccaacgagaagaccaccctgagccccgtggagcccaccgagaacagagagaccaccgccaacgagaagaccacccccagccccgccgagcccaccgagaacggccagagaacccccttcgccaacgagaagaccaccagcagcagcgccgagcccaccgagcacggcgagagaacccccctggccaacgagaacaccacccccagccccgccgagcccaccgagaacagagagagaaccgccaacgagaagaccacccccagccccgccgagcccaccgagaacggcgacagaacccccctggccaacgagaagaccacccccagcctggccgagcccaccgagaacggccagagaacccccttcgccaacgagaagaccaccagcagcagcgccgagcccaccgagcacgaggagagaacccccctggccaacgagaacaccacccccagccccgccgagcccaccgagaacagagagagaaccgccaacgagaacaccacccccagccccgccggccccaccgagaacagagagatgaccgccaacgagaagaccaccctgttccccgccgagcccaccgagaacagagagagaaccgccaacgagaagaccaccagcagccccgccgagcccaccgagaacggccagagaacccccttcgccaacgagaagaccaccagcagcagcgccgagcccaccgagcacggcgagagaacccccctggccaacgagaacaccaccctgagccccgccgagcccaccgagaacagagagagaaccgccaacgagaagaccacccccttccccgccgagcccaccgagaacagagagagaaccgccaacgagaacaccacccccagccccgcccagcccaccgagaacggcgacagaacccccctggccaacgagaagaccacccccagcctggccgagcccaccgagaacggcaagagaacccccttcgccaacgagaagaccaccagcagcagcgccgagcccaccgagcacgccgagagaacccccctggccaacgagaacaccaccagcagccccgccgagcccaccgagaacagagagagaaccgccaacgagaagaccacccagttccccgccgagcccaccgagaacagagagagcaccgccaacgagaagaccacccccttccccgccgagcccaccgagaacagagagtggaccgccaacgagaacaccaccctgagccccgccgagcccaccgagcacgaggagatgacccccctggccaacgagaagaccaccctgagccccgccgagcccaccgagaacggcgagagaacccccttcaccaacgagaagaccacccccagcagcgccgagcccaccgagcacggcgagagaacccccctggccaacgagatcaccacccccagcagagccgagcccaccgagcacggcgagagaatcgccaacgagaaggccacccccagccccgccaagcccaccgagcacggcgagaccaccgtgaacgaggacaccacccccagcagcgccgagcccaccgagaacggcgagagaacccccctggccaacgagaacaccaccaccagccccaccgagagcaccgagcacggcgagagaaccgccaacgagaagaccacccccagccccgccgagcccaccgagcacggcgagagaacccccagcgccaacgagaagaccatccccagccccgccaagcccaccgagcacgaggagatgacccccagcgccaacgagaacaccacccccagccccgtgaagcccaccgagcacggcgagaagaccaccctggccaacgagaagatcaccctgagccccgagggccccaccgagcacggcgccaagaccaccagcgccaacgagaagatcacccccagcctggccaagcccaccgagcacggcgagagaaccaccagccccaacgacaagatcaccagcagcgccgccgagagcaccgagcacagagacagagccaccagcgccaacgtgatcacccccgcccccgccgagcccatcaagcacgccaagagaaccaccctggcccacgagaagatgacccaggtgaccgagaagagcaccgagcaccccgagaagaccaccagcaccaccgagaagaccaccagaacccccgagaagcccaccctgtacagcgagaagaccatctgcaccaagggcaagaacacccccgtgcccgagaagcccaccgagaacctgggcaacaccaccctgaccaccgagaccatcaaggcccccgtgaagagcaccgagaaccccgagaagaccgccgccgtgaccaagaccatcaagcccagcgtgaaggtgaccggcgacaagagcctgaccaccaccagcagccacctgaacaagaccgaggtgacccaccaggtgcccaccggcagcttcaccctgatcaccagcagaaccaagctgagcagcatcaccagcgaggccaccggcaacgagagccacccctacctgaacaaggacggcagccagaagggcatccacgccggccagatgggcgagaacgacagcttccccgcctgggccatcgtgatcgtggtgctggtggccgtgatcctgctgctggtgttcctgggcctgatcttcctggtgagctacatgatgagaaccagaagaaccctgacccagaacacccagtacaacgacgccgaggacgagggcggccccaacagctaccccgtgtacctgatggagcagcagaacctgggcatgggccagatccccagccccagatag

SEQ ID NO: 79156 - DNA, 2670 bp, synthetic construct
  misc_feature 1..2670: note = Description of Artificial Sequence: Synthetic coding sequence
  source 1..2670: mol_type = other DNA
atggcccagcccgtgcacagcctgtgcagcgccttcggcctgcagtgctgcctgctgttcctgctggccagctggggcgccggcgccaccaccttccaggagtaccagaagaccggcgagctgagcaccagcgaccacatcttccccctgacccccggcctggtgtacagcatccccttcgaccacatcgtgctgcacagcggccagagaccccccgagctgcccaagagcaccgagatccacgagcagaagagacactgcaacaccaccagacacagcaagcccaccgacaagcccaccggcaacagcaagaccatcgaccacaagagcagcaccgacaaccacgaggccccccccaccagcgaggagaacagcagcaaccagggcaaggaccccatgatcagaaaccagagaagcgtggaccccgccgacagcaccaccacccacaaggagagcgccggcaagaagcacatcacccccgcccccaagagcaagatcaactgcagaaagagcaccaccggcaagagcaccgtgaccagaaagagcgacaagaccggcagacccctggagaagagcatgagcaccctggacaagaccagcaccagcagccacaagaccaccaccagcttccacaacagcggcaacagccagaccaagcagaagagcaccagcttccccgagaagatcaccgccgccagcaagaccacctacaagaccaccggcacccccgaggagagcgagaagaccgaggacagcagaaccaccgtggccagcgacaagctgctgaccaagaccaccaagaacatccaggagaccatcagcgccaacgagctgacccagagcctggccgagcccaccgagcacggcggcagaaccgccaacgagaacaacacccccagccccgccgagcccaccgagaacagagagagaaccgccaacgagaacaccaccctgagccccgccgagcccaccgagaacagagagagaaccgccaacgagaacaccgcccccttccccgccggccccaccgagaacagagagatgaccgccaacgagaacaccaccctgttccccgccgagcccaccgagcacggcgagagaaccgccaacgagaacaccacccccagccccgccgagcccaccgagcacggcgagagaaccgccaacgagaacaccacccccagccccgccgagcccaccgagcacggcgagagaacccccttcgccaacgacaagaccaccagcagcagcgccgagagcaccgagcacggcgagagaacccccctggccaacgagaacaccacccccagccccgccgagcccaccgagaacagagagagaaccgccaacgagaacaccacccccagccccgccggccccaccgagaacagagagaccaccgccaacgagaagaccaccctgagccccgtggagcccaccgagaacagagagaccaccgccaacgagaagaccacccccagccccgccgagcccaccgagaacggccagagaacccccttcgccaacgagaagaccaccagcagcagcgccgagcccaccgagcacggcgagagaacccccctggccaacgagaacaccacccccagccccgccgagcccaccgagaacagagagagaaccgccaacgagaagaccacccccagccccgccgagcccaccgagaacggcgacagaacccccctggccaacgagaagaccacccccagcctggccgagcccaccgagaacggccagagaacccccttcgccaacgagaagaccaccagcagcagcgccgagcccaccgagcacgaggagagaacccccctggccaacgagaacaccacccccagccccgccgagcccaccgagaacagagagagaaccgccaacgagaacaccacccccagccccgccggccccaccgagaacagagagatgaccgccaacgagaagaccaccctgttccccgccgagcccaccgagaacagagagagaaccgccaacgagaagaccaccagcagccccgccgagcccaccgagaacggccagagaacccccttcgccaacgagaagaccaccagcagcagcgccgagcccaccgagcacggcgagagaacccccctggccaacgagaacaccaccctgagccccgccggccccaccgagaacagagagagaaccgccaacgagaagaccacccccttccccgccgagcccaccgagaacagagagagaaccgccaacgagaacaccacccccagccccgcccagcccaccgagaacggcgacagaacccccctggccaacgagaagaccacccccagcctggccgagcccaccgagaacggcaagagaacccccttcgccaacgagaagaccaccagcagcagcgccgagcccaccgagcacgccgagagaacccccctggccaacgagaacaccaccagcagccccgccgagcccaccgagaacagagagagaaccgccaacgagaagaccacccagttccccgccgagcccaccgagaacagagagagcaccgccaacgagaagaccacccccttccccgccgagcccaccgagaacagagagtggaccgccaacgagaacaccaccctgagccccgccgagcccaccgagcacgaggagatgacccccctggcctag

SEQ ID NO: 79157 - DNA, 1653 bp, synthetic construct
  misc_feature 1..1653: note = Description of Artificial Sequence: Synthetic coding sequence
  source 1..1653: mol_type = other DNA
atggtgcccaaggccgacagcggcgccttcctgctgctgttcctgctggtgctgaccgtgaccgagcccctgagacccgagctgagatgcaaccccggccagttcgcctgcagaagcggcaccatccagtgcatccccctgccctggcagtgcgacggctgggccacctgcgaggacgagagcgacgaggccaactgccccgaggtgaccggcgaggtgagaccccaccacggcaaggaggccgtggaccccagacagggcagagccagaggcggcgaccccagccacttccacgccgtgaacgtggcccagcccgtgagattcagcagcttcctgggcaagtgccccaccggctggcaccactacgagggcaccgccagctgctacagagtgtacctgagcggcgagaactactgggacgccgcccagacctgccagagactgaacggcagcctggccaccttcagcaccgaccaggagctgagattcgtgctggcccaggagtgggaccagcccgagagaagcttcggctggaaggaccagagaaagctgtgggtgggctaccagtacgtgatcaccggcagaaacagaagcctggagggcagatgggaggtggccttcaagggcagcagcgaggtgttcctgccccccgaccccatcttcgccagcgccatgagcgagaacgacaacgtgttctgcgcccagctgcagtgcttccacttccccaccctgagacaccacgacctgcacagctggcacgccgagagctgctacgagaagagcagcttcctgtgcaagagaagccagacctgcgtggacatcaaggacaacgtggtggacgagggcttctacttcacccccaagggcgacgacccctgcctgagctgcacctgccacggcggcgagcccgagatgtgcgtggccgccctgtgcgagagaccccagggctgccagcagtacagaaaggaccccaaggagtgctgcaagttcatgtgcctggaccccgacggcaacagcctgttcgacagcatggccagcggcatgagactggtggtgagctgcatcagcagcttcctgatcctgagcctgctgctgttcatggtgcacagactgagacagagaagaagagagagaatcgagagcctgatcggcgccaacctgcaccacttcaacctgggcagaagaatccccggcttcgactacggccccgacggcttcggcaccggcctgacccccctgcacctgagcgacgacggcgagggcggcaccttccacttccacgaccccccccccccctacaccgcctacaagtaccccgacatcggccagcccgacgaccccccccccccctacgaggccagcatccaccccgacagcgtgttctacgaccccgccgacgacgacgccttcgagcccgtggaggtgagcctgcccgcccccggcgacggcggcagcgagggcgccctgctgagaagactggagcagcccctgcccaccgccggcgccagcctggccgacctggaggacagcgccgacagcagcagcgccctgctggtgccccccgaccccgcccagagcggcagcacccccgccgccgaggccctgcccggcggcggcagacacagcagaagcagcctgaacaccgtggtgtag

SEQ ID NO: 79158 - DNA, 984 bp, synthetic construct
  misc_feature 1..984: note = Description of Artificial Sequence: Synthetic coding sequence
  source 1..984: mol_type = other DNA
atggtgcccaaggccgacagcggcgccttcctgctgctgttcctgctggtgctgaccgtgaccgagcccctgagacccgagctgagatgcaaccccggccagttcgcctgcagaagcggcaccatccagtgcatccccctgccctggcagtgcgacggctgggccacctgcgaggacgagagcgacgaggccaactgccccgaggtgaccggcgaggtgagaccccaccacggcaaggaggccgtggaccccagacagggcagagccagaggcggcgaccccagccacttccacgccgtgaacgtggcccagcccgtgagattcagcagcttcctgggcaagtgccccaccggctggcaccactacgagggcaccgccagctgctacagagtgtacctgagcggcgagaactactgggacgccgcccagacctgccagagactgaacggcagcctggccaccttcagcaccgaccaggagctgagattcgtgctggcccaggagtgggaccagcccgagagaagcttcggctggaaggaccagagaaagctgtgggtgggctaccagtacgtgatcaccggcagaaacagaagcctggagggcagatgggaggtggccttcaagggcagcagcgaggtgttcctgccccccgaccccatcttcgccagcgccatgagcgagaacgacaacgtgttctgcgcccagctgcagtgcttccacttccccaccctgagacaccacgacctgcacagctggcacgccgagagctgctacgagaagagcagcttcctgtgcaagagaagccagacctgcgtggacatcaaggacaacgtggtggacgagggcttctacttcacccccaagggcgacgacccctgcctgagctgcacctgccacggcggcgagcccgagatgtgcgtggccgccctgtgcgagagaccccagggctgcagccccctgagctgcaccgccagagccacctag

SEQ ID NO: 79159 - DNA, 1530 bp, synthetic construct
  misc_feature 1..1530: note = Description of Artificial Sequence: Synthetic coding sequence
  source 1..1530: mol_type = other DNA
atggtgcccaaggccgacagcggcgccttcctgctgctgttcctgctggtgctgaccgtgaccgagcccctgagacccgaggtgaccggcgaggtgagaccccaccacggcaaggaggccgtggaccccagacagggcagagccagaggcggcgaccccagccacttccacgccgtgaacgtggcccagcccgtgagattcagcagcttcctgggcaagtgccccaccggctggcaccactacgagggcaccgccagctgctacagagtgtacctgagcggcgagaactactgggacgccgcccagacctgccagagactgaacggcagcctggccaccttcagcaccgaccaggagctgagattcgtgctggcccaggagtgggaccagcccgagagaagcttcggctggaaggaccagagaaagctgtgggtgggctaccagtacgtgatcaccggcagaaacagaagcctggagggcagatgggaggtggccttcaagggcagcagcgaggtgttcctgccccccgaccccatcttcgccagcgccatgagcgagaacgacaacgtgttctgcgcccagctgcagtgcttccacttccccaccctgagacaccacgacctgcacagctggcacgccgagagctgctacgagaagagcagcttcctgtgcaagagaagccagacctgcgtggacatcaaggacaacgtggtggacgagggcttctacttcacccccaagggcgacgacccctgcctgagctgcacctgccacggcggcgagcccgagatgtgcgtggccgccctgtgcgagagaccccagggctgccagcagtacagaaaggaccccaaggagtgctgcaagttcatgtgcctggaccccgacggcaacagcctgttcgacagcatggccagcggcatgagactggtggtgagctgcatcagcagcttcctgatcctgagcctgctgctgttcatggtgcacagactgagacagagaagaagagagagaatcgagagcctgatcggcgccaacctgcaccacttcaacctgggcagaagaatccccggcttcgactacggccccgacggcttcggcaccggcctgacccccctgcacctgagcgacgacggcgagggcggcaccttccacttccacgaccccccccccccctacaccgcctacaagtaccccgacatcggccagcccgacgaccccccccccccctacgaggccagcatccaccccgacagcgtgttctacgaccccgccgacgacgacgccttcgagcccgtggaggtgagcctgcccgcccccggcgacggcggcagcgagggcgccctgctgagaagactggagcagcccctgcccaccgccggcgccagcctggccgacctggaggacagcgccgacagcagcagcgccctgctggtgccccccgaccccgcccagagcggcagcacccccgccgccgaggccctgcccggcggcggcagacacagcagaagcagcctgaacaccgtggtgtag

SEQ ID NO: 79160 - DNA, 810 bp, synthetic construct
  misc_feature 1..810: note = Description of Artificial Sequence: Synthetic coding sequence
  source 1..810: mol_type = other DNA
atggtgcccaaggccgacagcggcgccttcctgctgctgttcctgctggtgctgaccgtgaccgagcccctgagacccgagctgagatgcaaccccggccagttcgcctgcagaagcggcaccatccagtgcatccccctgccctggcagtgcgacggctgggccacctgcgaggacgagagcgacgaggccaactgccccgaggtgaccggcgaggtgagaccccaccacggcaaggaggccgtggaccccagacagggcagagccagaggcggcgaccccagccacttccacgccgtgaacgtggcccagcccgtgagattcagcagaaagtgccccaccggctggcaccactacgagggcaccgccagctgctacagagtgtacctgagcggcgagaactactgggacgccgcccagacctgccagagactgaacggcagcctggccaccttcagcaccgaccaggagctgagattcgtgctggcccaggagtgggaccagcccgagagaagcttcggctggaaggaccagagaaagctgtgggtgggctaccagtacgtgatcaccggcagaaacagaagcctggagggcagatgggaggtggccttcaaggactggggcgtgagcgacaccatggtgcacagaagactgctgtgcccctgcgtgggcaccctgcacacccacctgaagctgggcgccagattcagaagagtgcccgtgagactgggcggcgccctgagcagaagaagccccagacccacccccgcctgcgagcccagactgggcgccaagaccctgcaggtgtag

SEQ ID NO: 79161 - DNA, 663 bp, synthetic construct
  misc_feature 1..663: note = Description of Artificial Sequence: Synthetic coding sequence
  source 1..663: mol_type = other DNA
atggagagatacgccggcgccctggaggaggtggccgacggcgccagacagcaggagagacactaccagctgctgagcgccctgcagagcctggtgaaggagctgcccagcagcttccagcagagactgagctacaccaccctgagcgacctggccctggccctgctggacggcaccgtgttcgagatcgtgcagggcctgctggagatccagcacctgaccgagaagagcctgtacaaccagagactgagactgcagaacgagcacagagtgctgagacaggccctgagacagaagcaccaggaggcccagcaggcctgcagaccccacaacctgcccgtgctgcaggccgcccagcagagagagctggaggccgtggagcacagaatcagagaggagcagagagccatggaccagaagatcgtgctggagctggacagaaaggtggccgaccagcagagcaccctggagaaggccggcgtggccggcttctacgtgaccaccaacccccaggagctgatgctgcagatgaacctgctggagctgatcagaaagctgcagcagagaggctgctgggccggcaaggccgccctgggcctgggcggcccctggcagctgcccgccgcccagtgcgaccagaagggcagccccgtgcccccctag

SEQ ID NO: 79162 - DNA, 663 bp, synthetic construct
  misc_feature 1..663: note = Description of Artificial Sequence: Synthetic coding sequence
  source 1..663: mol_type = other DNA
atggagagatacgccgccgccctggaggaggtggccgacggcgccagacagcaggagagacactaccagctgctgagcgccctgcagagcctggtgaaggagctgcccagcagcttccagcagagactgagctacaccaccctgagcgacctggccctggccctgctggacggcaccgtgttcgagatcgtgcagggcctgctggagatccagcacctgaccgagaagagcctgtacaaccagagactgagactgcagaacgagcacagagtgctgagacaggccctgagacagaagcaccaggaggcccagcaggcctgcagaccccacaacctgcccgtggtgcaggccgcccagcagagagagctggaggccgtggagcacagaatcagagaggagcagagagccatggaccagaagatcatcctggagctggacagaaaggtggccgaccagcagagcaccctggagaaggccggcgtggccggcttctacgtgaccaccaacccccaggagctgatgctgcagatgaacctgctggagctgatcagaaagctgcagcagagaggctgcagagccggcaacgccgccctgggcctgggcggcccctggcagagccccgccgcccagtgcgaccagaagggcagccccgtgcccccctag

SEQ ID NO: 79163 - DNA, 2322 bp, synthetic construct
  misc_feature 1..2322: note = Description of Artificial Sequence: Synthetic coding sequence
  source 1..2322: mol_type = other DNA
atggagaccgacgagagccccagccccctgccctgcggccccgccggcgaggccgtgatggagagcagagccagacccttccaggccctgcccagagagcagagcccccccccccccctgcagaccagcagcggcgccgaggtgatggacgtgggcagcggcggcgacggccagagcgagctgcccgccgaggaccccttcaacttctacggcgccagcctgctgagcaagggcagcttcagcaagggcagactgctgatcgaccccaactgcagcggccacagccccagaaccgccagacacgcccccgccgtgagaaagttcagccccgacctgaagctgctgaaggacgtgaagatcagcgtgagcttcaccgagagctgcagaagcaaggacagaaaggtgctgtacaccggcgccgagagagacgtgagagccgagtgcggcctgctgctgagccccgtgagcggcgacgtgcacgcctgccccttcggcggcagcgtgggcgacggcgtgggcatcggcggcgagagcgccgacaagaaggacgaggagaacgagctggaccaggagaagagagtggagtacgccgtgctggacgagctggaggacttcaccgacaacctggagctggacgaggagggcgccggcggcttcaccgccaaggccatcgtgcagagagacagagtggacgaggaggccctgaacttcccctacgaggacgacttcgacaacgacgtggacgccctgctggaggagggcctgtgcgcccccaagaagagaagaaccgaggagaagtacggcggcgacagcgaccaccccagcgacggcgagaccagcgtgcagcccatgatgaccaagatcaagaccgtgctgaagagcagaggcagaccccccaccgagcccctgcccgacggctggatcatgaccttccacaacagcggcgtgcccgtgtacctgcacagagagagcagagtggtgacctggagcagaccctacttcctgggcaccggcagcatcagaaagcacgacccccccctgagcagcatcccctgcctgcactacaagaagatgaaggacaacgaggagagagagcagagcagcgacctgacccccagcggcgacgtgagccccgtgaagcccctgagcagaagcgccgagctggagttccccctggacgagcccgacagcatgggcgccgaccccggcccccccgacgagaaggaccccctgggcgccgaggccgcccccggcgccctgggccaggtgaaggccaaggtggaggtgtgcaaggacgagagcgtggacctggaggagttcagaagctacctggagaagagattcgacttcgagcaggtgaccgtgaagaagttcagaacctgggccgagagaagacagttcaacagagagatgaagagaaagcaggccgagagcgagagacccatcctgcccgccaaccagaagctgatcaccctgagcgtgcaggacgcccccaccaagaaggagttcgtgatcaaccccaacggcaagagcgaggtgtgcatcctgcacgagtacatgcagagagtgctgaaggtgagacccgtgtacaacttcttcgagtgcgagaaccccagcgagcccttcggcgccagcgtgaccatcgacggcgtgacctacggcagcggcaccgccagcagcaagaagctggccaagaacaaggccgccagagccaccctggagatcctgatccccgacttcgtgaagcagaccagcgaggagaagcccaaggacagcgaggagctggagtacttcaaccacatcagcatcgaggacagcagagtgtacgagctgaccagcaaggccggcctgctgagcccctaccagatcctgcacgagtgcctgaagagaaaccacggcatgggcgacaccagcatcaagttcgaggtggtgcccggcaagaaccagaagagcgagtacgtgatggcctgcggcaagcacaccgtgagaggctggtgcaagaacaagagagtgggcaagcagctggccagccagaagatcctgcagctgctgcacccccacgtgaagaactggggcagcctgctgagaatgtacggcagagagagcagcaagatggtgaagcaggagaccagcgacaagagcgtgatcgagctgcagcagtacgccaagaagaacaagcccaacctgcacatcctgagcaagctgcaggaggagatgaagagactggccgaggagagagaggagaccagaaagaagcccaagatgagcatcgtggccagcgcccagcccggcggcgagcccctgtgcaccgtggacgtgtag

SEQ ID NO: 79164 - DNA, 2223 bp, synthetic construct
  misc_feature 1..2223: note = Description of Artificial Sequence: Synthetic coding sequence
  source 1..2223: mol_type = other DNA
atggagaccgacgagagccccagccccctgccctgcggccccgccggcgaggccgtgatggagagcagagccagacccttccaggccctgcccagagagcagagcccccccccccccctgcagaccagcagcggcgccgaggtgatggacgtgggcagcggcggcgacggccagagcgagctgcccgccgaggaccccttcaacttctacggcgccagcctgctgagcaagggcagcttcagcaagggcagactgctgatcgaccccaactgcagcggccacagccccagaaccgccagacacgcccccgccgtgagaaagttcagccccgacctgaagctgctgaaggacgtgaagatcagcgtgagcttcaccgagagctgcagaagcaaggacagaaaggtgctgtacaccggcgccgagagagacgtgagagccgagtgcggcctgctgctgagccccgtgagcggcgacgtgcacgcctgccccttcggcggcagcgtgggcgacggcgtgggcatcggcggcgagagcgccgacaagaaggacgaggagaacgagctggaccaggagaagagagtggagtacgccgtgctggacgagctggaggacttcaccgacaacctggagctggacgaggagggcgccggcggcttcaccgccaaggccatcgtgcagagagacagagtggacgaggaggccctgaacttcccctacgaggacgacttcgacaacgacgtggacgccctgctggaggagggcctgtgcgcccccaagaagagaagaaccgaggagaagtacggcggcgacagcgaccaccccagcgacggcgagaccagcgtgcagcccatgatgaccaagatcaagaccgtgctgaagagcagaggcagaccccccaccgagcccctgcccgacggctggatcatgaccttccacaacagcggcgtgcccgtgtacctgcacagagagagcagagtggtgacctggagcagaccctacttcctgggcaccggcagcatcagaaagcacgacccccccctgagcagcatcccctgcctgcactacaagaagatgaaggacaacgaggagagagagcagagcagcgacctgacccccagcggcgacgtgagccccgtgaagcccctgagcagaagcgccgagctggagttccccctggacgagcccgacagcatgggcgccgaccccggcccccccgacgagaaggaccccctgggcgccgaggccgcccccggcgccctgggccaggtgaaggccaaggtggaggtgtgcaaggacgagagcgtggacctggaggagttcagaagctacctggagaagagattcgacttcgagcaggtgaccgtgaagaagttcagaacctgggccgagagaagacagttcaacagagagatgaagagaaagcaggccgagagcgagagacccatcctgcccgccaaccagaagctgatcaccctgagcgtgcaggacgcccccaccaagaaggagttcgtgatcaaccccaacggcaagagcgaggtgtgcatcctgcacgagtacatgcagagagtgctgaaggtgagacccgtgtacaacttcttcgagtgcgccagagccaccctggagatcctgatccccgacttcgtgaagcagaccagcgaggagaagcccaaggacagcgaggagctggagtacttcaaccacatcagcatcgaggacagcagagtgtacgagctgaccagcaaggccggcctgctgagcccctaccagatcctgcacgagtgcctgaagagaaaccacggcatgggcgacaccagcatcaagttcgaggtggtgcccggcaagaaccagaagagcgagtacgtgatggcctgcggcaagcacaccgtgagaggctggtgcaagaacaagagagtgggcaagcagctggccagccagaagatcctgcagctgctgcacccccacgtgaagaactggggcagcctgctgagaatgtacggcagagagagcagcaagatggtgaagcaggagaccagcgacaagagcgtgatcgagctgcagcagtacgccaagaagaacaagcccaacctgcacatcctgagcaagctgcaggaggagatgaagagactggccgaggagagagaggagaccagaaagaagcccaagatgagcatcgtggccagcgcccagcccggcggcgagcccctgtgcaccgtggacgtgtag

SEQ ID NO: 79165 - DNA, 2223 bp, synthetic construct; identical to SEQ ID NO: 79164
  misc_feature 1..2223: note = Description of Artificial Sequence: Synthetic coding sequence
  source 1..2223: mol_type = other DNA

SEQ ID NO: 79166 - DNA, 378 bp, synthetic construct
  misc_feature 1..378: note = Description of Artificial Sequence: Synthetic coding sequence
  source 1..378: mol_type = other DNA
atggagaccgacgagagccccagccccctgccctgcggccccgccggcgaggccgtgatggagagcagagccagacccttccaggccctgcccagagagcagagcccccccccccccctgcagaccagcagcggcgccgaggtgatggacgtgggcagcggcggcgacggccagagcgagctgcccgccgaggaccccttcaacttctacggcgccagcctgctgagcaagggcagcttcagcaagggcagactgctgatcgaccccaactgcagcggccacagccccagaaccgccagacacgcccccgccgtgagaaagttcagccccgacctgaagctgctgaaggacgtgaagatcagcgtgagcttcacctag

SEQ ID NO: 79167 - DNA, 564 bp, synthetic construct
  misc_feature 1..564: note = Description of Artificial Sequence: Synthetic coding sequence
  source 1..564: mol_type = other DNA
atggtgggcagcctgaactgcatcgtggccgtgagccagaacatgggcatcggcaagaacggcgacctgccctggccccccctgagaaacgagttcagatacttccagagaatgaccaccaccagcagcgtggagggcaagcagaacctggtgatcatgggcaagaagacctggttcagcatccccgagaagaacagacccctgaagggcagaatcaacctggtgctgagcagagagctgaaggagcccccccagggcgcccacttcctgagcagaagcctggacgacgccctgaagctgaccgagcagcccgagctggccaacaaggtggacatggtgtggatcgtgggcggcagcagcgtgtacaaggaggccatgaaccaccccggccacctgaagctgttcgtgaccagaatcatgcaggacttcgagagcgacaccttcttccccgagatcgacctggagaagtacaagctgctgcccgagtaccccggcgtgctgagcgacgtgcaggaggagaagggcatcaagtacaagttcgaggtgtacgagaagaacgactag

SEQ ID NO: 79168 - DNA, 564 bp, synthetic construct; identical to SEQ ID NO: 79167
  misc_feature 1..564: note = Description of Artificial Sequence: Synthetic coding sequence
  source 1..564: mol_type = other DNA

SEQ ID NO: 79169 - DNA, 963 bp, synthetic construct
  misc_feature 1..963: note = Description of Artificial Sequence: Synthetic coding sequence
  source 1..963: mol_type = other DNA
atggccgccgtgagaatgctgagaacctggagcagaaacgccggcaagctgatctgcgtgagatacttccagacctgcggcaacgtgcacgtgctgaagcccaactacgtgtgcttcttcggctaccccagcttcaagtacagccacccccaccacttcctgaagaccaccgccgccctgagaggccaggtggtgcagttcaagctgagcgacatcggcgagggcatcagagaggtgaccgtgaaggagtggtacgtgaaggagggcgacaccgtgagccagttcgacagcatctgcgaggtgcagagcgacaaggccagcgtgaccatcaccagcagatacgacggcgtgatcaagaagctgtactacaacctggacgacatcgcctacgtgggcaagcccctggtggacatcgagaccgaggccctgaaggacagcgaggaggacgtggtggagacccccgccgtgagccacgacgagcacacccaccaggagatcaagggcagaaagaccctggccacccccgccgtgagaagactggccatggagaacaacatcaagctgagcgaggtggtgggcagcggcaaggacggcagaatcctgaaggaggacatcctgaactacctggagaagcagaccggcgccatcctgccccccagccccaaggtggagatcatgccccccccccccaagcccaaggacatgaccgtgcccatcctggtgagcaagccccccgtgttcaccggcaaggacaagaccgagcccatcaagggcttccagaaggccatggtgaagaccatgagcgccgccctgaagatcccccacttcggctactgcgacgagatcgacctgaccgagctggtgaagctgagagaggagctgaagcccatcgccttcgccagaggcatcaagctgagcttcatgcccttcttcctgaagtactacttcagctggaagagctag

SEQ ID NO: 79170 - DNA, 1449 bp, synthetic construct
  misc_feature 1..1449: note = Description of Artificial Sequence: Synthetic coding sequence
  source 1..1449: mol_type = other DNA
atggccgccgtgagaatgctgagaacctggagcagaaacgccggcaagctgatctgcgtgagatacttccagacctgcggcaacgtgcacgtgctgaagcccaactacgtgtgcttcttcggctaccccagcttcaagtacagccacccccaccacttcctgaagaccaccgccgccctgagaggccaggtggtgcagttcaagctgagcgacatcggcgagggcatcagagaggtgaccgtgaaggagtggtacgtgaaggagggcgacaccgtgagccagttcgacagcatctgcgaggtgcagagcgacaaggccagcgtgaccatcaccagcagatacgacggcgtgatcaagaagctgtactacaacctggacgacatcgcctacgtgggcaagcccctggtggacatcgagaccgaggccctgaaggacagcgaggaggacgtggtggagacccccgccgtgagccacgacgagcacacccaccaggagatcaagggcagaaagaccctggccacccccgccgtgagaagactggccatggagaacaacatcaagctgagcgaggtggtgggcagcggcaaggacggcagaatcctgaaggaggacatcctgaactacctggagaagcagaccggcgccatcctgccccccagccccaaggtggagatcatgccccccccccccaagcccaaggacatgaccgtgcccatcctggtgagcaagccccccgtgttcaccggcaaggacaagaccgagcccatcaagggcttccagaaggccatggtgaagaccatgagcgccgccctgaagatcccccacttcggctactgcgacgagatcgacctgaccgagctggtgaagctgagagaggagctgaagcccatcgccttcgccagaggcatcaagctgagcttcatgcccttcttcctgaaggccgccagcctgggcctgctgcagttccccatcctgaacgccagcgtggacgagaactgccagaacatcacctacaaggccagccacaacatcggcatcgccatggacaccgagcagggcctgatcgtgcccaacgtgaagaacgtgcagatctgcagcatcttcgacatcgccaccgagctgaacagactgcagaagctgggcagcgtgagccagctgagcaccaccgacctgaccggcggcaccttcaccctgagcaacatcggcagcatcggcggcaccttcgccaagcccgtgatcatgccccccgaggtggccatcggcgccctgggcagcatcaaggccatccccagattcaaccagaagggcgaggtgtacaaggcccagatcatgaacgtgagctggagcgccgaccacagagtgatcgacggcgccaccatgagcagattcagcaacctgtggaagagctacctggagaaccccgccttcatgctgctggacctgaagtag

SEQ ID NO: 79171 - DNA, 906 bp, synthetic construct
  misc_feature 1..906: note = Description of Artificial Sequence: Synthetic coding sequence
  source 1..906: mol_type = other DNA
atggagaacaacatcaagctgagcgaggtggtgggcagcggcaaggacggcagaatcctgaaggaggacatcctgaactacctggagaagcagaccggcgccatcctgccccccagccccaaggtggagatcatgccccccccccccaagcccaaggacatgaccgtgcccatcctggtgagcaagccccccgtgttcaccggcaaggacaagaccgagcccatcaagggcttccagaaggccatggtgaagaccatgagcgccgccctgaagatcccccacttcggctactgcgacgagatcgacctgaccgagctggtgaagctgagagaggagctgaagcccatcgccttcgccagaggcatcaagctgagcttcatgcccttcttcctgaaggccgccagcctgggcctgctgcagttccccatcctgaacgccagcgtggacgagaactgccagaacatcacctacaaggccagccacaacatcggcatcgccatggacaccgagcagggcctgatcgtgcccaacgtgaagaacgtgcagatctgcagcatcttcgacatcgccaccgagctgaacagactgcagaagctgggcagcgtgagccagctgagcaccaccgacctgaccggcggcaccttcaccctgagcaacatcggcagcatcggcggcaccttcgccaagcccgtgatcatgccccccgaggtggccatcggcgccctgggcagcatcaaggccatccccagattcaaccagaagggcgaggtgtacaaggcccagatcatgaacgtgagctggagcgccgaccacagagtgatcgacggcgccaccatgagcagattcagcaacctgtggaagagctacctggagaaccccgccttcatgctgctggacctgaagtag

SEQ ID NO: 79172 - DNA, 5286 bp, synthetic construct
  misc_feature 1..5286: note = Description of Artificial Sequence: Synthetic coding sequence
  source 1..5286: mol_type = other DNA
atgcagttccagctgaccctgttcctgcacctgggctggctgagctacagcaaggcccaggacgactgcaacagaggcgcctgccaccccaccaccggcgacctgctggtgggcagaaacacccagctgatggccagcagcacctgcggcctgagcagagcccagaagtactgcatcctgagctacctggagggcgagcagaagtgcttcatctgcgacagcagattcccctacgacccctacgaccagcccaacagccacaccatcgagaacgtgatcgtgagcttcgagcccgacagagagaagaagtggtggcagagcgagaacggcctggaccacgtgagcatcagactggacctggaggccctgttcagattcagccacctgatcctgaccttcaagaccttcagacccgccgccatgctggtggagagaagcaccgactacggccacaactggaaggtgttcaagtacttcgccaaggactgcgccaccagcttccccaacatcaccagcggccaggcccagggcgtgggcgacatcgtgtgcgacagcaagtacagcgacatcgagcccagcaccggcggcgaggtggtgctgaaggtgctggaccccagcttcgagatcgagaacccctacagcccctacatccaggacctggtgaccctgaccaacctgagaatcaacttcaccaagctgcacaccctgggcgacgccctgctgggcagaagacagaacgacagcctggacaagtactactacgccctgtacgagatgatcgtgagaggcagctgcttctgcaacggccacgccagcgagtgcagacccatgcagaagatgagaggcgacgtgttcagcccccccggcatggtgcacggccagtgcgtgtgccagcacaacaccgacggccccaactgcgagagatgcaaggacttcttccaggacgccccctggagacccgccgccgacctgcaggacaacgcctgcagaagctgcagctgcaacagccacagcagcagatgccacttcgacatgaccacctacctggccagcggcggcctgagcggcggcgtgtgcgaggactgccagcacaacaccgagggccagcactgcgacagatgcagacccctgttctacagagaccccctgaagaccatcagcgacccctacgcctgcatcccctgcgagtgcgaccccgacggcaccatcagcggcggcatctgcgtgagccacagcgaccccgccctgggcagcgtggccggccagtgcctgtgcaaggagaacgtggagggcgccaagtgcgaccagtgcaagcccaaccactacggcctgagcgccaccgaccccctgggctgccagccctgcgactgcaaccccctgggcagcctgcccttcctgacctgcgacgtggacaccggccagtgcctgtgcctgagctacgtgaccggcgcccactgcgaggagtgcaccgtgggctactggggcctgggcaaccacctgcacggctgcagcccctgcgactgcgacatcggcggcgcctacagcaacgtgtgcagccccaagaacggccagtgcgagtgcagaccccacgtgaccggcagaagctgcagcgagcccgcccccggctacttcttcgcccccctgaacttctacctgtacgaggccgaggaggccaccaccctgcagggcctggcccccctgggcagcgagaccttcggccagagccccgccgtgcacgtggtgctgggcgagcccgtgcccggcaaccccgtgacctggaccggccccggcttcgccagagtgctgcccggcgccggcctgagattcgccgtgaacaacatccccttccccgtggacttcaccatcgccatccactacgagacccagagcgccgccgactggaccgtgcagatcgtggtgaacccccccggcggcagcgagcactgcatccccaagaccctgcagagcaagccccagagcttcgccctgcccgccgccaccagaatcatgctgctgcccacccccatctgcctggagcccgacgtgcagtacagcatcgacgtgtacttcagccagcccctgcagggcgagagccacgcccacagccacgtgctggtggacagcctgggcctgatcccccagatcaacagcctggagaacttctgcagcaagcaggacctggacgagtaccagctgcacaactgcgtggagatcgccagcgccatgggcccccaggtgctgcccggcgcctgcgagagactgatcatcagcatgagcgccaagctgcacgacggcgccgtggcctgcaagtgccacccccagggcagcgtgggcagcagctgcagcagactgggcggccagtgccagtgcaagcccctggtggtgggcagatgctgcgacagatgcagcaccggcagctacgacctgggccaccacggctgccacccctgccactgccacccccagggcagcaaggacaccgtgtgcgaccaggtgaccggccagtgcccctgccacggcgaggtgagcggcagaagatgcgacagatgcctggccggctacttcggcttccccagctgccacccctgcccctgcaacagattcgccgagctgtgcgaccccgagaccggcagctgcttcaactgcggcggcttcaccaccggcagaaactgcgagagatgcatcgacggctactacggcaaccccagcagcggccagccctgcagaccctgcctgtgccccgacgaccccagcagcaaccagtacttcgcccacagctgctaccagaacctgtggagcagcgacgtgatctgcaactgcctgcagggctacaccggcacccagtgcggcgagtgcagcaccggcttctacggcaaccccagaatcagcggcgccccctgccagccctgcgcctgcaacaacaacatcgacgtgaccgaccccgagagctgcagcagagtgaccggcgagtgcctgagatgcctgcacaacacccagggcgccaactgccagctgtgcaagcccggccactacggcagcgccctgaaccagacctgcagaagatgcagctgccacgccagcggcgtgagccccatggagtgcccccccggcggcggcgcctgcctgtgcgaccccgtgaccggcgcctgcccctgcctgcccaacgtgaccggcctggcctgcgacagatgcgccgacggctactggaacctggtgcccggcagaggctgccagagctgcgactgcgaccccagaaccagccagagcagccactgcgaccagctgaccggccagtgcccctgcaagctgggctacggcggcaagagatgcagcgagtgccaggagaactactacggcgacccccccggcagatgcatcccctgcgactgcaacagagccggcacccagaagcccatctgcgaccccgacaccggcatgtgcagatgcagagagggcgtgagcggccagagatgcgacagatgcgccagaggccacagccaggagttccccacctgcctgcagtgccacctgtgcttcgaccagtgggaccacaccatcagcagcctgagcaaggccgtgcagggcctgatgagactggccgccaacatggaggacaagagagagaccctgcccgtgtgcgaggccgacttcaaggacctgagaggcaacgtgagcgagatcgagagaatcctgaagcaccccgtgttccccagcggcaagttcctgaaggtgaaggactaccacgacagcgtgagaagacagatcatgcagctgaacgagcagctgaaggccgtgtacgagttccaggacctgaaggacaccatcgagagagccaagaacgaggccgacctgctgctggaggacctgcaggaggagatcgacctgcagagcagcgtgctgaacgccagcatcgccgacagcagcgagaacatcaagaagtactaccacatcagcagcagcgccgagaagaagatcaacgagaccagcagcaccatcaacaccagcgccaacaccagaaacgacctgctgaccatcctggacaccctgaccagcaagggcaacctgagcctggagagactgaagcagatcaagatccccgacatccagatcctgaacgagaaggtgtgcggcgaccccggcaacgtgccctgcgtgcccctgccctgcggcggcgccctgtgcaccggcagaaagggccacagaaagtgcagaggccccggctgccacggcagcctgaccctgagcaccaacgccctgcagaaggcccaggaggccaagagcatcatcagaaacctggacaagcaggtgagaggcctgaagaaccagatcgagagcatcagcgagcaggccgaggtgagcaagaacaacgccctgcagctgagagagaagctgggcaacatcagaaaccagagcgacagcgaggaggagaacatcaacctgttcatcaagaaggtgaagaacttcctgctggaggagaacgtgccccccgaggacatcgagaaggtggccaacggcgtgctggacatccacctgcccatccccagccagaacctgaccgacgagctggtgaagatccagaagcacatgcagctgtgcgaggactacagaaccgacgagaacagactgaacgaggaggccgacggcgcccagaagctgctggtgaaggccaaggccgccgagaaggccgccaacatcctgctgaacctggacaagaccctgaaccagctgcagcaggcccagatcacccagggcagagccaacagcaccatcacccagctgaccgccaacatcaccaagatcaagaagaacgtgctgcaggccgagaaccagaccagagagatgaagagcgagctggagctggccaagcagagaagcggcctggaggacggcctgagcctgctgcagaccaagctgcagagacaccaggaccacgccgtgaacgccaaggtgcaggccgagagcgcccagcaccaggccggcagcctggagaaggagttcgtggagctgaagaagcagtacgccatcctgcagagaaagaccagcaccaccggcctgaccaaggagaccctgggcaaggtgaagcagctgaaggacgccgccgagaagctggccggcgacaccgaggccaagatcagaagaatcaccgacctggagagaaagatccaggacctgaacctgagcagacaggccaaggccgaccagctgagaatcctggaggaccaggtggtggccatcaagaacgagatcgtggagcaggagaagaagtacgccagatgctacagctag

SEQ ID NO: 79173 - DNA, 1530 bp, synthetic construct; identical to SEQ ID NO: 73834
  misc_feature 1..1530: note = Description of Artificial Sequence: Synthetic coding sequence
  source 1..1530: mol_type = other DNA

SEQ ID NO: 79174 - DNA, 1386 bp, synthetic construct
  misc_feature 1..1386: note = Description of Artificial Sequence: Synthetic coding sequence
  source 1..1386: mol_type = other DNA
atgcagagctggagcagagtgtactgcagcctggccaagagaggccacttcaacagaatcagccacggcctgcagggcctgagcgccgtgcccctgagaacctacgccgaccagcccatcgacgccgacgtgaccgtgatcggcagcggccccggcggctacgtggccgccatcaaggccgcccagctgggcttcaagaccgtgtgcatcgagaagaacgagaccctgggcggcacctgcctgaacgtgggctgcatccccagcaaggccctgctgaacaacagccactactaccacatggcccacggcaaggacttcgccagcagaggcatcgagatgagcgaggtgagactgaacctggacaagatgatggagcagaagagcaccgccgtgaaggccctgaccggcggcatcgcccacctgttcaagcagaacaagatcgacgaggacaccatcgtgagcagcaccggcgccctgagcctgaagaaggtgcccgagaagatggtggtgatcggcgccggcgtgatcggcgtggagctgggcagcgtgtggcagagactgggcgccgacgtgaccgccgtggagttcctgggccacgtgggcggcgtgggcatcgacatggagatcagcaagaacttccagagaatcctgcagaagcagggcttcaagttcaagctgaacaccaaggtgaccggcgccaccaagaagagcgacggcaagatcgacgtgagcatcgaggccgccagcggcggcaaggccgaggtgatcacctgcgacgtgctgctggtgtgcatcggcagaagacccttcaccaagaacctgggcctggaggagctgggcatcgagctggaccccagaggcagaatccccgtgaacaccagattccagaccaagatccccaacatctacgccatcggcgacgtggtggccggccccatgctggcccacaaggccgaggacgagggcatcatctgcgtggagggcatggccggcggcgccgtgcacatcgactacaactgcgtgcccagcgtgatctacacccaccccgaggtggcctgggtgggcaagagcgaggagcagctgaaggaggagggcatcgagtacaaggtgggcaagttccccttcgccgccaacagcagagccaagaccaacgccgacaccgacggcatggtgaagatcctgggccagaagagcaccgacagagtgctgggcgcccacatcctgggccccggcgccggcgagatggtgaacgaggccgccctggccctggagtacggcgccagctgcgaggacatcgccagagtgtgccacgcccaccccaccctgagcgaggccttcagagaggccaacctggccgccagcttcggcaagagcatcaacttctag

SEQ ID NO: 79175 - DNA, 1461 bp, synthetic construct
  misc_feature 1..1461: note = Description of Artificial Sequence: Synthetic coding sequence
  source 1..1461: mol_type = other DNA
atgcagagctggagcagagtgtactgcagcctggccaagagaggccacttcaacagaatcagccacggcctgcagggcctgagcgccgtgcccctgagaacctacgccgaccagcccatcgacgccgacgtgaccgtgatcggcagcggccccggcggctacgtggccgccatcaaggccgcccagctgggcttcaaggccctgctgaacaacagccactactaccacatggcccacggcaaggacttcgccagcagaggcatcgagatgagcgaggtgagactgaacctggacaagatgatggagcagaagagcaccgccgtgaaggccctgaccggcggcatcgcccacctgttcaagcagaacaaggtggtgcacgtgaacggctacggcaagatcaccggcaagaaccaggtgaccgccaccaaggccgacggcggcacccaggtgatcgacaccaagaacatcctgatcgccaccggcagcgaggtgacccccttccccggcatcaccatcgacgaggacaccatcgtgagcagcaccggcgccctgagcctgaagaaggtgcccgagaagatggtggtgatcggcgccggcgtgatcggcgtggagctgggcagcgtgtggcagagactgggcgccgacgtgaccgccgtggagttcctgggccacgtgggcggcgtgggcatcgacatggagatcagcaagaacttccagagaatcctgcagaagcagggcttcaagttcaagctgaacaccaaggtgaccggcgccaccaagaagagcgacggcaagatcgacgtgagcatcgaggccgccagcggcggcaaggccgaggtgatcacctgcgacgtgctgctggtgtgcatcggcagaagacccttcaccaagaacctgggcctggaggagctgggcatcgagctggaccccagaggcagaatccccgtgaacaccagattccagaccaagatccccaacatctacgccatcggcgacgtggtggccggccccatgctggcccacaaggccgaggacgagggcatcatctgcgtggagggcatggccggcggcgccgtgcacatcgactacaactgcgtgcccagcgtgatctacacccaccccgaggtggcctgggtgggcaagagcgaggagcagctgaaggaggagggcatcgagtacaaggtgggcaagttccccttcgccgccaacagcagagccaagaccaacgccgacaccgacggcatggtgaagatcctgggccagaagagcaccgacagagtgctgggcgcccacatcctgggccccggcgccggcgagatggtgaacgaggccgccctggccctggagtacggcgccagctgcgaggacatcgccagagtgtgccacgcccaccccaccctgagcgaggccttcagagaggccaacctggccgccagcttcggcaagagcatcaacttctag

SEQ ID NO: 79176 - DNA, 1233 bp, synthetic construct
  misc_feature 1..1233: note = Description of Artificial Sequence: Synthetic coding sequence
  source 1..1233: mol_type = other DNA
atggcccacggcaaggacttcgccagcagaggcatcgagatgagcgaggtgagactgaacctggacaagatgatggagcagaagagcaccgccgtgaaggccctgaccggcggcatcgcccacctgttcaagcagaacaaggtggtgcacgtgaacggctacggcaagatcaccggcaagaaccaggtgaccgccaccaaggccgacggcggcacccaggtgatcgacaccaagaacatcctgatcgccaccggcagcgaggtgacccccttccccggcatcaccatcgacgaggacaccatcgtgagcagcaccggcgccctgagcctgaagaaggtgcccgagaagatggtggtgatcggcgccggcgtgatcggcgtggagctgggcagcgtgtggcagagactgggcgccgacgtgaccgccgtggagttcctgggccacgtgggcggcgtgggcatcgacatggagatcagcaagaacttccagagaatcctgcagaagcagggcttcaagttcaagctgaacaccaaggtgaccggcgccaccaagaagagcgacggcaagatcgacgtgagcatcgaggccgccagcggcggcaaggccgaggtgatcacctgcgacgtgctgctggtgtgcatcggcagaagacccttcaccaagaacctgggcctggaggagctgggcatcgagctggaccccagaggcagaatccccgtgaacaccagattccagaccaagatccccaacatctacgccatcggcgacgtggtggccggccccatgctggcccacaaggccgaggacgagggcatcatctgcgtggagggcatggccggcggcgccgtgcacatcgactacaactgcgtgcccagcgtgatctacacccaccccgaggtggcctgggtgggcaagagcgaggagcagctgaaggaggagggcatcgagtacaaggtgggcaagttccccttcgccgccaacagcagagccaagaccaacgccgacaccgacggcatggtgaagatcctgggccagaagagcaccgacagagtgctgggcgcccacatcctgggccccggcgccggcgagatggtgaacgaggccgccctggccctggagtacggcgccagctgcgaggacatcgccagagtgtgccacgcccaccccaccctgagcgaggccttcagagaggccaacctggccgccagcttcggcaagagcatcaacttctag

SEQ ID NO: 79177 - DNA, 1380 bp, synthetic construct
  misc_feature 1..1380: note = Description of Artificial Sequence: Synthetic coding sequence
  source 1..1380: mol_type = other DNA
atgctgatctacgtggccgccatcaaggccgcccagctgggcttcaagaccgtgtgcatcgagaagaacgagaccctgggcggcacctgcctgaacgtgggctgcatccccagcaaggccctgctgaacaacagccactactaccacatggcccacggcaaggacttcgccagcagaggcatcgagatgagcgaggtgagactgaacctggacaagatgatggagcagaagagcaccgccgtgaaggccctgaccggcggcatcgcccacctgttcaagcagaacaaggtggtgcacgtgaacggctacggcaagatcaccggcaagaaccaggtgaccgccaccaaggccgacggcggcacccaggtgatcgacaccaagaacatcctgatcgccaccggcagcgaggtgacccccttccccggcatcaccatcgacgaggacaccatcgtgagcagcaccggcgccctgagcctgaagaaggtgcccgagaagatggtggtgatcggcgccggcgtgatcggcgtggagctgggcagcgtgtggcagagactgggcgccgacgtgaccgccgtggagttcctgggccacgtgggcggcgtgggcatcgacatggagatcagcaagaacttccagagaatcctgcagaagcagggcttcaagttcaagctgaacaccaaggtgaccggcgccaccaagaagagcgacggcaagatcgacgtgagcatcgaggccgccagcggcggcaaggccgaggtgatcacctgcgacgtgctgctggtgtgcatcggcagaagacccttcaccaagaacctgggcctggaggagctgggcatcgagctggaccccagaggcagaatccccgtgaacaccagattccagaccaagatccccaacatctacgccatcggcgacgtggtggccggccccatgctggcccacaaggccgaggacgagggcatcatctgcgtggagggcatggccggcggcgccgtgcacatcgactacaactgcgtgcccagcgtgatctacacccaccccgaggtggcctgggtgggcaagagcgaggagcagctgaaggaggagggcatcgagtacaaggtgggcaagttccccttcgccgccaacagcagagccaagaccaacgccgacaccgacggcatggtgaagatcctgggccagaagagcaccgacagagtgctgggcgcccacatcctgggccccggcgccggcgagatggtgaacgaggccgccctggccctggagtacggcgccagctgcgaggacatcgccagagtgtgccacgcccaccccaccctgagcgaggccttcagagaggccaacctggccgccagcttcggcaagagcatcaacttctag

SEQ ID NO: 79178 - DNA, 1944 bp, synthetic construct
  misc_feature 1..1944: note = Description of Artificial Sequence: Synthetic coding sequence
  source 1..1944: mol_type = other DNA
atgtggagagtgtgcgccagaagagcccagaacgtggccccctgggccggcctggaggccagatggaccgccctgcaggaggtgcccggcacccccagagtgaccagcagaagcggccccgcccccgccagaagaaacagcgtgaccaccggctacggcggcgtgagagccctgtgcggctggacccccagcagcggcgccacccccagaaacagactgctgctgcagctgctgggcagccccggcagaagatactacagcctgcccccccaccagaaggtgcccctgcccagcctgagccccaccatgcaggccggcaccatcgccagatgggagaagaaggagggcgacaagatcaacgagggcgacctgatcgccgaggtggagaccgacaaggccaccgtgggcttcgagagcctggaggagtgctacatggccaagatcctggtggccgagggcaccagagacgtgcccatcggcgccatcatctgcatcaccgtgggcaagcccgaggacatcgaggccttcaagaactacaccctggacagcagcgccgcccccaccccccaggccgcccccgcccccacccccgccgccaccgccagcccccccacccccagcgcccaggcccccggcagcagctaccccccccacatgcaggtgctgctgcccgccctgagccccaccatgaccatgggcaccgtgcagagatgggagaagaaggtgggcgagaagctgagcgagggcgacctgctggccgagatcgagaccgacaaggccaccatcggcttcgaggtgcaggaggagggctacctggccaagatcctggtgcccgagggcaccagagacgtgcccctgggcacccccctgtgcatcatcgtggagaaggaggccgacatcagcgccttcgccgactacagacccaccgaggtgaccgacctgaagccccaggtgcccccccccacccccccccccgtggccgccgtgccccccaccccccagcccctggcccccacccccagcgccccctgccccgccacccccgccggccccaagggcagagtgttcgtgagccccctggccaagaagctggccgtggagaagggcatcgacctgacccaggtgaagggcaccggccccgacggcagaatcaccaagaaggacatcgacagcttcgtgcccagcaaggtggcccccgcccccgccgccgtggtgccccccaccggccccggcatggcccccgtgcccaccggcgtgttcaccgacatccccatcagcaacatcagaagagtgatcgcccagagactgatgcagagcaagcagaccatcccccactactacctgagcatcgacgtgaacatgggcgaggtgctgctggtgagaaaggagctgaacaagatcctggagggcagaagcaagatcagcgtgaacgacttcatcatcaaggccagcgccctggcctgcctgaaggtgcccgaggccaacagcagctggatggacaccgtgatcagacagaaccacgtggtggacgtgagcgtggccgtgagcacccccgccggcctgatcacccccatcgtgttcaacgcccacatcaagggcgtggagaccatcgccaacgacgtggtgagcctggccaccaaggccagagagggcaagctgcagccccacgagttccagggcggcaccttcaccatcagcaacctgggcatgttcggcatcaagaacttcagcgccatcatcaaccccccccaggcctgcatcctggccatcggcgccagcgaggacaagctggtgcccgccgacaacgagaagggcttcgacgtggccagcatgatgagcgtgaccctgagctgcgaccacagagtggtggacggcgccgtgggcgcccagtggctggccgagttcagaaagtacctggagaagcccatcaccatgctgctgtag

SEQ ID NO: 79179 - DNA, 678 bp, synthetic construct
  misc_feature 1..678: note = Description of Artificial Sequence: Synthetic coding sequence
  source 1..678: mol_type = other DNA
atgtggagagtgtgcgccagaagagcccagaacgtggccccctgggccggcctggaggccagatggaccgccctgcaggaggtgcccggcacccccagagtgaccagcagaagcggccccgcccccgccagaagaaacagcgtgaccaccggctacggcggcgtgagagccctgtgcggctggacccccagcagcggcgccacccccagaaacagactgctgctgcagctgctgggcagccccggcagaagatactacagcctgcccccccaccagaaggtgcccctgcccagcctgagccccaccatgcaggccggcaccatcgccagatgggagaagaaggagggcgacaagatcaacgagggcgacctgatcgccgaggtggagaccgacaaggccaccgtgggcaagcccgaggacatcgaggccttcaagaactacaccctggacagcagcgccgcccccaccccccaggccgcccccgcccccacccccgccgccaccgccagcccccccacccccagcgcccaggcccccggcagcagctaccccccccacatgcaggtgctgctgcccgccctgagccccaccatgaccatgggcaccgtgcagagatgggagaagaaggtgggcgagaagctgagcgagggcgacctgctggccgagatgagcctgtag

SEQ ID NO: 79180 - DNA, 1257 bp, synthetic construct
  misc_feature 1..1257: note = Description of Artificial Sequence: Synthetic coding sequence
  source 1..1257: mol_type = other DNA
atgcaggccggcaccatcgccagatgggagaagaaggagggcgacaagatcaacgagggcgacctgctggccgagatcgagaccgacaaggccaccatcggcttcgaggtgcaggaggagggctacctggccaagatcctggtgcccgagggcaccagagacgtgcccctgggcacccccctgtgcatcatcgtggagaaggaggccgacatcagcgccttcgccgactacagacccaccgaggtgaccgacctgaagccccaggtgcccccccccacccccccccccgtggccgccgtgccccccaccccccagcccctggcccccacccccagcgccccctgccccgccacccccgccggccccaagggcagagtgttcgtgagccccctggccaagaagctggccgtggagaagggcatcgacctgacccaggtgaagggcaccggccccgacggcagaatcaccaagaaggacatcgacagcttcgtgcccagcaaggtggcccccgcccccgccgccgtggtgccccccaccggccccggcatggcccccgtgcccaccggcgtgttcaccgacatccccatcagcaacatcagaagagtgatcgcccagagactgatgcagagcaagcagaccatcccccactactacctgagcatcgacgtgaacatgggcgaggtgctgctggtgagaaaggagctgaacaagatcctggagggcagaagcaagatcagcgtgaacgacttcatcatcaaggccagcgccctggcctgcctgaaggtgcccgaggccaacagcagctggatggacaccgtgatcagacagaaccacgtggtggacgtgagcgtggccgtgagcacccccgccggcctgatcacccccatcgtgttcaacgcccacatcaagggcgtggagaccatcgccaacgacgtggtgagcctggccaccaaggccagagagggcaagctgcagccccacgagttccagggcggcaccttcaccatcagcaacctgggcatgttcggcatcaagaacttcagcgccatcatcaaccccccccaggcctgcatcctggccatcggcgccagcgaggacaagctggtgcccgccgacaacgagaagggcttcgacgtggccagcatgatgagcgtgaccctgagctgcgaccacagagtggtggacggcgccgtgggcgcccagtggctggccgagttcagaaagtacctggagaagcccatcaccatgctgctgtag

SEQ ID NO: 79181 - DNA, 1104 bp, synthetic construct
  misc_feature 1..1104: note = Description of Artificial Sequence: Synthetic coding sequence
  source 1..1104: mol_type = other DNA
atgacctggctgcagagcaagccccagagactgcagaacctgagccagagagagatgagcggcggcagaaagaccagcgtgcaggtgcccagccccgccaacggcgtgatcgaggccctgctggtgcccgacggcggcaaggtggagggcggcacccccctgttcaccctgagaaagaccggcgccgcccccgccaaggccaagcccgccgaggcccccgccgccgccgcccccaaggccgagcccaccgccgccgccgtgcccccccccgccgcccccatccccacccagatgccccccgtgcccagccccagccagccccccagcggcaagcccgtgagcgccgtgaagcccaccgtggccccccccctggccgagcccggcgccggcaagggcctgagaagcgagcacagagagaagatgaacagaatgagacagagaatcgcccagagactgaaggaggcccagaacacctgcgccatgctgaccaccttcaacgagatcgacatgagcaacatccaggagatgagagccagacacaaggaggccttcctgaagaagcacaacctgaagctgggcttcatgagcgccttcgtgaaggccagcgccttcgccctgcaggagcagcccgtggtgaacgccgtgatcgacgacaccaccaaggaggtggtgtacagagactacatcgacatcagcgtggccgtggccacccccagaggcctggtggtgcccgtgatcagaaacgtggaggccatgaacttcgccgacatcgagagaaccatcaccgagctgggcgagaaggccagaaagaacgagctggccatcgaggacatggacggcggcaccttcaccatcagcaacggcggcgtgttcggcagcctgttcggcacccccatcatcaaccccccccagagcgccatcctgggcatgcacggcatcttcgacagacccgtggccatcggcggcaaggtggaggtgagacccatgatgtacgtggccctgacctacgaccacagactgatcgacggcagagaggccgtgaccttcctgagaaagatcaaggccgccgtggaggaccccagagtgctgctgctggacctgtag

SEQ ID NO: 79182 - DNA, 1362 bp, synthetic construct
  misc_feature 1..1362: note = Description of Artificial Sequence: Synthetic coding sequence
  source 1..1362: mol_type = other DNA
atgctgagcagaagcagatgcgtgagcagagccttcagcagaagcctgagcgccttccagaagggcaactgccccctgggcagaagaagcctgcccggcgtgagcctgtgccagggccccggctaccccaacagcagaaaggtggtgatcaacaacagcgtgttcagcgtgagattcttcagaaccaccgccgtgtgcaaggacgacctggtgaccgtgaagacccccgccttcgccgagagcgtgaccgagggcgacgtgagatgggagaaggccgtgggcgacaccgtggccgaggacgaggtggtgtgcgagatcgagaccgacaagaccagcgtgcaggtgcccagccccgccaacggcgtgatcgaggccctgctggtgcccgacggcggcaaggtggagggcggcacccccctgttcaccctgagaaagaccggcgccgcccccgccaaggccaagcccgccgaggcccccgccgccgccgcccccaaggccgagcccaccgccgccgccgtgcccccccccgccgcccccatccccacccagatgccccccgtgcccagccccagccagccccccagcggcaagcccgtgagcgccgtgaagcccaccgtggccccccccctggccgagcccggcgccggcaagggcctgagaagcgagcacagagagaagatgaacagaatgagacagagaatcgcccagagactgaaggaggcccagaacacctgcgccatgctgaccaccttcaacgagatcgacatgagcaacatccaggagatgagagccagacacaaggaggccttcctgaagaagcacaacctgaagctgggcttcatgagcgccttcgtgaaggccagcgccttcgccctgcaggagcagcccgtggtgaacgccgtgatcgacgacaccaccaaggaggtggtgtacagagactacatcgacatcagcgtggccgtggccacccccagaggcctggtggtgcccgtgatcagaaacgtggaggccatgaacttcgccgacatcgagagaaccatcaccgagctgggcgagaaggccagaaagaacgagctggccatcgaggacatggacggcggcaccttcaccatcagcaacggcggcgtgttcggcagcctgttcggcacccccatcatcaaccccccccagagcgccatcctgggcatgcacggcatcttcgacagacccgtggccatcggcggcaaggtggaggtgagacccatgatgtacgtggccctgacctacgaccacagactgatcgacggcagagaggccgtgaccttcctgagaaagatcaaggccgccgtggaggaccccagagtgctgctgctggacctgtag

SEQ ID NO: 79183 - DNA, 282 bp, synthetic construct
  misc_feature 1..282: note = Description of Artificial Sequence: Synthetic coding sequence
  source 1..282: mol_type = other DNA
atggacagactgcagaccgccctgctggtggtgctggtgctgctggccgtggccctgcaggccaccgaggccggcccctacggcgccaacatggaggacagcgtgtgctgcagagactacgtgagatacagactgcccctgagagtggtgaagcacttctactggaccagcgacagctgccccagacccggcgtggtgctgctgaccttcagagacaaggagatctgcgccgaccccagagtgccctgggtgaagatgatcctgaacaagctgagccagtag

SEQ ID NO: 79184 - DNA, 1560 bp, synthetic construct
  misc_feature 1..1560: note = Description of Artificial Sequence: Synthetic coding sequence
  source 1..1560: mol_type = other DNA
atggccgcccccagcagactgctgatcagaggcggcagagtggtgaacgacgacttcagcgaggtggccgacgtgctggtggaggacggcgtggtgagagccctgggccacgacctgctgccccccggcggcgcccccgccggcctgagagtgctggacgccgccggcaagctggtgctgcccggcggcatcgacacccacacccacatgcagttccccttcatgggcagcagaagcatcgacgacttccaccagggcaccaaggccgccctgagcggcggcaccaccatgatcatcgacttcgccatcccccagaagggcggcagcctgatcgaggccttcgagacctggagaagctgggccgaccccaaggtgtgctgcgactacagcctgcacgtggccgtgacctggtggagcgaccaggtgaaggaggagatgaagatcctggtgcaggacaagggcgtgaacagcttcaagatgttcatggcctacaaggacctgtacatggtgaccgacctggagctgtacgaggccttcagcagatgcaaggagatcggcgccatcgcccaggtgcacgccgagaacggcgacctgatcgccgagggcgccaagaagatgctggccctgggcatcaccggccccgagggccacgagctgtgcagacccgaggccgtggaggccgaggccaccctgagagccatcaccatcgccagcgccgtgaactgccccctgtacatcgtgcacgtgatgagcaagagcgccgccaaggtgatcgccgacgccagaagagacggcaaggtggtgtacggcgagcccatcgccgccagcctgggcaccgacggcacccactactggaacaaggagtggcaccacgccgcccaccacgtgatgggcccccccctgagacccgaccccagcacccccgacttcctgatgaacctgctggccaacgacgacctgaccaccaccggcaccgacaactgcaccttcaacacctgccagaaggccctgggcaaggacgacttcaccaagatccccaacggcgtgaacggcgtggaggacagaatgagcgtgatctgggagaagggcgtgcacagcggcaagatggacgagaacagattcgtggccgtgaccagcaccaacgccgccaagatcttcaacctgtaccccagaaagggcagaatcgccgtgggcagcgacgccgacatcgtgatctgggaccccaagggcaccagaaccatcagcgccaagacccaccaccaggccgtgaacttcaacatcttcgagggcatggtgtgccacggcgtgcccctggtgaccatcagcagaggcaaggtggtgtacgaggccggcgtgttcagcgtgaccgccggcgacggcaagttcatccccagaaagcccttcgccgagtacatctacaagagaatcaagcagagagacagaacctgcacccccacccccgtggagagagccccctacaagggcgaggtggccaccctgaagagcagagtgaccaaggaggacgccaccgccggcaccagaaagcaggcccacccctag

SEQ ID NO: 79185 - DNA, 1719 bp, synthetic construct
  misc_feature 1..1719: note = Description of Artificial Sequence: Synthetic coding sequence
  source 1..1719: mol_type = other DNA
atgagctaccagggcaagaagaacatccccagaatcaccagcgacagactgctgatcaagggcggcaagatcgtgaacgacgaccagagcttctacgccgacatctacatggaggacggcctgatcaagcagatcggcgagaacctgatcgtgcccggcggcgtgaagaccatcgaggcccacagcagaatggtgatccccggcggcatcgacgtgcacaccagattccagatgcccgaccagggcatgaccagcgccgacgacttcttccagggcaccaaggccgccctggccggcggcaccaccatgatcatcgaccacgtggtgcccgagcccggcaccagcctgctggccgccttcgaccagtggagagagtgggccgacagcaagagctgctgcgactacagcctgcacgtggacatcagcgagtggcacaagggcatccaggaggagatggaggccctggtgaaggaccacggcgtgaacagcttcctggtgtacatggccttcaaggacagattccagctgaccgactgccagatctacgaggtgctgagcgtgatcagagacatcggcgccatcgcccaggtgcacgccgagaacggcgacatcatcgccgaggagcagcagagaatcctggacctgggcatcaccggccccgagggccacgtgctgagcagacccgaggaggtggaggccgaggccgtgaacagagccatcaccatcgccaaccagaccaactgccccctgtacatcaccaaggtgatgagcaagagcagcgccgaggtgatcgcccaggccagaaagaagggcaccgtggtgtacggcgagcccatcaccgccagcctgggcaccgacggcagccactactggagcaagaactgggccaaggccgccgccttcgtgaccagcccccccctgagccccgaccccaccacccccgacttcctgaacagcctgctgagctgcggcgacctgcaggtgaccggcagcgcccactgcaccttcaacaccgcccagaaggccgtgggcaaggacaacttcaccctgatccccgagggcaccaacggcaccgaggagagaatgagcgtgatctgggacaaggccgtggtgaccggcaagatggacgagaaccagttcgtggccgtgaccagcaccaacgccgccaaggtgttcaacctgtaccccagaaagggcagaatcgccgtgggcagcgacgccgacctggtgatctgggaccccgacagcgtgaagaccatcagcgccaagacccacaacagcagcctggagtacaacatcttcgagggcatggagtgcagaggcagccccctggtggtgatcagccagggcaagatcgtgctggaggacggcaccctgcacgtgaccgagggcagcggcagatacatccccagaaagcccttccccgacttcgtgtacaagagaatcaaggccagaagcagactggccgagctgagaggcgtgcccagaggcctgtacgacggccccgtgtgcgaggtgagcgtgacccccaagaccgtgacccccgccagcagcgccaagaccagccccgccaagcagcaggccccccccgtgagaaacctgcaccagagcggcttcagcctgagcggcgcccagatcgacgacaacatccccagaagaaccacccagagaatcgtggccccccccggcggcagagccaacatcaccagcctgggctag

SEQ ID NO: 79186 - DNA, 1611 bp, synthetic construct
  misc_feature 1..1611: note = Description of Artificial Sequence: Synthetic coding sequence
  source 1..1611: mol_type = other DNA
atggaggacggcctgatcaagcagatcggcgagaacctgatcgtgcccggcggcgtgaagaccatcgaggcccacagcagaatggtgatccccggcggcatcgacgtgcacaccagattccagatgcccgaccagggcatgaccagcgccgacgacttcttccagggcaccaaggccgccctggccggcggcaccaccatgatcatcgaccacgtggtgcccgagcccggcaccagcctgctggccgccttcgaccagtggagagagtgggccgacagcaagagctgctgcgactacagcctgcacgtggacatcagcgagtggcacaagggcatccaggaggagatggaggccctggtgaaggaccacggcgtgaacagcttcctggtgtacatggccttcaaggacagattccagctgaccgactgccagatctacgaggtgctgagcgtgatcagagacatcggcgccatcgcccaggtgcacgccgagaacggcgacatcatcgccgaggagcagcagagaatcctggacctgggcatcaccggccccgagggccacgtgctgagcagacccgaggaggtggaggccgaggccgtgaacagagccatcaccatcgccaaccagaccaactgccccctgtacatcaccaaggtgatgagcaagagcagcgccgaggtgatcgcccaggccagaaagaagggcaccgtggtgtacggcgagcccatcaccgccagcctgggcaccgacggcagccactactggagcaagaactgggccaaggccgccgccttcgtgaccagcccccccctgagccccgaccccaccacccccgacttcctgaacagcctgctgagctgcggcgacctgcaggtgaccggcagcgcccactgcaccttcaacaccgcccagaaggccgtgggcaaggacaacttcaccctgatccccgagggcaccaacggcaccgaggagagaatgagcgtgatctgggacaaggccgtggtgaccggcaagatggacgagaaccagttcgtggccgtgaccagcaccaacgccgccaaggtgttcaacctgtaccccagaaagggcagaatcgccgtgggcagcgacgccgacctggtgatctgggaccccgacagcgtgaagaccatcagcgccaagacccacaacagcagcctggagtacaacatcttcgagggcatggagtgcagaggcagccccctggtggtgatcagccagggcaagatcgtgctggaggacggcaccctgcacgtgaccgagggcagcggcagatacatccccagaaagcccttccccgacttcgtgtacaagagaatcaaggccagaagcagactggccgagctgagaggcgtgcccagaggcctgtacgacggccccgtgtgcgaggtgagcgtgacccccaagaccgtgacccccgccagcagcgccaagaccagccccgccaagcagcaggccccccccgtgagaaacctgcaccagagcggcttcagcctgagcggcgcccagatcgacgacaacatccccagaagaaccacccagagaatcgtggccccccccggcggcagagccaacatcaccagcctgggctag

SEQ ID NO: 79187 - DNA, 1719 bp, synthetic construct; identical to SEQ ID NO: 79185
  misc_feature 1..1719: note = Description of Artificial Sequence: Synthetic coding sequence
  source 1..1719: mol_type = other DNA

SEQ ID NO: 79188 - DNA, 1611 bp, synthetic construct; identical to SEQ ID NO: 79186
  misc_feature 1..1611: note = Description of Artificial Sequence: Synthetic coding sequence
  source 1..1611: mol_type = other DNA

SEQ ID NO: 79189 - DNA, 597 bp, synthetic construct
  misc_feature 1..597: note = Description of Artificial Sequence: Synthetic coding sequence
  source 1..597: mol_type = other DNA
atgagcgtgatctgggacaaggccgtggtgaccggcaagatggacgagaaccagttcgtggccgtgaccagcaccaacgccgccaaggtgttcaacctgtaccccagaaagggcagaatcgccgtgggcagcgacgccgacctggtgatctgggaccccgacagcgtgaagaccatcttcgagggcatggagtgcagaggcagccccctggtggtgatcagccagggcaagatcgtgctggaggacggcaccctgcacgtgaccgagggcagcggcagatacatccccagaaagcccttccccgacttcgtgtacaagagaatcaaggccagaagcagactggccgagctgagaggcgtgcccagaggcctgtacgacggccccgtgtgcgaggtgagcgtgacccccaagaccgtgacccccgccagcagcgccaagaccagccccgccaagcagcaggccccccccgtgagaaacctgcaccagagcggcttcagcctgagcggcgcccagatcgacgacaacatccccagaagaaccacccagagaatcgtggccccccccggcggcagagccaacatcaccagcctgggctag

SEQ ID NO: 79190 - DNA, 2055 bp, synthetic construct
  misc_feature 1..2055: note = Description of Artificial Sequence: Synthetic coding sequence
  source 1..2055: mol_type = other DNA
atggccagcggcagaagaggctgggacagcagccacgaggacgacctgcccgtgtacctggccagacccggcaccaccgaccaggtgcccagacagaagtacggcggcatgttctgcaacgtggagggcgccttcgagagcaagaccctggacttcgacgccctgagcgtgggccagagaggcgccaagacccccagaagcggccagggcagcgacagaggcagcggcagcagacccggcatcgagggcgacacccccagaagaggccagggcagagaggagagcagagagcccgcccccgccagccccgcccccgccggcgtggagatcagaagcgccaccggcaaggaggtgctgcagaacctgggccccaaggacaagagcgacagactgctgatcaagggcggcagaatcgtgaacgacgaccagagcttctacgccgacatctacatggaggacggcctgatcaagcagatcggcgacaacctgatcgtgcccggcggcgtgaagaccatcgaggccaacggcaagatggtgatccccggcggcatcgacgtgcacacccacttccagatgccctacaagggcatgaccaccgtggacgacttcttccagggcaccaaggccgccctggccggcggcaccaccatgatcatcgaccacgtggtgcccgagcccgagagcagcctgaccgaggcctacgagaagtggagagagtgggccgacggcaagagctgctgcgactacgccctgcacgtggacatcacccactggaacgacagcgtgaagcaggaggtgcagaacctgatcaaggacaagggcgtgaacagcttcatggtgtacatggcctacaaggacctgtaccaggtgagcaacaccgagctgtacgagatcttcacctgcctgggcgagctgggcgccatcgcccaggtgcacgccgagaacggcgacatcatcgcccaggagcagaccagaatgctggagatgggcatcaccggccccgagggccacgtgctgagcagacccgaggagctggaggccgaggccgtgttcagagccatcaccatcgccagccagaccaactgccccctgtacgtgaccaaggtgatgagcaagagcgccgccgacctgatcagccaggccagaaagaagggcaacgtggtgttcggcgagcccatcaccgccagcctgggcatcgacggcacccactactggagcaagaactgggccaaggccgccgccttcgtgaccagcccccccctgagccccgaccccaccacccccgactacatcaacagcctgctggccagcggcgacctgcagctgagcggcagcgcccactgcaccttcagcaccgcccagaaggccatcggcaaggacaacttcaccgccatccccgagggcaccaacggcgtggaggagagaatgagcgtgatctgggacaaggccgtggccaccggcaagatggacgagaaccagttcgtggccgtgaccagcaccaacgccgccaagatcttcaacctgtaccccagaaagggcagaatcagcgtgggcagcgacagcgacctggtgatctgggaccccgacgccgtgaagatcgtgagcgccaagaaccaccagagcgccgccgagtacaacatcttcgagggcatggagctgagaggcgcccccctggtggtgatctgccagggcaagatcatgctggaggacggcaacctgcacgtgacccagggcgccggcagattcatcccctgcagccccttcagcgactacgtgtacaagagaatcaaggccagaagaaagatggccgacctgcacgccgtgcccagaggcatgtacgacggccccgtgttcgacctgaccaccacccccaagggcggcacccccgccggcagcgccagaggcagccccaccagacccaacccccccgtgagaaacctgcaccagagcggcttcagcctgagcggcacccaggtggacgagggcgtgagaagcgccagcaagagaatcgtggccccccccggcggcagaagcaacatcaccagcctgagctag

SEQ ID NO: 79191 - DNA, 1713 bp, synthetic construct
  misc_feature 1..1713: note = Description of Artificial Sequence: Synthetic coding sequence
  source 1..1713: mol_type = other DNA
atgagctaccagggcaagaagaacatccccagaatcaccagcgacagactgctgatcaagggcggcagaatcgtgaacgacgaccagagcttctacgccgacatctacatggaggacggcctgatcaagcagatcggcgacaacctgatcgtgcccggcggcgtgaagaccatcgaggccaacggcaagatggtgatccccggcggcatcgacgtgcacacccacttccagatgccctacaagggcatgaccaccgtggacgacttcttccagggcaccaaggccgccctggccggcggcaccaccatgatcatcgaccacgtggtgcccgagcccgagagcagcctgaccgaggcctacgagaagtggagagagtgggccgacggcaagagctgctgcgactacgccctgcacgtggacatcacccactggaacgacagcgtgaagcaggaggtgcagaacctgatcaaggacaagggcgtgaacagcttcatggtgtacatggcctacaaggacctgtaccaggtgagcaacaccgagctgtacgagatcttcacctgcctgggcgagctgggcgccatcgcccaggtgcacgccgagaacggcgacatcatcgcccaggagcagaccagaatgctggagatgggcatcaccggccccgagggccacgtgctgagcagacccgaggagctggaggccgaggccgtgttcagagccatcaccatcgccagccagaccaactgccccctgtacgtgaccaaggtgatgagcaagagcgccgccgacctgatcagccaggccagaaagaagggcaacgtggtgttcggcgagcccatcaccgccagcctgggcatcgacggcacccactactggagcaagaactgggccaaggccgccgccttcgtgaccagcccccccctgagccccgaccccaccacccccgactacatcaacagcctgctggccagcggcgacctgcagctgagcggcagcgcccactgcaccttcagcaccgcccagaaggccatcggcaaggacaacttcaccgccatccccgagggcaccaacggcgtggaggagagaatgagcgtgatctgggacaaggccgtggccaccggcaagatggacgagaaccagttcgtggccgtgaccagcaccaacgccgccaagatcttcaacctgtaccccagaaagggcagaatcagcgtgggcagcgacagcgacctggtgatctgggaccccgacgccgtgaagatcgtgagcgccaagaaccaccagagcgccgccgagtacaacatcttcgagggcatggagctgagaggcgcccccctggtggtgatctgccagggcaagatcatgctggaggacggcaacctgcacgtgacccagggcgccggcagattcatcccctgcagccccttcagcgactacgtgtacaagagaatcaaggccagaagaaagatggccgacctgcacgccgtgcccagaggcatgtacgacggccccgtgttcgacctgaccaccacccccaagggcggcacccccgccggcagcgccagaggcagccccaccagacccaacccccccgtgagaaacctgcaccagagcggcttcagcctgagcggcacccaggtggacgagggcgtgagaagcgccagcaagagaatcgtggccccccccggcggcagaagcaacatcaccagcctgagctag

SEQ ID NO: 79192 - DNA, 279 bp, synthetic construct
  misc_feature 1..279: note = Description of Artificial Sequence: Synthetic coding sequence
  source 1..279: mol_type = other DNA
atgagctaccagggcaagaagaacatccccagaatcaccagcgacagactgctgatcaagggcggcagaatcgtgaacgacgaccagagcttctacgccgacatctacatggaggacggcctgatcaagcagatcggcgacaacctgatcgtgcccggcggcgtgaagaccatcgaggccaacggcaagatggtgatccccggcggcatcgacgtgcacacccacttccagatgccctacaagggcatgaccaccgtggacgacttcttccagggctag

SEQ ID NO: 79193 - DNA, 591 bp, synthetic construct
  misc_feature 1..591: note = Description of Artificial Sequence: Synthetic coding sequence
  source 1..591: mol_type = other DNA
atggacgagaaccagttcgtggccgtgaccagcaccaacgccgccaagatcttcaacctgtaccccagaaagggcagaatcagcgtgggcagcgacagcgacctggtgatctgggaccccgacgccgtgaagatcgtgagcgccaagaaccaccagagcgccgccgagtacaacatcttcgagggcatggagctgagaggcgcccccctggtggtgatctgccagggcaagatcatgctggaggacggcaacctgcacgtgacccagggcgccggcagattcatcccctgcagccccttcagcgactacgtgtacaagagaatcaaggccagaagaaagatggccgacctgcacgccgtgcccagaggcatgtacgacggccccgtgttcgacctgaccaccacccccaagggcggcacccccgccggcagcgccagaggcagccccaccagacccaacccccccgtgagaaacctgcaccagagcggcttcagcctgagcggcacccaggtggacgagggcgtgagaagcgccagcaagagaatcgtggccccccccggcggcagaagcaacatcaccagcctgagctag

SEQ ID NO: 79194 - DNA, 1719 bp, synthetic construct
  misc_feature 1..1719: note = Description of Artificial Sequence: Synthetic coding sequence
  source 1..1719: mol_type = other DNA
atgagcttccagggcaagaagagcatccccagaatcaccagcgacagactgctgatcagaggcggcagaatcgtgaacgacgaccagagcttctacgccgacgtgcacgtggaggacggcctgatcaagcagatcggcgagaacctgatcgtgcccggcggcatcaagaccatcgacgcccacggcctgatggtgctgcccggcggcgtggacgtgcacaccagactgcagatgcccgtgctgggcatgacccccgccgacgacttctgccagggcaccaaggccgccctggccggcggcaccaccatgatcctggaccacgtgttccccgacaccggcgtgagcctgctggccgcctacgagcagtggagagagagagccgacagcgccgcctgctgcgactacagcctgcacgtggacatcaccagatggcacgagagcatcaaggaggagctggaggccctggtgaaggagaagggcgtgaacagcttcctggtgttcatggcctacaaggacagatgccagtgcagcgacagccagatgtacgagatcttcagcatcatcagagacctgggcgccctggcccaggtgcacgccgagaacggcgacatcgtggaggaggagcagaagagactgctggagctgggcatcaccggccccgagggccacgtgctgagccaccccgaggaggtggaggccgaggccgtgtacagagccgtgaccatcgccaagcaggccaactgccccctgtacgtgaccaaggtgatgagcaagggcgccgccgacgccatcgcccaggccaagagaagaggcgtggtggtgttcggcgagcccatcaccgccagcctgggcaccgacggcagccactactggagcaagaactgggccaaggccgccgccttcgtgaccagcccccccgtgaaccccgaccccaccaccgccgaccacctgacctgcctgctgagcagcggcgacctgcaggtgaccggcagcgcccactgcaccttcaccaccgcccagaaggccgtgggcaaggacaacttcgccctgatccccgagggcaccaacggcatcgaggagagaatgagcatggtgtgggagaagtgcgtggccagcggcaagatggacgagaacgagttcgtggccgtgaccagcaccaacgccgccaagatcttcaacttctaccccagaaagggcagagtggccgtgggcagcgacgccgacctggtgatctggaaccccaaggccaccaagatcatcagcgccaagacccacaacctgaacgtggagtacaacatcttcgagggcgtggagtgcagaggcgcccccgccgtggtgatcagccagggcagagtggccctggaggacggcaagatgttcgtgacccccggcgccggcagattcgtgcccagaaagaccttccccgacttcgtgtacaagagaatcaaggccagaaacagactggccgagatccacggcgtgcccagaggcctgtacgacggccccgtgcacgaggtgatggtgcccgccaagcccggcagcggcgcccccgccagagccagctgccccggcaagatcagcgtgccccccgtgagaaacctgcaccagagcggcttcagcctgagcggcagccaggccgacgaccacatcgccagaagaaccgcccagaagatcatggccccccccggcggcagaagcaacatcaccagcctgagctag

SEQ ID NO: 79195 - DNA, 1239 bp, synthetic construct
  misc_feature 1..1239: note = Description of Artificial Sequence: Synthetic coding sequence
  source 1..1239: mol_type = other DNA
atgcccgtgctgggcatgacccccgccgacgacttctgccagggcaccaaggccgccctggccggcggcaccaccatgatcctggaccacgtgttccccgacaccggcgtgagcctgctggccgcctacgagcagtggagagagagagccgacagcgccgcctgctgcgactacagcctgcacgtggacatcaccagatggcacgagagcatcaaggaggagctggaggccctggtgaaggagaagggcgtgaacagcttcctggtgttcatggcctacaaggacagatgccagtgcagcgacagccagatgtacgagatcttcagcatcatcagagacctgggcgccctggcccaggtgcacgccgagaacggcgacatcgtggaggaggtggaggccgaggccgtgtacagagccgtgaccatcgccaagcaggccaactgccccctgtacgtgaccaaggtgatgagcaagggcgccgccgacgccatcgcccaggccaagagaagaggcgtggtggtgttcggcgagcccatcaccgccagcctgggcaccgacggcagccactactggagcaagaactgggccaaggccgccgccttcgtgaccagcccccccgtgaaccccgaccccaccaccgccgaccacctgacctgcctgctgagcagcggcgacctgcaggtgaccggcagcgcccactgcaccttcaccaccgcccagaaggccgtgggcaaggacaacttcgccctgatccccgagggcaccaacggcatcgaggagagaatgagcatggtgtgggagaagtgcgtggccagcggcaagatggacgagaacgagttcgtggccgtgaccagcaccaacgccgccaagatcttcaacttctaccccagaaagggcagagtggccgtgggcagcgacgccgacctggtgatctggaaccccaaggccaccaagatcatcagcgccaagacccacaacctgctggccgagatccacggcgtgcccagaggcctgtacgacggccccgtgcacgaggtgatggtgcccgccaagcccggcagcggcgcccccgccagagccagctgccccggcaagatcagcgtgccccccgtgagaaacctgcaccagagcggcttcagcctgagcggcagccaggccgacgaccacatcgccagaagaaccgcccagaagatcatggccccccccggcggcagaagcaacatcaccagcctgagctag

SEQ ID NO: 79196 - DNA, 1239 bp, synthetic construct; identical to SEQ ID NO: 79195
  misc_feature 1..1239: note = Description of Artificial Sequence: Synthetic coding sequence
  source 1..1239: mol_type = other DNA

SEQ ID NO: 79197 - DNA, 1695 bp, synthetic construct
  misc_feature 1..1695: note = Description of Artificial Sequence: Synthetic coding sequence
  source 1..1695: mol_type = other DNA
atgctggccaacagcgccagcgtgagaatcctgatcaagggcggcaaggtggtgaacgacgactgcacccacgaggccgacgtgtacatcgagaacggcatcatccagcaggtgggcagagagctgatgatccccggcggcgccaaggtgatcgacgccaccggcaagctggtgatccccggcggcatcgacaccagcacccacttccaccagaccttcatgaacgccacctgcgtggacgacttctaccacggcaccaaggccgccctggtgggcggcaccaccatgatcatcggccacgtgctgcccgacaaggagaccagcctggtggacgcctacgagaagtgcagaggcctggccgaccccaaggtgtgctgcgactacgccctgcacgtgggcatcacctggtgggcccccaaggtgaaggccgagatggagaccctggtgagagagaagggcgtgaacagcttccagatgttcatgacctacaaggacctgtacatgctgagagacagcgagctgtaccaggtgctgcacgcctgcaaggacatcggcgccatcgccagagtgcacgccgagaacggcgagctggtggccgagggcgccaaggaggccctggacctgggcatcaccggccccgagggcatcgagatcagcagacccgaggagctggaggccgaggccacccacagagtgatcaccatcgccaacagaacccactgccccatctacctggtgaacgtgagcagcatcagcgccggcgacgtgatcgccgccgccaagatgcagggcaaggtggtgctggccgagaccaccaccgcccacgccaccctgaccggcctgcactactaccaccaggactggagccacgccgccgcctacgtgaccgtgccccccctgagactggacaccaacaccagcacctacctgatgagcctgctggccaacgacaccctgaacatcgtggccagcgaccacagacccttcaccaccaagcagaaggccatgggcaaggaggacttcaccaagatcccccacggcgtgagcggcgtgcaggacagaatgagcgtgatctgggagagaggcgtggtgggcggcaagatggacgagaacagattcgtggccgtgaccagcagcaacgccgccaagctgctgaacctgtaccccagaaagggcagaatcatccccggcgccgacgccgacgtggtggtgtgggaccccgaggccaccaagaccatcagcgccagcacccaggtgcagggcggcgacttcaacctgtacgagaacatgagatgccacggcgtgcccctggtgaccatcagcagaggcagagtggtgtacgagaacggcgtgttcatgtgcgccgagggcaccggcaagttctgccccctgagaagcttccccgacaccgtgtacaagaagctggtgcagagagagaagaccctgaaggtgagaggcgtggacagaaccccctacctgggcgacgtggccgtggtggtgcaccccggcaagaaggagatgggcacccccctggccgacacccccaccagacccgtgaccagacacggcggcatgagagacctgcacgagagcagcttcagcctgagcggcagccagatcgacgaccacgtgcccaagagagccagcgccagaatcctggccccccccggcggcagaagcagcggcatctggtag

SEQ ID NO: 79198 - DNA, 1695 bp, synthetic construct; identical to SEQ ID NO: 79197
  misc_feature 1..1695: note = Description of Artificial Sequence: Synthetic coding sequence
  source 1..1695: mol_type = other DNA

SEQ ID NO: 79199 - DNA, 573 bp, synthetic construct
  misc_feature 1..573: note = Description of Artificial Sequence: Synthetic coding sequence
  source 1..573: mol_type = other DNA
atgctggccaacagcgccagcgtgagaatcctgatcaagggcggcaaggtggtgaacgacgactgcacccacgaggccgacgtgtacatcgagaacggcatcatccagcaggtgggcagagagctgatgatccccggcggcgccaaggtgatcgacgccaccggcaagctggtgatccccggcggcatcgacaccagcacccacttccaccagaccttcatgaacgccacctgcgtggacgacttctaccacggcaccaaggccgccctggtgggcggcaccaccatgatcatcggccacgtgctgcccgacaaggagaccagcctggtggacgcctacgagaagtgcagaggcctggccgaccccaaggtgtgctgcgactacgccctgcacgtgggcatcacctggtgggcccccaaggtgaaggccgagatggagaccctggtgagagagaagggcgtgaacagcttccagatgttcatgacctacaaggacctgtacatgctgagagacagcgagctgtaccaggtgctgcacgcctgcaaggacatcggcgccatcgccagagtgtag

SEQ ID NO: 79200 - DNA, 525 bp, synthetic construct
  misc_feature 1..525: note = Description of Artificial Sequence: Synthetic coding sequence
  source 1..525: mol_type = other DNA
atgctggccaacagcgccagcgtgagaatcctgatcaagggcggcaaggtggtgaacgacgactgcacccacgaggccgacgtgtacatcgagaacggcatcatccagcaggtgggcagagagctgatgatccccggcggcgccaaggtgatcgacgccaccggcaagctggtgatccccggcggcatcgacaccagcacccacttccaccagaccttcatgaacgccacctgcgtggacgacttctaccacggcaccaaggccgccctggtgggcggcaccaccatgatcatcggccacgtgctgcccgacaaggagaccagcctggtggacgcctacgagaagtgcagaggcctggccgaccccaaggtgtgctgcgactacgccctgcacgtgggcatcacctggtgggcccccaaggtgaaggccgagatggagaccctggtgagagagaagggcgtgaacagcttccagatgttcatgacctacaaggacctgtacatgctgagagacagcgagctgtag

SEQ ID NO: 79201 - DNA, 498 bp, synthetic construct
  misc_feature 1..498: note = Description of Artificial Sequence: Synthetic coding sequence
  source 1..498: mol_type = other DNA
atgctggccaacagcgccagcgtgagaatcctgatcaagggcggcaaggtggtgaacgacgactgcacccacgaggccgacgtgtacatcgagaacggcatcatccagcaggtgggcagagagctgatgatccccggcggcgccaaggtgatcgacgccaccggcaagctggtgatccccggcggcatcgacaccagcacccacttccaccagaccttcatgaacgccacctgcgtggacgacttctaccacggcaccaaggccgccctggtgggcggcaccaccatgatcatcggccacgtgctgcccgacaaggagaccagcctggtggacgcctacgagaagtgcagaggcctggccgaccccaaggtgtgctgcgactacgccctgcacgtgggcatcacctggtgggcccccaaggtgaaggccgagatggagaccctggtgagagagaagggcgtgaacagcttccagatgttcatgacctacaaggactag

SEQ ID NO: 79202 - DNA, 522 bp, synthetic construct
  misc_feature 1..522: note = Description of Artificial Sequence: Synthetic coding sequence
  source 1..522: mol_type = other DNA
atggcccccgtgctgagcaaggacagcgccgacatcgagagcatcctggccctgaaccccagaacccagacccacgccaccctgagaagcaccagcgccaagaagctggacaagaagcactggaagagaaaccccgacaagaactgcttcaactgcgagaagctggagaacaacttcgacgacatcaagcacaccaccctgggcgagagaggcgccctgagagaggccatgagatgcctgaagtgcgccgacgccccctgccagaagagctgccccaccaacctggacatcaagagcttcatcaccagcatcgccaacaagaactactacggcgccgccaagatgatcttcagcgacaaccccctgggcctgacctgcggcatggtgtgccccaccagcgacctgtgcgtgggcggctgcaacctgtacgccaccgaggagggccccatcaacatcggcggcctgcagcagttcgccaccgagaccctgatcctggccttcagcctgatgaaccacctgtag

SEQ ID NO: 79203 - DNA, 3078 bp, synthetic construct
  misc_feature 1..3078: note = Description of Artificial Sequence: Synthetic coding sequence
  source 1..3078: mol_type = other DNA
atggcccccgtgctgagcaaggacagcgccgacatcgagagcatcctggccctgaaccccagaacccagacccacgccaccctgagaagcaccagcgccaagaagctggacaagaagcactggaagagaaaccccgacaagaactgcttcaactgcgagaagctggagaacaacttcgacgacatcaagcacaccaccctgggcgagagaggcgccctgagagaggccatgagatgcctgaagtgcgccgacgccccctgccagaagagctgccccaccaacctggacatcaagagcttcatcaccagcatcgccaacaagaactactacggcgccgccaagatgatcttcagcgacaaccccctgggcctgacctgcggcatggtgtgccccaccagcgacctgtgcgtgggcggctgcaacctgtacgccaccgaggagggccccatcaacatcggcggcctgcagcagttcgccaccgaggtgttcaaggccatgagcatcccccagatcagaaaccccagcctgcccccccccgagaagatgagcgaggcctacagcgccaagatcgccctgttcggcgccggccccgccagcatcagctgcgccagcttcctggccagactgggctacagcgacatcaccatcttcgagaagcaggagtacgtgggcggcctgagcaccagcgagatcccccagttcagactgccctacgacgtggtgaacttcgagatcgagctgatgaaggacctgggcgtgaagatcatctgcggcaagagcctgagcgtgaacgagatgaccctgagcaccctgaaggagaagggctacaaggccgccttcatcggcatcggcctgcccgagcccaacaaggacgccatcttccagggcctgacccaggaccagggcttctacaccagcaaggacttcctgcccctggtggccaagggcagcaaggccggcatgtgcgcctgccacagccccctgcccagcatcagaggcgtggtgatcgtgctgggcgccggcgacaccgccttcgactgcgccaccagcgccctgagatgcggcgccagaagagtgttcatcgtgttcagaaagggcttcgtgaacatcagagccgtgcccgaggagatggagctggccaaggaggagaagtgcgagttcctgcccttcctgagccccagaaaggtgatcgtgaagggcggcagaatcgtggccatgcagttcgtgagaaccgagcaggacgagaccggcaagtggaacgaggacgaggaccagatggtgcacctgaaggccgacgtggtgatcagcgccttcggcagcgtgctgagcgaccccaaggtgaaggaggccctgagccccatcaagttcaacagatggggcctgcccgaggtggaccccgagaccatgcagaccagcgaggcctgggtgttcgccggcggcgacgtggtgggcctggccaacaccaccgtggagagcgtgaacgacggcaagcaggccagctggtacatccacaagtacgtgcagagccagtacggcgccagcgtgagcgccaagcccgagctgcccctgttctacacccccatcgacctggtggacatcagcgtggagatggccggcctgaagttcatcaaccccttcggcctggccagcgccacccccgccaccagcaccagcatgatcagaagagccttcgaggccggctggggcttcgccctgaccaagaccttcagcctggacaaggacatcgtgaccaacgtgagccccagaatcatcagaggcaccaccagcggccccatgtacggccccggccagagcagcttcctgaacatcgagctgatcagcgagaagaccgccgcctactggtgccagagcgtgaccgagctgaaggccgacttccccgacaacatcgtgatcgccagcatcatgtgcagctacaacaagaacgactggaccgagctggccaagaagagcgaggacagcggcgccgacgccctggagctgaacctgagctgcccccacggcatgggcgagagaggcatgggcctggcctgcggccaggaccccgagctggtgagaaacatctgcagatgggtgagacaggccgtgcagatccccttcttcgccaagctgacccccaacgtgaccgacatcgtgagcatcgccagagccgccaaggagggcggcgccaacggcgtgaccgccaccaacaccgtgagcggcctgatgggcctgaagagcgacggcaccccctggcccgccgtgggcatcgccaagagaaccacctacggcggcgtgagcggcaccgccatcagacccatcgccctgagagccgtgaccagcatcgccagagccctgcccggcttccccatcctggccaccggcggcatcgacagcgccgagagcggcctgcagttcctgcacagcggcgccagcgtgctgcaggtgtgcagcgccatccagaaccaggacttcaccgtgatcgaggactactgcaccggcctgaaggccctgctgtacctgaagagcatcgaggagctgcaggactgggacggccagagccccgccaccgtgagccaccagaagggcaagcccgtgcccagaatcgccgagctgatggacaagaagctgcccagcttcggcccctacctggagcagagaaagaagatcatcgccgagaacaagatcagactgaaggagcagaacgtggccttcagccccctgaagagaaactgcttcatccccaagagacccatccccaccatcaaggacgtgatcggcaaggccctgcagtacctgggcaccttcggcgagctgagcaacgtggagcaggtggtggccatgatcgacgaggagatgtgcatcaactgcggcaagtgctacatgacctgcaacgacagcggctaccaggccatccagttcgaccccgagacccacctgcccaccatcaccgacacctgcaccggctgcaccctgtgcctgagcgtgtgccccatcgtggactgcatcaagatggtgagcagaaccaccccctacgagcccaagagaggcgtgcccctgagcgtgaaccccgtgtgctag

SEQ ID NO: 79204 - DNA, 471 bp, synthetic construct
  misc_feature 1..471: note = Description of Artificial Sequence: Synthetic coding sequence
  source 1..471: mol_type = other DNA
atggcccccgtgctgagcaaggacagcgccgacatcgagaactgcgagaagctggagaacaacttcgacgacatcaagcacaccaccctgggcgagagaggcgccctgagagaggccatgagatgcctgaagtgcgccgacgccccctgccagaagagctgccccaccaacctggacatcaagagcttcatcaccagcatcgccaacaagaactactacggcgccgccaagatgatcttcagcgacaaccccctgggcctgacctgcggcatggtgtgccccaccagcgacctgtgcgtgggcggctgcaacctgtacgccaccgaggagggccccatcaacatcggcggcctgcagcagttcgccaccgaggtgaacggcctgctgcacttccagaacagcgtgagcctgtggttccagaagaccgccaacatcagcttcctgagctgcggcagcctgcaggacgcctag

SEQ ID NO: 79205 - DNA, 1482 bp, synthetic construct
  misc_feature 1..1482: note = Description of Artificial Sequence: Synthetic coding sequence
  source 1..1482: mol_type = other DNA
atgatcctgaacagcctgagcctgtgctaccacaacaagctgatcctggcccccatggtgagagtgggcaccctgcccatgagactgctggccctggactacggcgccgacatcgtgtactgcgaggagctgatcgacctgaagatgatccagtgcaagagagtggtgaacgaggtgctgagcaccgtggacttcgtggcccccgacgacagagtggtgttcagaacctgcgagagagagcagaacagagtggtgttccagatgggcaccagcgacgccgagagagccctggccgtggccagactggtggagaacgacgtggccggcatcgacgtgaacatgggctgccccaagcagtacagcaccaagggcggcatgggcgccgccctgctgagcgaccccgacaagatcgagaagatcctgagcaccctggtgaagggcaccagaagacccgtgacctgcaagatcagaatcctgcccagcctggaggacaccctgagcctggtgaagagaatcgagagaaccggcatcgccgccatcgccgtgcacggcagaaagagagaggagagaccccagcaccccgtgagctgcgaggtgatcaaggccatcgccgacaccctgagcatccccgtgatcgccaacggcggcagccacgaccacatccagcagtacagcgacatcgaggacttcagacaggccaccgccgccagcagcgtgatggtggccagagccgccatgtggaaccccagcatcttcctgaaggagggcctgagacccctggaggaggtgatgcagaagtacatcagatacgccgtgcagtacgacaaccactacaccaacaccaagtactgcctgtgccagatgctgagagagcagctggagagcccccagggcagactgctgcacgccgcccagagcagcagagagatctgcgaggccttcggcctgggcgccttctacgaggagaccacccaggagctggacgcccagcaggccagactgagcgccaagaccagcgagcagaccggcgagcccgccgaggacaccagcggcgtgatcaagatggccgtgaagttcgacagaagagcctaccccgcccagatcacccccaagatgtgcctgctggagtggtgcagaagagagaagctggcccagcccgtgtacgagaccgtgcagagacccctggacagactgttcagcagcatcgtgaccgtggccgagcagaagtaccagagcaccctgtgggacaagagcaagaagctggccgagcaggccgccgccatcgtgtgcctgagaagccagggcctgcccgagggcagactgggcgaggagagccccagcctgcacaagagaaagagagaggcccccgaccaggaccccggcggccccagagcccaggagctggcccagcccggcgacctgtgcaagaagcccttcgtggccctgggcagcggcgaggagagccccctggagggctggtag

SEQ ID NO: 79206 - DNA, 1482 bp, synthetic construct; identical to SEQ ID NO: 79205
  misc_feature 1..1482: note = Description of Artificial Sequence: Synthetic coding sequence
  source 1..1482: mol_type = other DNA

SEQ ID NO: 79207 - DNA, 1377 bp, synthetic construct
  misc_feature 1..1377: note = Description of Artificial Sequence: Synthetic coding sequence
  source 1..1377: mol_type = other DNA
atgatcctgaacagcctgagcctgtgctaccacaacaagctgatcctggcccccatggtgagagtgggcaccctgcccatgagactgctggccctggactacggcgccgacatcgtgtactgcgaggagctgatcgacctgaagatgatccagtgcaagagagtggtgaacgaggtgctgagcaccgtggacttcgtggcccccgacgacagagtggtgttcagaacctgcgagagagagcagaacagagtggtgttccagatgggcggcatgggcgccgccctgctgagcgaccccgacaagatcgagaagatcctgagcaccctggtgaagggcaccagaagacccgtgacctgcaagatcagaatcctgcccagcctggaggacaccctgagcctggtgaagagaatcgagagaaccggcatcgccgccatcgccgtgcacggcagaaagagagaggagagaccccagcaccccgtgagctgcgaggtgatcaaggccatcgccgacaccctgagcatccccgtgatcgccaacggcggcagccacgaccacatccagcagtacagcgacatcgaggacttcagacaggccaccgccgccagcagcgtgatggtggccagagccgccatgtggaaccccagcatcttcctgaaggagggcctgagacccctggaggaggtgatgcagaagtacatcagatacgccgtgcagtacgacaaccactacaccaacaccaagtactgcctgtgccagatgctgagagagcagctggagagcccccagggcagactgctgcacgccgcccagagcagcagagagatctgcgaggccttcggcctgggcgccttctacgaggagaccacccaggagctggacgcccagcaggccagactgagcgccaagaccagcgagcagaccggcgagcccgccgaggacaccagcggcgtgatcaagatggccgtgaagttcgacagaagagcctaccccgcccagatcacccccaagatgtgcctgctggagtggtgcagaagagagaagctggcccagcccgtgtacgagaccgtgcagagacccctggacagactgttcagcagcatcgtgaccgtggccgagcagaagtaccagagcaccctgtgggacaagagcaagaagctggccgagcaggccgccgccatcgtgtgcctgagaagccagggcctgcccgagggcagactgggcgaggagagccccagcctgcacaagagaaagagagaggcccccgaccaggaccccggcggccccagagcccaggagctggcccagcccggcgacctgtgcaagaagcccttcgtggccctgggcagcggcgaggagagccccctggagggctggtag

SEQ ID NO: 79208 - DNA, 858 bp, synthetic construct
  misc_feature 1..858: note = Description of Artificial Sequence: Synthetic coding sequence
  source 1..858: mol_type = other DNA
atggccggcctgggccaccccgccgccttcggcagagccacccacgccgtggtgagagccctgcccgagagcctgggccagcacgccctgagaagcgccaagggcgaggaggtggacgtggccagagccgagagacagcaccagctgtacgtgggcgtgctgggcagcaagctgggcctgcaggtggtggagctgcccgccgacgagagcctgcccgactgcgtgttcgtggaggacgtggccgtggtgtgcgaggagaccgccctgatcaccagacccggcgcccccagcagaagaaaggaggtggacatgatgaaggaggccctggagaagctgcagctgaacatcgtggagatgaaggacgagaacgccaccctggacggcggcgacgtgctgttcaccggcagagagttcttcgtgggcctgagcaagagaaccaaccagagaggcgccgagatcctggccgacaccttcaaggactacgccgtgagcaccgtgcccgtggccgacggcctgcacctgaagagcttctgcagcatggccggccccaacctgatcgccatcggcagcagcgagagcgcccagaaggccctgaagatcatgcagcagatgagcgaccacagatacgacaagctgaccgtgcccgacgacatcgccgccaactgcatctacctgaacatccccaacaagggccacgtgctgctgcacagaacccccgaggagtaccccgagagcgccaaggtgtacgagaagctgaaggaccacatgctgatccccgtgagcatgagcgagctggagaaggtggacggcctgctgacctgctgcagcgtgctgatcaacaagaaggtggacagctag

SEQ ID NO: 79209 - DNA, 579 bp, synthetic construct
  misc_feature 1..579: note = Description of Artificial Sequence: Synthetic coding sequence
  source 1..579: mol_type = other DNA
atgtggctgtacggcctgggccaggtggacatgatgaaggaggccctggagaagctgcagctgaacatcgtggagatgaaggacgagaacgccaccctggacggcggcgacgtgctgttcaccggcagagagttcttcgtgggcctgagcaagagaaccaaccagagaggcgccgagatcctggccgacaccttcaaggactacgccgtgagcaccgtgcccgtggccgacggcctgcacctgaagagcttctgcagcatggccggccccaacctgatcgccatcggcagcagcgagagcgcccagaaggccctgaagatcatgcagcagatgagcgaccacagatacgacaagctgaccgtgcccgacgacatcgccgccaactgcatctacctgaacatccccaacaagggccacgtgctgctgcacagaacccccgaggagtaccccgagagcgccaaggtgtacgagaagctgaaggaccacatgctgatccccgtgagcatgagcgagctggagaaggtggacggcctgctgacctgctgcagcgtgctgatcaacaagaaggtggacagctag

SEQ ID NO: 79210 - DNA, 549 bp, synthetic construct
  misc_feature 1..549: note = Description of Artificial Sequence: Synthetic coding sequence
  source 1..549: mol_type = other DNA
atgatgaaggaggccctggagaagctgcagctgaacatcgtggagatgaaggacgagaacgccaccctggacggcggcgacgtgctgttcaccggcagagagttcttcgtgggcctgagcaagagaaccaaccagagaggcgccgagatcctggccgacaccttcaaggactacgccgtgagcaccgtgcccgtggccgacggcctgcacctgaagagcttctgcagcatggccggccccaacctgatcgccatcggcagcagcgagagcgcccagaaggccctgaagatcatgcagcagatgagcgaccacagatacgacaagctgaccgtgcccgacgacatcgccgccaactgcatctacctgaacatccccaacaagggccacgtgctgctgcacagaacccccgaggagtaccccgagagcgccaaggtgtacgagaagctgaaggaccacatgctgatccccgtgagcatgagcgagctggagaaggtggacggcctgctgacctgctgcagcgtgctgatcaacaagaaggtggacagctag

SEQ ID NO: 79211 - DNA, 858 bp, synthetic construct; identical to SEQ ID NO: 79208
  misc_feature 1..858: note = Description of Artificial Sequence: Synthetic coding sequence
  source 1..858: mol_type = other DNA

SEQ ID NO: 79212 - DNA, 558 bp, synthetic construct
  misc_feature 1..558: note = Description of Artificial Sequence: Synthetic coding sequence
  source 1..558: mol_type = other DNA
atggtggacatgatgaaggaggccctggagaagctgcagctgaacatcgtggagatgaaggacgagaacgccaccctggacggcggcgacgtgctgttcaccggcagagagttcttcgtgggcctgagcaagagaaccaaccagagaggcgccgagatcctggccgacaccttcaaggactacgccgtgagcaccgtgcccgtggccgacggcctgcacctgaagagcttctgcagcatggccggccccaacctgatcgccatcggcagcagcgagagcgcccagaaggccctgaagatcatgcagcagatgagcgaccacagatacgacaagctgaccgtgcccgacgacatcgccgccaactgcatctacctgaacatccccaacaagggccacgtgctgctgcacagaacccccgaggagtaccccgagagcgccaaggtgtacgagaagctgaaggaccacatgctgatccccgtgagcatgagcgagctggagaaggtggacggcctgctgacctgctgcagcgtgctgatcaacaagaaggtggacagctag

SEQ ID NO: 79213 - DNA, 858 bp, synthetic construct
  misc_feature 1..858: note = Description of Artificial Sequence: Synthetic coding sequence
  source 1..858: mol_type = other DNA
atgggcacccccggcgagggcctgggcagatgcagccacgccctgatcagaggcgtgcccgagagcctggccagcggcgagggcgccggcgccggcctgcccgccctggacctggccaaggcccagagagagcacggcgtgctgggcggcaagctgagacagagactgggcctgcagctgctggagctgccccccgaggagagcctgcccctgggccccctgctgggcgacaccgccgtgatccagggcgacaccgccctgatcaccagaccctggagccccgccagaagacccgaggtggacggcgtgagaaaggccctgcaggacctgggcctgagaatcgtggagatcggcgacgagaacgccaccctggacggcaccgacgtgctgttcaccggcagagagttcttcgtgggcctgagcaagtggaccaaccacagaggcgccgagatcgtggccgacaccttcagagacttcgccgtgagcaccgtgcccgtgagcggccccagccacctgagaggcctgtgcggcatgggcggccccagaaccgtggtggccggcagcagcgacgccgcccagaaggccgtgagagccatggccgtgctgaccgaccacccctacgccagcctgaccctgcccgacgacgccgccgccgactgcctgttcctgagacccggcctgcccggcgtgccccccttcctgctgcacagaggcggcggcgacctgcccaacagccaggaggccctgcagaagctgagcgacgtgaccctggtgcccgtgagctgcagcgagctggagaaggccggcgccggcctgagcagcctgtgcctggtgctgagcaccagaccccacagctag

SEQ ID NO: 79214 - DNA, 858 bp, synthetic construct; identical to SEQ ID NO: 79213
  misc_feature 1..858: note = Description of Artificial Sequence: Synthetic coding sequence
  source 1..858: mol_type = other DNA

SEQ ID NO: 79215 - DNA, 858 bp, synthetic construct; identical to SEQ ID NO: 79213
  misc_feature 1..858: note = Description of Artificial Sequence: Synthetic coding sequence
  source 1..858: mol_type = other DNA

SEQ ID NO: 79216 - DNA, 858 bp, synthetic construct; identical to SEQ ID NO: 79213
  misc_feature 1..858: note = Description of Artificial Sequence: Synthetic coding sequence
  source 1..858: mol_type = other DNA

SEQ ID NO: 79217 - DNA, 858 bp, synthetic construct; identical to SEQ ID NO: 79213
  misc_feature 1..858: note = Description of Artificial Sequence: Synthetic coding sequence
  source 1..858: mol_type = other DNA

SEQ ID NO: 79218 - DNA, 858 bp, synthetic construct; identical to SEQ ID NO: 79213
  misc_feature 1..858: note = Description of Artificial Sequence: Synthetic coding sequence
  source 1..858: mol_type = other DNA

SEQ ID NO: 79219 - DNA, 858 bp, synthetic construct; identical to SEQ ID NO: 79213
  misc_feature 1..858: note = Description of Artificial Sequence: Synthetic coding sequence
  source 1..858: mol_type = other DNA

SEQ ID NO: 79220 - DNA, 567 bp, synthetic construct
  misc_feature 1..567: note = Description of Artificial Sequence: Synthetic coding sequence
  source 1..567: mol_type = other DNA
tgaagaagacccgaggtggacggcgtgagaaaggccctgcaggacctgggcctgagaatcgtggagatcggcgacgagaacgccaccctggacggcaccgacgtgctgttcaccggcagagagttcttcgtgggcctgagcaagtggaccaaccacagaggcgccgagatcgtggccgacaccttcagagacttcgccgtgagcaccgtgcccgtgagcggccccagccacctgagaggcctgtgcggcatgggcggccccagaaccgtggtggccggcagcagcgacgccgcccagaaggccgtgagaatgacccagctgctgaccgtgagcttcttcgtgctgggctgcctggtgtgccccctgagcagctgcaccgtggaggtgggcatctgccccaccgccagaagacactgcagaagcagcctgatgagcccctggtacctgtgccccgcccagaactggagaagactggcccccggcagcgcccccagcgcctggtgcagcgcccacgcccccaccgccgagggcctggccctgggctactgctggcccggcgtgggctag

SEQ ID NO: 79221 - DNA, 567 bp, synthetic construct; identical to SEQ ID NO: 79220
  misc_feature 1..567: note = Description of Artificial Sequence: Synthetic coding sequence
  source 1..567: mol_type = other DNA

SEQ ID NO: 79222 - DNA, 858 bp, synthetic construct; identical to SEQ ID NO: 79213
  misc_feature 1..858: note = Description of Artificial Sequence: Synthetic coding sequence
  source 1..858: mol_type = other DNA

SEQ ID NO: 79223 - DNA, 858 bp, synthetic construct; identical to SEQ ID NO: 79213
  misc_feature 1..858: note = Description of Artificial Sequence: Synthetic coding sequence
  source 1..858: mol_type = other DNA

SEQ ID NO: 79224 - DNA, 858 bp, synthetic construct; identical to SEQ ID NO: 79213
  misc_feature 1..858: note = Description of Artificial Sequence: Synthetic coding sequence
  source 1..858: mol_type = other DNA

SEQ ID NO: 79225 - DNA, 711 bp, synthetic construct
  misc_feature 1..711: note = Description of Artificial Sequence: Synthetic coding sequence
  source 1..711: mol_type = other DNA
atgggcacccccggcgagggcctgggcagatgcagccacgccctgatcagaggcgtgcccgagagcctggccagcggcgagggcgccggcgccggcctgcccgccctggacctggccaaggcccagagagagcacggcgtgctgggcggcaagctgagacagagactgggcctgcagctgctggagctgccccccgaggagagcctgcccctgggccccctgctgggcgacaccgccgtgatccagggcgacaccgccctgatcaccagaccctggagccccgccagaagacccgaggtggacggcgtgagaaaggccctgcaggacctgggcctgagaatcgtggagatcggcgacgagaacgccaccctggacggcaccgacgtgctgttcaccggcagagagttcttcgtgggcctgagcaagtggaccaaccacagaggcgccgagatcgtggccgacaccttcagagacttcgccgtgagcaccgtgcccgtgagcggccccagccacctgagaggcctgtgcggcatgggcggccccagaaccgtggtggccggcagcagcgacgccgcccagaaggccgtgagagccatggccgtgctgaccgaccacccctacgccagcctgaccctgcccgacgacgccgccgccgactgcctgttcctgagacccggcctgcccggcgtgccccccttcctgctgcactag

SEQ ID NO: 79226 - DNA, 681 bp, synthetic construct
  misc_feature 1..681: note = Description of Artificial Sequence: Synthetic coding sequence
  source 1..681: mol_type = other DNA
atgggcacccccggcgagggcctgggcagatgcagccacgccctgatcagaggcgtgcccgagagcctggccagcggcgagggcgccggcgccggcctgcccgccctggacctggccaaggcccagagagagcacggcgtgctgggcggcaagctgagacagagactgggcctgcagctgctggagctgccccccgaggagagcctgcccctgggccccctgctgggcgacaccgccgtgatccagggcgacaccgccctgatcaccagaccctggagccccgccagaagacccgaggtggacggcgtgagaaaggccctgcaggacctgggcctgagaatcgtggagatcggcgacgagaacgccaccctggacggcaccgacgtgctgttcaccggcagagagttcttcgtgggcctgagcaagtggaccaaccacagaggcgccgagatcgtggccgacaccttcagagacttcgccgtgagcaccgtgcccgtgagcggccccagccacctgagaggcctgtgcggcatgggcggccccagaaccgtggtggccggcagcagcgacgccgcccagaaggccgtgagagccatggccgtgctgaccgaccacccctacgccagcctgaccctgcccgacgacgccgccgccgactgcctgttcctgagacccggctag

SEQ ID NO: 79227 - DNA, 711 bp, synthetic construct; identical to SEQ ID NO: 79225
  misc_feature 1..711: note = Description of Artificial Sequence: Synthetic coding sequence
  source 1..711: mol_type = other DNA

SEQ ID NO: 79228 - DNA, 858 bp, synthetic construct; identical to SEQ ID NO: 79213
  misc_feature 1..858: note = Description of Artificial Sequence: Synthetic coding sequence
  source 1..858: mol_type = other DNA

SEQ ID NO: 79229 - DNA, 858 bp, synthetic construct; identical to SEQ ID NO: 79213
  misc_feature 1..858: note = Description of Artificial Sequence: Synthetic coding sequence
  source 1..858: mol_type = other DNA

SEQ ID NO: 79230 - DNA, 858 bp, synthetic construct; identical to SEQ ID NO: 79213
  misc_feature 1..858: note = Description of Artificial Sequence: Synthetic coding sequence
  source 1..858: mol_type = other DNA

SEQ ID NO: 79231 - DNA, 681 bp, synthetic construct; identical to SEQ ID NO: 79226
  misc_feature 1..681: note = Description of Artificial Sequence: Synthetic coding sequence
  source 1..681: mol_type = other DNA

SEQ ID NO: 79232 - DNA, 858 bp, synthetic construct; identical to SEQ ID NO: 79213
  misc_feature 1..858: note = Description of Artificial Sequence: Synthetic coding sequence
  source 1..858: mol_type = other DNA

SEQ ID NO: 79233 - DNA, 681 bp, synthetic construct; identical to SEQ ID NO: 79226
  misc_feature 1..681: note = Description of Artificial Sequence: Synthetic coding sequence
  source 1..681: mol_type = other DNA

SEQ ID NO: 79234 - DNA, 681 bp, synthetic construct; identical to SEQ ID NO: 79226
  misc_feature 1..681: note = Description of Artificial Sequence: Synthetic coding sequence
  source 1..681: mol_type = other DNA

SEQ ID NO: 79235 - DNA, 858 bp, synthetic construct; identical to SEQ ID NO: 79213
  misc_feature 1..858: note = Description of Artificial Sequence: Synthetic coding sequence
  source 1..858: mol_type = other DNA

SEQ ID NO: 79236 - DNA, 681 bp, synthetic construct; identical to SEQ ID NO: 79226
  misc_feature 1..681: note = Description of Artificial Sequence: Synthetic coding sequence
  source 1..681: mol_type = other DNA

SEQ ID NO: 79237 - DNA, 567 bp, synthetic construct; identical to SEQ ID NO: 79220
  misc_feature 1..567: note = Description of Artificial Sequence: Synthetic coding sequence
  source 1..567: mol_type = other DNA

SEQ ID NO: 79238 - DNA, 567 bp, synthetic construct; identical to SEQ ID NO: 79220
  misc_feature 1..567: note = Description of Artificial Sequence: Synthetic coding sequence
  source 1..567: mol_type = other DNA

SEQ ID NO: 79239 - DNA, 681 bp, synthetic construct; identical to SEQ ID NO: 79226
  misc_feature 1..681: note = Description of Artificial Sequence: Synthetic coding sequence
  source 1..681: mol_type = other DNA

SEQ ID NO: 79240 - DNA, 858 bp, synthetic construct; identical to SEQ ID NO: 79213
  misc_feature 1..858: note = Description of Artificial Sequence: Synthetic coding sequence
  source 1..858: mol_type = other DNA

SEQ ID NO: 79241 - DNA, 711 bp, synthetic construct; identical to SEQ ID NO: 79225
  misc_feature 1..711: note = Description of Artificial Sequence: Synthetic coding sequence
  source 1..711: mol_type = other DNA

SEQ ID NO: 79242 - DNA, 711 bp, synthetic construct; identical to SEQ ID NO: 79225
  misc_feature 1..711: note = Description of Artificial Sequence: Synthetic coding sequence
  source 1..711: mol_type = other DNA

SEQ ID NO: 79243 - DNA, 858 bp, synthetic construct; identical to SEQ ID NO: 79213
  misc_feature 1..858: note = Description of Artificial Sequence: Synthetic coding sequence
  source 1..858: mol_type = other DNA

SEQ ID NO: 79244 - DNA, 678 bp, synthetic construct
  misc_feature 1..678: note = Description of Artificial Sequence: Synthetic coding sequence
  source 1..678: mol_type = other DNA
atgggcacccccggcgagggcctgggcagatgcagccacgccctgatcagaggcgtgcccgagagcctggccagcggcgagggcgccggcgccggcctgcccgccctggacctggccaaggcccagagagagcacggcgtgctgggcggcaagctgagacagagactgggcctgcagctgctggagctgccccccgaggagagcctgcccctgggccccctgctgggcgacaccgccgtgatccagggcgacaccgccctgatcaccagaccctggagccccgccagaagacccgaggtggacggcgtgagaaaggccctgcaggacctgggcctgagaatcgtggagatcggcgacgagaacgccaccctggacggcaccgacgtgctgttcaccggcagagagttcttcgtgggcctgagcaagtggaccaaccacagaggcgccgagatcgtggccgacaccttcagagacttcgccgtgagcaccgtgcccgtgagcggccccagccacctgagaggcctgtgcggcatgggcggccccagaaccgtggtggccggcagcagcgacgccgcccagaaggccgtgagagccatggccgtgctgaccgaccacccctacgccagcctgaccctgcccgacgacgccgccgccgactgcctgttcctgagaccctag

SEQ ID NO: 79245 - DNA, 858 bp, synthetic construct; identical to SEQ ID NO: 79213
  misc_feature 1..858: note = Description of Artificial Sequence: Synthetic coding sequence
  source 1..858: mol_type = other DNA

SEQ ID NO: 79246 - DNA, 567 bp, synthetic construct; identical to SEQ ID NO: 79220
  misc_feature 1..567: note = Description of Artificial Sequence: Synthetic coding sequence
  source 1..567: mol_type = other DNA

SEQ ID NO: 79247 - DNA, 567 bp, synthetic construct; identical to SEQ ID NO: 79220
  misc_feature 1..567: note = Description of Artificial Sequence: Synthetic coding sequence
  source 1..567: mol_type = other DNA

SEQ ID NO: 79248 - DNA, 858 bp, synthetic construct; identical to SEQ ID NO: 79213
  misc_feature 1..858: note = Description of Artificial Sequence: Synthetic coding sequence
  source 1..858: mol_type = other DNA

SEQ ID NO: 79249 - DNA, 711 bp, synthetic construct; identical to SEQ ID NO: 79225
  misc_feature 1..711: note = Description of Artificial Sequence: Synthetic coding sequence
  source 1..711: mol_type = other DNA

SEQ ID NO: 79250 - DNA, 567 bp, synthetic construct; identical to SEQ ID NO: 79220
  misc_feature 1..567: note = Description of Artificial Sequence: Synthetic coding sequence
  source 1..567: mol_type = other DNA

SEQ ID NO: 79251 - DNA, 858 bp, synthetic construct; identical to SEQ ID NO: 79213
  misc_feature 1..858: note = Description of Artificial Sequence: Synthetic coding sequence
  source 1..858: mol_type = other DNA

SEQ ID NO: 79252 - DNA, 858 bp, synthetic construct; identical to SEQ ID NO: 79213
  misc_feature 1..858: note = Description of Artificial Sequence: Synthetic coding sequence
  source 1..858: mol_type = other DNA

SEQ ID NO: 79253 - DNA, 711 bp, synthetic construct; identical to SEQ ID NO: 79225
  misc_feature 1..711: note = Description of Artificial Sequence: Synthetic coding sequence
  source 1..711: mol_type = other DNA

SEQ ID NO: 79254 - DNA, 711 bp, synthetic construct; identical to SEQ ID NO: 79225
  misc_feature 1..711: note = Description of Artificial Sequence: Synthetic coding sequence
  source 1..711: mol_type = other DNA

SEQ ID NO: 79255 - DNA, 2601 bp, synthetic construct
  misc_feature 1..2601: note = Description of Artificial Sequence: Synthetic coding sequence
  source 1..2601: mol_type = other DNA
atgctgagacccggcgcccagctgctgagaggcctgctgctgagaagctgccccctgcagggcagccccggcagacccagaagcgtgtgcggcagagagggcgaggagaagccccccctgagcgccgagacccagtggaaggacagagccgagaccgtgatcatcggcggcggctgcgtgggcgtgagcctggcctaccacctggccaaggccggcatgaaggacgtggtgctgctggagaagagcgagctgaccgccggcagcacctggcacgccgccggcctgaccacctacttccaccccggcatcaacctgaagaagatccactacgacagcatcaagctgtacgagaagctggaggaggagaccggccaggtggtgggcttccaccagcccggcagcatcagactggccaccacccccgtgagagtggacgagttcaagtaccagatgaccagaaccggctggcacgccaccgagcagtacctgatcgagcccgagaagatccaggagatgttccccctgctgaacatgaacaaggtgctggccggcctgtacaaccccggcgacggccacatcgacccctacagcctgaccatggccctggccgccggcgccagaaagtgcggcgccctgctgaagtaccccgcccccgtgaccagcctgaaggccagaagcgacggcacctgggacgtggagaccccccagggcagcatgagagccaacagaatcgtgaacgccgccggcttctgggccagagaggtgggcaagatgatcggcctggagcaccccctgatccccgtgcagcaccagtacgtggtgaccagcaccatcagcgaggtgaaggccctgaagagagagctgcccgtgctgagagacctggagggcagctactacctgagacaggagagagacggcctgctgttcggcccctacgagagccaggagaagatgaaggtgcaggacagctgggtgaccaacggcgtgccccccggcttcggcaaggagctgttcgagagcgacctggacagaatcatggagcacatcaaggccgccatggagatggtgcccgtgctgaagaaggccgacatcatcaacgtggtgaacggccccatcacctacagccccgacatcctgcccatggtgggcccccaccagggcgtgagaaactactgggtggccatcggcttcggctacggcatcatccacgccggcggcgtgggcaagtacctgagcgactggatcctgcacggcgagccccccttcgacctgatcgagctggaccccaacagatacggcaagtggaccaccacccagtacaccgaggccaaggccagagagagctacggcttcaacaacatcgtgggctaccccaaggaggagagattcgccggcagacccacccagagagtgagcggcctgtaccagagactggagagcaagtgcagcatgggcttccacgccggctgggagcagccccactggttctacaagcccggccaggacacccagtacagacccagcttcagaagaaccaactggttcgagcccgtgggcagcgagtacaagcaggtgatgcagagagtggccgtgaccgacctgagccccttcggcaagttcaacatcaagggccaggacagcatcagactgctggaccacctgttcgccaacgtgatccccaaggtgggcttcaccaacatcagccacatgctgacccccaagggcagagtgtacgccgagctgaccgtgagccaccagagccccggcgagttcctgctgatcaccggcagcggcagcgagctgcacgacctgagatggatcgaggaggaggccgtgaagggcggctacgacgtggagatcaagaacatcaccgacgagctgggcgtgctgggcgtggccggcccccaggccagaaaggtgctgcagaagctgaccagcgaggacctgagcgacgacgtgttcaagttcctgcagaccaagagcctgaaggtgagcaacatccccgtgaccgccatcagaatcagctacaccggcgagctgggctgggagctgtaccacagaagagaggacagcgtggccctgtacgacgccatcatgaacgccggccaggaggagggcatcgacaacttcggcacctacgccatgaacgccctgagactggagaaggccttcagagcctggggcctggagatgaactgcgacaccaaccccctggaggccggcctggagtacttcgtgaagctgaacaagcccgccgacttcatcggcaagcaggccctgaagcagatcaaggccaagggcctgaagagaagactggtgtgcctgaccctggccaccgacgacgtggaccccgagggcaacgagagcatctggtacaacggcaaggtggtgggcaacaccaccagcggcagctacagctacagcatccagaagagcctggccttcgcctacgtgcccgtgcagctgagcgaggtgggccagcaggtggaggtggagctgctgggcaagaactaccccgccgtgatcatccaggagcccctggtgctgaccgagcccaccagaaacagactgcagaagaagggcggcaaggacaagacctag

SEQ ID NO: 79256 - DNA, 1722 bp, synthetic construct
  misc_feature 1..1722: note = Description of Artificial Sequence: Synthetic coding sequence
  source 1..1722: mol_type = other DNA
atggagagacagagcagaaacagcgacaactggagatggctgtgctggtgcgagagcggcctgagccccggccagagcagagacgagagatgcggccccgccggcgagatcagagcccacggctggatctacctggccagaagattctgggccagagaggtgggcaagatgatcggcctggagcaccccctgatccccgtgcagcaccagtacgtggtgaccagcaccatcagcgaggtgaaggccctgaagagagagctgcccgtgctgagagacctggagggcagctactacctgagacaggagagagacggcctgctgttcggcccctacgagagccaggagaagatgaaggtgcaggacagctgggtgaccaacggcgtgccccccggcttcggcaaggagctgttcgagagcgacctggacagaatcatggagcacatcaaggccgccatggagatggtgcccgtgctgaagaaggccgacatcatcaacgtggtgaacggccccatcacctacagccccgacatcctgcccatggtgggcccccaccagggcgtgagaaactactgggtggccatcggcttcggctacggcatcatccacgccggcggcgtgggcaagtacctgagcgactggatcctgcacggcgagccccccttcgacctgatcgagctggaccccaacagatacggcaagtggaccaccacccagtacaccgaggccaaggccagagagagctacggcttcaacaacatcgtgggctaccccaaggaggagagattcgccggcagacccacccagagagtgagcggcctgtaccagagactggagagcaagtgcagcatgggcttccacgccggctgggagcagccccactggttctacaagcccggccaggacacccagtacagacccagcttcagaagaaccaactggttcgagcccgtgggcagcgagtacaagcaggtgatgcagagagtggccgtgaccgacctgagccccttcggcaagttcaacatcaagggccaggacagcatcagactgctggaccacctgttcgccaacgtgatccccaaggtgggcttcaccaacatcagccacatgctgacccccaagggcagagtgtacgccgagctgaccgtgagccaccagagccccggcgagttcctgctgatcaccggcagcggcagcgagctgcacgacctgagatggatcgaggaggaggccgtgaagggcggctacgacgtggagatcaagaacatcaccgacgagctgggcgtgctgggcgtggccggcccccaggccagaaaggtgctgcagaagctgaccagcgaggacctgagcgacgacgtgttcaagttcctgcagaccaagagcctgaaggtgagcaacatccccgtgaccgccatcagaatcagctacaccggcgagctgggctgggagctgtaccacagaagagaggacagcgtggccctgtacgacgccatcatgaacgccggccaggaggagggcatcgacaacttcggcacctacgccatgaacgccctgagactggagaaggccttcagagcctggggcctggagatgaactgcgacaccaaccccctggaggccggcctggagtacttcgtgaagctgaacaaggaccagaacagctgcttcgcccacttcaaggaggagaacggctgggtgagcagatgggccatcagaccctactag

SEQ ID NO: 79257 - DNA, 1842 bp, synthetic construct
  misc_feature 1..1842: note = Description of Artificial Sequence: Synthetic coding sequence
  source 1..1842: mol_type = other DNA
tacctgatcgagcccgagaagatccaggagatgttccccctgctgaacatgaacaaggtgctggccggcctgtacaaccccggcgacggccacatcgacccctacagcctgaccatggccctggccgccggcgccagaaagtgcggcgccctgctgaagtaccccgcccccgtgaccagcctgaaggccagaagcgacggcacctgggacgtggagaccccccagggcagcatgagagccaacagaatcgtgaacgccgccggcttctgggccagagaggtgggcaagatgatcggcctggagcaccccctgatccccgtgcagcaccagtacgtggtgaccagcaccatcagcgaggtgaaggccctgaagagagagctgcccgtgctgagagacctggagggcagctactacctgagacaggagagagacggcctgctgttcggcccctacgagagccaggagaagatgaaggtgcaggacagctgggtgaccaacggcgtgccccccggcttcggcaaggagctgttcgagagcgacctggacagaatcatggagcacatcaaggccgccatggagatggtgcccgtgctgaagaaggccgacatcatcaacgtggtgaacggccccatcacctacagccccgacatcctgcccatggtgggcccccaccagggcgtgagaaactactgggtggccatcggcttcggctacggcatcatccacgccggcggcgtgggcaagtacctgagcgactggatcctgcacggcgagccccccttcgacctgatcgagctggaccccaacagatacggcaagtggaccaccacccagtacaccgaggccaaggccagagagagctacggcttcaacaacatcgtgggctaccccaaggaggagagattcgccggcagacccacccagagagtgagcggcctgtaccagagactggagagcaagtgcagcatgggcttccacgccggctgggagcagccccactggttctacaagcccggccaggacacccagtacagacccagcttcagaagaaccaactggttcgagcccgtgggcagcgagtacaagcaggtgatgcagagagtggccgtgaccgacctgagccccttcggcaagttcaacatcaagggccaggacagcatcagactgctggaccacctgttcgccaacgtgatccccaaggtgggcttcaccaacatcagccacatgctgacccccaagggcagagtgtacgccgagctgaccgtgagccaccagagccccggcgagttcctgctgatcaccggcagcggcagcgagctgcacgacctgagatggatcgaggaggaggccgtgaagggcggctacgacgtggagatcaagaacatcaccgacgagctgggcgtgctgggcgtggccggcccccaggccagaaaggtgctgcagaagctgaccagcgaggacctgagcgacgacgtgttcaagttcctgcagaccaagagcctgaaggtgagcaacatccccgtgaccgccatcagaatcagctacaccggcgagctgggctgggagctgtaccacagaagagaggacagcgtggccctgtacgacgccatcatgaacgccggccaggaggagggcatcgacaacttcggcacctacgccatgaacgccctgagactggagaaggccttcagagcctggggcctggagatgaactgcgacaccaaccccctggaggccggcctggagtacttcgtgaagctgaacaaggaccagaacagctgcttcgcccacttcaaggaggagaacggctgggtgagcagatgggccatcagaccctactag

SEQ ID NO: 79258 - DNA, 1875 bp, synthetic construct
  misc_feature 1..1875: note = Description of Artificial Sequence: Synthetic coding sequence
  source 1..1875: mol_type = other DNA
atgaccagaaccggctggcacgccaccgagcagtacctgatcgagcccgagaagatccaggagatgttccccctgctgaacatgaacaaggtgctggccggcctgtacaaccccggcgacggccacatcgacccctacagcctgaccatggccctggccgccggcgccagaaagtgcggcgccctgctgaagtaccccgcccccgtgaccagcctgaaggccagaagcgacggcacctgggacgtggagaccccccagggcagcatgagagccaacagaatcgtgaacgccgccggcttctgggccagagaggtgggcaagatgatcggcctggagcaccccctgatccccgtgcagcaccagtacgtggtgaccagcaccatcagcgaggtgaaggccctgaagagagagctgcccgtgctgagagacctggagggcagctactacctgagacaggagagagacggcctgctgttcggcccctacgagagccaggagaagatgaaggtgcaggacagctgggtgaccaacggcgtgccccccggcttcggcaaggagctgttcgagagcgacctggacagaatcatggagcacatcaaggccgccatggagatggtgcccgtgctgaagaaggccgacatcatcaacgtggtgaacggccccatcacctacagccccgacatcctgcccatggtgggcccccaccagggcgtgagaaactactgggtggccatcggcttcggctacggcatcatccacgccggcggcgtgggcaagtacctgagcgactggatcctgcacggcgagccccccttcgacctgatcgagctggaccccaacagatacggcaagtggaccaccacccagtacaccgaggccaaggccagagagagctacggcttcaacaacatcgtgggctaccccaaggaggagagattcgccggcagacccacccagagagtgagcggcctgtaccagagactggagagcaagtgcagcatgggcttccacgccggctgggagcagccccactggttctacaagcccggccaggacacccagtacagacccagcttcagaagaaccaactggttcgagcccgtgggcagcgagtacaagcaggtgatgcagagagtggccgtgaccgacctgagccccttcggcaagttcaacatcaagggccaggacagcatcagactgctggaccacctgttcgccaacgtgatccccaaggtgggcttcaccaacatcagccacatgctgacccccaagggcagagtgtacgccgagctgaccgtgagccaccagagccccggcgagttcctgctgatcaccggcagcggcagcgagctgcacgacctgagatggatcgaggaggaggccgtgaagggcggctacgacgtggagatcaagaacatcaccgacgagctgggcgtgctgggcgtggccggcccccaggccagaaaggtgctgcagaagctgaccagcgaggacctgagcgacgacgtgttcaagttcctgcagaccaagagcctgaaggtgagcaacatccccgtgaccgccatcagaatcagctacaccggcgagctgggctgggagctgtaccacagaagagaggacagcgtggccctgtacgacgccatcatgaacgccggccaggaggagggcatcgacaacttcggcacctacgccatgaacgccctgagactggagaaggccttcagagcctggggcctggagatgaactgcgacaccaaccccctggaggccggcctggagtacttcgtgaagctgaacaaggaccagaacagctgcttcgcccacttcaaggaggagaacggctgggtgagcagatgggccatcagaccctactag

SEQ ID NO: 79259 - DNA, 1185 bp, synthetic construct
  misc_feature 1..1185: note = Description of Artificial Sequence: Synthetic coding sequence
  source 1..1185: mol_type = other DNA
atgtggagctgctggagaaaccagagcagcagactggacctgcccggcacccagtacggcatcatccacgccggcggcgtgggcaagtacctgagcgactggatcctgcacggcgagccccccttcgacctgatcgagctggaccccaacagatacggcaagtggaccaccacccagtacaccgaggccaaggccagagagagctacggcttcaacaacatcgtgggctaccccaaggaggagagattcgccggcagacccacccagagagtgagcggcctgtaccagagactggagagcaagtgcagcatgggcttccacgccggctgggagcagccccactggttctacaagcccggccaggacacccagtacagacccagcttcagaagaaccaactggttcgagcccgtgggcagcgagtacaagcaggtgatgcagagagtggccgtgaccgacctgagccccttcggcaagttcaacatcaagggccaggacagcatcagactgctggaccacctgttcgccaacgtgatccccaaggtgggcttcaccaacatcagccacatgctgacccccaagggcagagtgtacgccgagctgaccgtgagccaccagagccccggcgagttcctgctgatcaccggcagcggcagcgagctgcacgacctgagatggatcgaggaggaggccgtgaagggcggctacgacgtggagatcaagaacatcaccgacgagctgggcgtgctgggcgtggccggcccccaggccagaaaggtgctgcagaagctgaccagcgaggacctgagcgacgacgtgttcaagttcctgcagaccaagagcctgaaggtgagcaacatccccgtgaccgccatcagaatcagctacaccggcgagctgggctgggagctgtaccacagaagagaggacagcgtggccctgtacgacgccatcatgaacgccggccaggaggagggcatcgacaacttcggcacctacgccatgaacgccctgagactggagaaggccttcagagcctggggcctggagatgaactgcgacaccaaccccctggaggccggcctggagtacttcgtgaagctgaacaaggaccagaacagctgcttcgcccacttcaaggaggagaacggctgggtgagcagatgggccatcagaccctactag

SEQ ID NO: 79260 - DNA, 4731 bp, synthetic construct
  misc_feature 1..4731: note = Description of Artificial Sequence: Synthetic coding sequence
  source 1..4731: mol_type = other DNA
atggccgagagaggcctggagcccagccccgccgccgtggccgccctgccccccgaggtgagagcccagctggccgagctggagctggagctgagcgagggcgacatcacccagaagggctacgagaagaagagaagcaagctgctgagcccctacagcccccagacccaggagaccgacagcgccgtgcagaaggagctgagaaaccagacccccgcccccagcgccgcccagaccagcgcccccagcaagtaccacagaaccagaagcggcggcgccagagacgagagatacagaagcgacatccacaccgaggccgtgcaggccgccctggccaagcacaaggagcagaagatggccctgcccatgcccaccaagagaagaagcaccttcgtgcagagccccgccgacgcctgcaccccccccgacaccagcagcgccagcgaggacgagggcagcctgagaagacaggccgccctgagcgccgccctgcagcagagcctgcagaacgccgagagctggatcaacagaagcatccagggcagcagcaccagcagcagcgccagcagcaccctgagccacggcgaggtgaagggcaccagcggcagcctggccgacgtgttcgccaacaccagaatcgagaacttcagcgccccccccgacgtgaccaccaccaccagcagcagcagcagcagcagcagcatcagacccgccaacatcgacctgccccccagcggcatcgtgaagggcatgcacaagggcagcaacagaagcagcctgatggacaccgccgacggcgtgcccgtgagcagcagagtgagcaccaagatccagcagctgctgaacaccctgaagagacccaagagaccccccctgaaggagttcttcgtggacgacagcgaggagatcgtggaggtgccccagcccgaccccaaccagcccaagcccgagggcagacagatgacccccgtgaagggcgagcccctgggcgtgatctgcaactggccccccgccctggagagcgccctgcagagatggggcaccacccaggccaagtgcagctgcctgaccgccctggacatgaccggcaagcccgtgtacaccctgacctacggcaagctgtggagcagaagcctgaagctggcctacaccctgctgaacaagctgggcaccaagaacgagcccgtgctgaagcccggcgacagagtggccctggtgtaccccaacaacgaccccgtgatgttcatggtggccttctacggctgcctgctggccgaggtgatccccgtgcccatcgaggtgcccctgaccagaaaggacgccggcggccagcagatcggcttcctgctgggcagctgcggcatcgccctggccctgaccagcgaggtgtgcctgaagggcctgcccaagacccagaacggcgagatcgtgcagttcaagggctggcccagactgaagtgggtggtgaccgacagcaagtacctgagcaagccccccaaggactggcagccccacatcagccccgccggcaccgagcccgcctacatcgagtacaagaccagcaaggagggcagcgtgatgggcgtgaccgtgagcagactggccatgctgagccactgccaggccctgagccaggcctgcaactacagcgagggcgagaccatcgtgaacgtgctggacttcaagaaggacgccggcctgtggcacggcatgttcgccaacgtgatgaacaagatgcacaccatcagcgtgccctacagcgtgatgaagacctgccccctgagctgggtgcagagagtgcacgcccacaaggccaaggtggccctggtgaagtgcagagacctgcactgggccatgatggcccacagagaccagagagacgtgagcctgagcagcctgagaatgctgatcgtgaccgacggcgccaacccctggagcgtgagcagctgcgacgccttcctgagcctgttccagagccacggcctgaagcccgaggccatctgcccctgcgccaccagcgccgaggccatgaccgtggccatcagaagacccggcgtgcccggcgcccccctgcccggcagagccatcctgagcatgaacggcctgagctacggcgtgatcagagtgaacaccgaggacaagaacagcgccctgaccgtgcaggacgtgggccacgtgatgcccggcggcatgatgtgcatcgtgaagcccgacggccccccccagctgtgcaagaccgacgagatcggcgagatctgcgtgagcagcagaaccggcggcatgatgtacttcggcctggccggcgtgaccaagaacaccttcgaggtgatccccgtgaacagcgccggcagccccgtgggcgacgtgcccttcatcagaagcggcctgctgggcttcgtgggccccggcagcctggtgttcgtggtgggcaagatggacggcctgctgatggtgagcggcagaagacacaacgccgacgacatcgtggccaccggcctggccgtggagagcatcaagaccgtgtacagaggcagaatcgccgtgttcagcgtgagcgtgttctacgacgagagaatcgtggtggtggccgagcagagacccgacgccagcgaggaggacagcttccagtggatgagcagagtgctgcaggccatcgacagcatccaccaggtgggcgtgtactgcctggccctggtgcccgccaacaccctgcccaagacccccctgggcggcatccacatcagccagaccaagcagctgttcctggagggcagcctgcacccctgcaacatcctgatgtgcccccacacctgcgtgaccaacctgcccaagcccagacagaagcagcccggcgtgggccccgccagcgtgatggtgggcaacctggtggccggcaagagaatcgcccaggccgccggcagagacctgggccagatcgaggagaacgacctggtgagaaagcaccagttcctggccgagatcctgcagtggagagcccaggccacccccgaccacgtgctgttcatgctgctgaacgccaagggcaccaccgtgtgcaccgccagctgcctgcagctgcacaagagagccgagagaatcgccagcgtgctgggcgacaagggccacctgaacgccggcgacaacgtggtgctgctgtacccccccggcatcgagctgatcgccgccttctacggctgcctgtacgccggctgcatccccgtgaccgtgagacccccccacgcccagaacctgaccgccaccctgcccaccgtgagaatgatcgtggacgtgagcaaggccgcctgcatcctgaccagccagaccctgatgagactgctgagaagcagagaggccgccgccgccgtggacgtgaagacctggcccaccatcatcgacaccgacgacctgcccagaaagagactgccccagctgtacaagccccccacccccgagatgctggcctacctggacttcagcgtgagcaccaccggcatgctgaccggcgtgaagatgagccacagcgccgtgaacgccctgtgcagagccatcaagctgcagtgcgagctgtacagcagcagacagatcgccatctgcctggacccctactgcggcctgggcttcgccctgtggtgcctgtgcagcgtgtacagcggccaccagagcgtgctgatcccccccatggagctggagaacaacctgttcctgtggctgagcaccgtgaaccagtacaagatcagagacaccttctgcagctacagcgtgatggagctgtgcaccaagggcctgggcaaccaggtggaggtgctgaagaccagaggcatcaacctgagctgcgtgagaacctgcgtggtggtggccgaggagagacccagagtggccctgcagcagagcttcagcaagctgttcaaggacatcggcctgagccccagagccgtgagcaccaccttcggcagcagagtgaacgtggccatctgcctgcagggcaccagcggccccgaccccaccaccgtgtacgtggacctgaagagcctgagacacgacagagtgagactggtggagagaggcgccccccagagcctgctgctgagcgagagcggcaagatcctgcccggcgtgaaggtggtgatcgtgaaccccgagaccaagggccccgtgggcgacagccacctgggcgagatctgggtgaacagcccccacaccgccagcggctactacaccatctacgacagcgagaccctgcaggccgaccacttcaacaccagactgagcttcggcgacgccgcccagaccctgtgggccagaaccggctacctgggcttcgtgagaagaaccgagctgaccgccgccaccggcgagagacacgacgccctgtacgtggtgggcgccctggacgagaccctggagctgagaggcctgagataccaccccatcgacatcgagaccagcgtgagcagaatccacagaagcatcgccgagtgcgccgtgttcacctggaccaacctgctggtggtggtggtggagctgtgcggcagcgagcaggaggccctggacctggtgcccctggtgaccaacgtggtgctggaggagcactacctgatcgtgggcgtggtggtggtggtggaccccggcgtgatccccatcaacagcagaggcgagaagcagagaatgcacctgagagacagcttcctggccgaccagctggaccccatctacgtggcctacaacatgtag

SEQ ID NO: 79261 - DNA, 1179 bp, synthetic construct
  misc_feature 1..1179: note = Description of Artificial Sequence: Synthetic coding sequence
  source 1..1179: mol_type = other DNA
atggccgagagaggcctggagcccagccccgccgccgtggccgccctgccccccgaggtgagagcccagctggccgagctggagctggagctgagcgagggcgacatcacccagaagggctacgagaagaagagaagcaagctgctgagcccctacagcccccagacccaggagaccgacagcgccgtgcagaaggagctgagaaaccagacccccgcccccagcgccgcccagaccagcgcccccagcaagtaccacagaaccagaagcggcggcgccagagacgagagatacagaagcgagttcagcctggtgagaatctacagcgaggacatccacaccgaggccgtgcaggccgccctggccaagcacaaggagcagaagatggccctgcccatgcccaccaagagaagaagcaccttcgtgcagagccccgccgacgcctgcaccccccccgacaccagcagcgccagcgaggacgagggcagcctgagaagacaggccgccctgagcgccgccctgcagcagagcctgcagaacgccgagagctggatcaacagaagcatccagggcagcagcaccagcagcagcgccagcagcaccctgagccacggcgaggtgaagggcaccagcggcagcctggccgacgtgttcgccaacaccagaatcgagaacttcagcgccccccccgacgtgaccaccaccaccagcagcagcagcagcagcagcagcatcagacccgccaacatcgacctgccccccagcggcatcgtgaagggcatgcacaagggcagcaacagaagcagcctgatggacaccgccgacggcgtgcccgtgagcagcagagtgagcaccaagatccagcagctgctgaacaccctgaagagacccaagagaccccccctgaaggagttcttcgtggacgacagcgaggagatcgtggaggtgccccagcccgaccccaaccagcccaagcccgagggcagacagatgacccccgtgaagggcgagcccctgggcgtgatctgcaactggccccccgccctggagagcgccctgcagagatggggcaccacccaggccaagtgcagctgcctgaccgccctggacatgaccggcaagcccgtgtacaccctgacctacggcgagagcgccagattccagatcctgctgagctag

SEQ ID NO: 79262 - DNA, 4671 bp, synthetic construct
  misc_feature 1..4671: note = Description of Artificial Sequence: Synthetic coding sequence
  source 1..4671: mol_type = other DNA
atggccgacagaagcctggagggcatggccctgcccctggaggtgagagccagactggccgagctggagctggagctgagcgagggcgacatcacccagaagggctacgagaagaagagaagcaagctgatcggcgcctacctgccccagccccccagagtggaccaggccctgccccaggagagaagagcccccgtgacccccagcagcgccagcagataccacagaagaagaagcagcggcagcagagacgagagatacagaagcgacgtgcacaccgaggccgtgcaggccgccctggccaagcacaaggagagaaagatggccgtgcccatgcccagcaagagaagaagcctggtggtgcagaccagcatggacgcctacaccccccccgacaccagcagcggcagcgaggacgagggcagcgtgcagggcgacagccagggcacccccaccagcagccagggcagcatcaacatggagcactggatcagccaggccatccacggcagcaccaccagcaccaccagcagcagcagcacccagagcggcggcagcggcgccgcccacagactggccgacgtgatggcccagacccacatcgagaaccacagcgccccccccgacgtgaccacctacaccagcgagcacagcatccaggtggagagaccccagggcagcaccggcagcagaaccgcccccaagtacggcaacgccgagctgatggagaccggcgacggcgtgcccgtgagcagcagagtgagcgccaagatccagcagctggtgaacaccctgaagagacccaagagaccccccctgagagagttcttcgtggacgacttcgaggagctgctggaggtgcagcagcccgaccccaaccagcccaagcccgagggcgcccagatgctggccatgagaggcgagcagctgggcgtggtgaccaactggccccccagcctggaggccgccctgcagagatggggcaccatcagccccaaggccccctgcctgaccaccatggacaccaacggcaagcccctgtacatcctgacctacggcaagctgtggaccagaagcatgaaggtggcctacagcatcctgcacaagctgggcaccaagcaggagcccatggtgagacccggcgacagagtggccctggtgttccccaacaacgaccccgccgccttcatggccgccttctacggctgcctgctggccgaggtggtgcccgtgcccatcgaggtgcccctgaccagaaaggacgccggcagccagcagatcggcttcctgctgggcagctgcggcgtgaccgtggccctgaccagcgacgcctgccacaagggcctgcccaagagccccaccggcgagatcccccagttcaagggctggcccaagctgctgtggttcgtgaccgagagcaagcacctgagcaagccccccagagactggttcccccacatcaaggacgccaacaacgacaccgcctacatcgagtacaagacctgcaaggacggcagcgtgctgggcgtgaccgtgaccagaaccgccctgctgacccactgccaggccctgacccaggcctgcggctacaccgaggccgagaccatcgtgaacgtgctggacttcaagaaggacgtgggcctgtggcacggcatcctgaccagcgtgatgaacatgatgcacgtgatcagcatcccctacagcctgatgaaggtgaaccccctgagctggatccagaaggtgtgccagtacaaggccaaggtggcctgcgtgaagagcagagacatgcactgggccctggtggcccacagagaccagagagacatcaacctgagcagcctgagaatgctgatcgtggccgacggcgccaacccctggagcatcagcagctgcgacgccttcctgaacgtgttccagagcaagggcctgagacaggaggtgatctgcccctgcgccagcagccccgaggccctgaccgtggccatcagaagacccaccgacgacagcaaccagccccccggcagaggcgtgctgagcatgcacggcctgacctacggcgtgatcagagtggacagcgaggagaagctgagcgtgctgaccgtgcaggacgtgggcctggtgatgcccggcgccatcatgtgcagcgtgaagcccgacggcgtgccccagctgtgcagaaccgacgagatcggcgagctgtgcgtgtgcgccgtggccaccggcaccagctactacggcctgagcggcatgaccaagaacaccttcgaggtgttccccatgaccagcagcggcgcccccatcagcgagtaccccttcatcagaaccggcctgctgggcttcgtgggccccggcggcctggtgttcgtggtgggcaagatggacggcctgatggtggtgagcggcagaagacacaacgccgacgacatcgtggccaccgccctggccgtggagcccatgaagttcgtgtacagaggcagaatcgccgtgttcagcgtgaccgtgctgcacgacgagagaatcgtgatcgtggccgagcagagacccgacagcaccgaggaggacagcttccagtggatgagcagagtgctgcaggccatcgacagcatccaccaggtgggcgtgtactgcctggccctggtgcccgccaacaccctgcccaagacccccctgggcggcatccacctgagcgagaccaagcagctgttcctggagggcagcctgcacccctgcaacgtgctgatgtgcccccacacctgcgtgaccaacctgcccaagcccagacagaagcagcccgagatcggccccgccagcgtgatggtgggcaacctggtgagcggcaagagaatcgcccaggccagcggcagagacctgggccagatcgaggacaacgaccaggccagaaagttcctgttcctgagcgaggtgctgcagtggagagcccagaccacccccgaccacatcctgtacaccctgctgaactgcagaggcgccatcgccaacagcctgacctgcgtgcagctgcacaagagagccgagaagatcgccgtgatgctgatggagagaggccacctgcaggacggcgaccacgtggccctggtgtacccccccggcatcgacctgatcgccgccttctacggctgcctgtacgccggctgcgtgcccatcaccgtgagacccccccacccccagaacatcgccaccaccctgcccaccgtgaagatgatcgtggaggtgagcagaagcgcctgcctgatgaccacccagctgatctgcaagctgctgagaagcagagaggccgccgccgccgtggacgtgagaacctggcccctgatcctggacaccgacgacctgcccaagaagagacccgcccagatctgcaagccctgcaaccccgacaccctggcctacctggacttcagcgtgagcaccaccggcatgctggccggcgtgaagatgagccacgccgccaccagcgccttctgcagaagcatcaagctgcagtgcgagctgtaccccagcagagaggtggccatctgcctggacccctactgcggcctgggcttcgtgctgtggtgcctgtgcagcgtgtacagcggccaccagagcatcctgatcccccccagcgagctggagaccaaccccgccctgtggctgctggccgtgagccagtacaaggtgagagacaccttctgcagctacagcgtgatggagctgtgcaccaagggcctgggcagccagaccgagagcctgaaggccagaggcctggacctgagcagagtgagaacctgcgtggtggtggccgaggagagacccagaatcgccctgacccagagcttcagcaagctgttcaaggacctgggcctgcaccccagagccgtgagcaccagcttcggctgcagagtgaacctggccatctgcctgcagggcaccagcggccccgaccccaccaccgtgtacgtggacatgagagccctgagacacgacagagtgagactggtggagagaggcagcccccacagcctgcccctgatggagagcggcaagatcctgcccggcgtgagaatcatcatcgccaaccccgagaccaagggccccctgggcgacagccacctgggcgagatctgggtgcacagcgcccacaacgccagcggctacttcaccatctacggcgacgagagcctgcagagcgaccacttcaacagcagactgagcttcggcgacacccagaccatctgggccagaaccggctacctgggcttcctgagaagaaccgagctgaccgacgccaacggcgagagacacgacgccctgtacgtggtgggcgccctggacgaggccatggagctgagaggcatgagataccaccccatcgacatcgagaccagcgtgatcagagcccacaagagcgtgaccgagtgcgccgtgttcacctggaccaacctgctggtggtggtggtggagctggacggcagcgagcaggaggccctggacctggtgcccctggtgaccaacgtggtgctggaggagcactacctgatcgtgggcgtggtggtggtggtggacatcggcgtgatccccatcaacagcagaggcgagaagcagagaatgcacctgagagacggcttcctggccgaccagctggaccccatctacgtggcctacaacatgtag

SEQ ID NO: 79263 - DNA, 1971 bp, synthetic construct
  misc_feature 1..1971: note = Description of Artificial Sequence: Synthetic coding sequence
  source 1..1971: mol_type = other DNA
atggccgtgcccatgcccagcaagagaagaagcctggtggtgcagaccagcatggacgcctacaccccccccgacaccagcagcggcagcgaggacgagggcagcgtgcagggcgacagccagggcacccccaccagcagccagggcagcatcaacatggagcactggatcagccaggccatccacggcagcaccaccagcaccaccagcagcagcagcacccagagcggcggcagcggcgccgcccacagactggccgacgtgatggcccagacccacatcgagaaccacagcgccccccccgacgtgaccacctacaccagcgagcacagcatccaggtggagagaccccagggcagcaccggcagcagaaccgcccccaagtacggcaacgccgagctgatggagaccggcgacggcgtgcccgtgagcagcagagtgagcgccaagatccagcagctggtgaacaccctgaagagacccaagagaccccccctgagagagttcttcgtggacgacttcgaggagctgctggaggtgcagcagcccgaccccaaccagcccaagcccgagggcgcccagatgctggccatgagaggcgagcagctgggcgtggtgaccaactggccccccagcctggaggccgccctgcagagatggggcaccatcagccccaaggccccctgcctgaccaccatggacaccaacggcaagcccctgtacatcctgacctacggcaagctgtggaccagaagcatgaaggtggcctacagcatcctgcacaagctgggcaccaagcaggagcccatggtgagacccggcgacagagtggccctggtgttccccaacaacgaccccgccgccttcatggccgccttctacggctgcctgctggccgaggtggtgcccgtgcccatcgaggtgcccctgaccagaaaggacgccggcagccagcagatcggcttcctgctgggcagctgcggcgtgaccgtggccctgaccagcgacgcctgccacaagggcctgcccaagagccccaccggcgagatcccccagttcaagggctggcccaagctgctgtggttcgtgaccgagagcaagcacctgagcaagccccccagagactggttcccccacatcaaggacgccaacaacgacaccgcctacatcgagtacaagacctgcaaggacggcagcgtgctgggcgtgaccgtgaccagaaccgccctgctgacccactgccaggccctgacccaggcctgcggctacaccgaggccgagaccatcgtgaacgtgctggacttcaagaaggacgtgggcctgtggcacggcatcctgaccagcgtgatgaacatgatgcacgtgatcagcatcccctacagcctgatgaaggtgaaccccctgagctggatccagaaggtgtgccagtacaaggccaaggtggcctgcgtgaagagcagagacatgcactgggccctggtggcccacagagaccagagagacatcaacctgagcagcctgagaatgctgatcgtggccgacggcgccaacccctggagcatcagcagctgcgacgccttcctgaacgtgttccagagcaagggcctgagacaggaggtgatctgcccctgcgccagcagccccgaggccctgaccgtggccatcagaagacccaccgacgacagcaaccagccccccggcagaggcgtgctgagcatgcacggcctgacctacggcgtgatcagagtggacagcgaggagaagctgagcgtgctgaccgtgcaggacgtgggcctggtgatgcccggcgccatcatgtgcagcgtgaagcccgacggcgtgccccagctgtgcagaaccgacgagatcggcgagctgtgcgtgtgcgccgtggccaccggcaccagctactacggcctgagcggcatgaccaagaacaccttcgagcacaccagcaacaagggcaagtag

SEQ ID NO: 79264 - DNA, 597 bp, synthetic construct
  misc_feature 1..597: note = Description of Artificial Sequence: Synthetic coding sequence
  source 1..597: mol_type = other DNA
atgagccacgccgccaccagcgccttctgcagaagcatcaagctgcagtgcgagctgtaccccagcagagaggtggccatctgcctggacccctactgcggcctgggcttcgtgctgtggtgcctgtgcagcgtgtacagcggccaccagagcatcctgatcccccccagcgagctggagaccaaccccgccctgtggctgctggccgtgagccagtacaaggtgagagacaccttctgcagctacagcgtgatggagctgtgcaccaagggcctgggcagccagaccgagagcctgaaggccagaggcctggacctgagcagagtgagaacctgcgtggtggtggccgaggagagacccagaatcgccctgacccagagcttcagcaagctgttcaaggacctgggcctgcaccccagagccgtgagcaccagcttcggctgcagagtgaacctggccatctgcctgcagtgctgggactacagacacgagccccccagacccgcccccaagtgcttcaagatggtgtacaaggagggcgtgagaagcgtgggcgaggacaagatcagagagaagagaaccaagacctggagatag

SEQ ID NO: 79265 - DNA, 696 bp, synthetic construct
  misc_feature 1..696: note = Description of Artificial Sequence: Synthetic coding sequence
  source 1..696: mol_type = other DNA
tgagagaccatcgtgaacgtgctggacttcaagaaggacgtgggcctgtggcacggcatcctgaccagcgtgatgaacatgatgcacgtgatcagcatcccctacagcctgatgaaggtgaaccccctgagctggatccagaaggtgtgccagtacaaggccaaggtggcctgcgtgaagagcagagacatgcactgggccctggtggcccacagagaccagagagacatcaacctgagcagcctgagaatgctgatcgtggccgacggcgccaacccctggagcatcagcagctgcgacgccttcctgaacgtgttccagagcaagggcctgagacaggaggtgatctgcccctgcgccagcagccccgaggccctgaccgtggccatcagaagacccaccgacgacagcaaccagccccccggcagaggcgtgctgagcatgcacggcctgacctacggcgtgatcagagtggacagcgaggagaagctgagcgtgctgaccgtgcaggacgtgggcctggtgatgcccggcgccatcatgtgcagcgtgaagcccgacggcgtgccccagctgtgcagaaccgacgagatcggcgagctgtgcgtgtgcgccgtggccaccggcaccagctactacggcctgagcggcatgaccaagaacaccttcgagcacaccagcaacaagggcaagtag

SEQ ID NO: 79266 - DNA, 564 bp, synthetic construct
  misc_feature 1..564: note = Description of Artificial Sequence: Synthetic coding sequence
  source 1..564: mol_type = other DNA
atggccgacagaagcctggagggcatggccctgcccctggaggtgagagccagactggccgagctggagctggagctgagcgagggcgacatcacccagaagggctacgagaagaagagaagcaagctgatcggcgcctacctgccccagccccccaccgccaacggcgccgccgtggtgagatgcagactgcagcacagcgagggcgcccccagaagaaccttcagaagcgcccacatcggcgtgtgcgacgtgagagaggccgccgccagagagagagtggccagcaccgccggcaacagacccctgttctacttcagattcggcgtggaccaggccctgccccaggagagaagagcccccgtgacccccagcagcgccagcagataccacagaagaagaagcagcggcagcagagacgagagatacagaagcgacgtgcacaccgaggccgtgcaggccgccctggccaagcacaaggagagaaagatggccgtgcccatgcccagcaagagaagaagcctggtggtgcagaccagcatggacgcctacacccccccctag

SEQ ID NO: 79267 - DNA, 468 bp, synthetic construct
  misc_feature 1..468: note = Description of Artificial Sequence: Synthetic coding sequence
  source 1..468: mol_type = other DNA
tgagtgtacagcggccaccagagcatcctgatcccccccagcgagctggagaccaaccccgccctgtggctgctggccgtgagccagtacaaggtgagagacaccttctgcagctacagcgtgatggagctgtgcaccaagggcctgggcagccagaccgagagcctgaaggccagaggcctggacctgagcagagtgagaacctgcgtggtggtggccgaggagagacccagaatcgccctgacccagagcttcagcaagctgttcaaggacctgggcctgcaccccagagccgtgagcaccagcttcggctgcagagtgaacctggccatctgcctgcagtgctgggactacagacacgagccccccagacccgcccccaagtgcttcaagatggtgtacaaggagggcgtgagaagcgtgggcgaggacaagatcagagagaagagaaccaagacctggagatag

SEQ ID NO: 79268 - DNA, 1446 bp, synthetic construct
  misc_feature 1..1446: note = Description of Artificial Sequence: Synthetic coding sequence
  source 1..1446: mol_type = other DNA
atctgggtgagcagaagcgcctgcctgatgaccacccagctgatctgcaagctgctgagaagcagagaggccgccgccgccgtggacgtgagaacctggcccctgatcctggacaccgacgacctgcccaagaagagacccgcccagatctgcaagccctgcaaccccgacaccctggcctacctggacttcagcgtgagcaccaccggcatgctggccggcgtgaagatgagccacgccgccaccagcgccttctgcagaagcatcaagctgcagtgcgagctgtaccccagcagagaggtggccatctgcctggacccctactgcggcctgggcttcgtgctgtggtgcctgtgcagcgtgtacagcggccaccagagcatcctgatcccccccagcgagctggagaccaaccccgccctgtggctgctggccgtgagccagtacaaggtgagagacaccttctgcagctacagcgtgatggagctgtgcaccaagggcctgggcagccagaccgagagcctgaaggccagaggcctggacctgagcagagtgagaacctgcgtggtggtggccgaggagagacccagaatcgccctgacccagagcttcagcaagctgttcaaggacctgggcctgcaccccagagccgtgagcaccagcttcggctgcagagtgaacctggccatctgcctgcagggcaccagcggccccgaccccaccaccgtgtacgtggacatgagagccctgagacacgacagagtgagactggtggagagaggcagcccccacagcctgcccctgatggagagcggcaagatcctgcccggcgtgagaatcatcatcgccaaccccgagaccaagggccccctgggcgacagccacctgggcgagatctgggtgcacagcgcccacaacgccagcggctacttcaccatctacggcgacgagagcctgcagagcgaccacttcaacagcagactgagcttcggcgacacccagaccatctgggccagaaccggctacctgggcttcctgagaagaaccgagctgaccgacgccaacggcgagagacacgacgccctgtacgtggtgggcgccctggacgaggccatggagctgagaggcatgagataccaccccatcgacatcgagaccagcgtgatcagagcccacaagagcgtgaccgagtgcgccgtgttcacctggaccaacctgctggtggtggtggtggagctggacggcagcgagcaggaggccctggacctggtgcccctggtgaccaacgtggtgctggaggagcactacctgatcgtgggcgtggtggtggtggtggacatcggcgtgatccccatcaacagcagaggcgagaagcagagaatgcacctgagagacggcttcctggccgaccagctggaccccatctacgtggcctacaacatgtag

SEQ ID NO: 79269 - DNA, 1116 bp, synthetic construct
  misc_feature 1..1116: note = Description of Artificial Sequence: Synthetic coding sequence
  source 1..1116: mol_type = other DNA
atgcacggcctgacctacggcgtgatcagagtggacagcgaggagaagctgagcgtgctgaccgtgcaggacgtgggcctggtgatgcccggcgccatcatgtgcagcgtgaagcccgacggcgtgccccagctgtgcagaaccgacgagatcggcgagctgtgcgtgtgcgccgtggccaccggcaccagctactacggcctgagcggcatgaccaagaacaccttcgaggtgttccccatgaccagcagcggcgcccccatcagcgagtaccccttcatcagaaccggcctgctgggcttcgtgggccccggcggcctggtgttcgtggtgggcaagatggacggcctgatggtggtgagcggcagaagacacaacgccgacgacatcgtggccaccgccctggccgtggagcccatgaagttcgtgtacagaggcagaatcgccgtgttcagcgtgaccgtgctgcacgacgagagaatcgtgatcgtggccgagcagagacccgacagcaccgaggaggacagcttccagtggatgagcagagtgctgcaggccatcgacagcatccaccaggtgggcgtgtactgcctggccctggtgcccgccaacaccctgcccaagacccccctgggcggcatccacctgagcgagaccaagcagctgttcctggagggcagcctgcacccctgcaacgtgctgatgtgcccccacacctgcgtgaccaacctgcccaagcccagacagaagcagcccgagatcggccccgccagcgtgatggtgggcaacctggtgagcggcaagagaatcgcccaggccagcggcagagacctgggccagatcgaggacaacgaccaggccagaaagttcctgttcctgagcgaggtgctgcagtggagagcccagaccacccccgaccacatcctgtacaccctgctgaactgcagagtgagaagaggcgccggcctgccctggctgctggccagcagaggcctggcctggttcctgggcgccctgctgctgctgagcctgaaccccttcgccagcgtgctgtgggagttcttcctgtgcttcgccatcctgaccgagaccttcgtgcccagagactgcttctag

SEQ ID NO: 79270 - DNA, 1236 bp, synthetic construct
  misc_feature 1..1236: note = Description of Artificial Sequence: Synthetic coding sequence
  source 1..1236: mol_type = other DNA
atgtggagcggctggtggctgtggcccctggtggccgtgtgcaccgccgacttcttcagagacgaggccgagagaatcatgagagacagccccgtgatcgacggccacaacgacctgccctggcagctgctggacatgttcaacaacagactgcaggacgagagagccaacctgaccaccctggccggcacccacaccaacatccccaagctgagagccggcttcgtgggcggccagttctggagcgtgtacaccccctgcgacacccagaacaaggacgccgtgagaagaaccctggagcagatggacgtggtgcacagaatgtgcagaatgtaccccgagaccttcctgtacgtgaccagcagcgccggcatcagacaggccttcagagagggcaaggtggccagcctgatcggcgtggagggcggccacagcatcgacagcagcctgggcgtgctgagagccctgtaccagctgggcatgagatacctgaccctgacccacagctgcaacaccccctgggccgacaactggctggtggacaccggcgacagcgagccccagagccagggcctgagccccttcggccagagagtggtgaaggagctgaacagactgggcgtgctgatcgacctggcccacgtgagcgtggccaccatgaaggccaccctgcagctgagcagagcccccgtgatcttcagccacagcagcgcctacagcgtgtgcgccagcagaagaaacgtgcccgacgacgtgctgagactggtgaagcagaccgacagcctggtgatggtgaacttctacaacaactacatcagctgcaccaacaaggccaacctgagccaggtggccgaccacctggaccacatcaaggaggtggccggcgccagagccgtgggcttcggcggcgacttcgacggcgtgcccagagtgcccgagggcctggaggacgtgagcaagtaccccgacctgatcgccgagctgctgagaagaaactggaccgaggccgaggtgaagggcgccctggccgacaacctgctgagagtgttcgaggccgtggagcaggccagcaacctgacccaggcccccgaggaggagcccatccccctggaccagctgggcggcagctgcagaacccactacggctacagcagcggcgccagcagcctgcacagacactggggcctgctgctggccagcctggcccccctggtgctgtgcctgagcctgctgtag

SEQ ID NO: 79271 - DNA, 1236 bp, synthetic construct; identical to SEQ ID NO: 79270
  misc_feature 1..1236: note = Description of Artificial Sequence: Synthetic coding sequence
  source 1..1236: mol_type = other DNA

SEQ ID NO: 79272 - DNA, 1236 bp, synthetic construct; identical to SEQ ID NO: 79270
  misc_feature 1..1236: note = Description of Artificial Sequence: Synthetic coding sequence
  source 1..1236: mol_type = other DNA

SEQ ID NO: 79273 - DNA, 381 bp, synthetic construct
  misc_feature 1..381: note = Description of Artificial Sequence: Synthetic coding sequence
  source 1..381: mol_type = other DNA
atgcagcccagcggcctggagggccccggcaccttcggcagatggcccctgctgagcctgctgctgctgctgctgctgctgcagcccgtgacctgcgcctacaccacccccggcccccccagagccctgaccaccctgggcgcccccagagcccacaccatgcccggcacctacgcccccagcaccaccctgagcagccccagcacccagggcctgcaggagcaggccagagccctgatgagagacttccccctggtggacggcagcggccagcccatgtgccacgccagacccagaaccggcatgccctgcgccagcccctggagcagactgaccagctacgccgcctgcgtgccccccatcctgagctggagcctgtag

SEQ ID NO: 79274 - DNA, 1200 bp, synthetic construct
  misc_feature 1..1200: note = Description of Artificial Sequence: Synthetic coding sequence
  source 1..1200: mol_type = other DNA
atgcagcccagcggcctggagggccccggcaccttcggcagatggcccctgctgagcctgctgctgctgctgctgctgctgcagcccgtgacctgcgcctacaccacccccggcccccccagagccctgttctggagcgcctacgtgccctgccagacccaggacagagacgccctgagactgaccctggagcagatcgacctgatcagaagaatgtgcgccagctacagcgagctggagctggtgaccagcgccaaggccctgaacgacacccagaagctggcctgcctgatcggcgtggagggcggccacagcctggacaacagcctgagcatcctgcccaccttctacatgctgggcgtgagatacctgaccctgacccacacctgcaacaccccctgggccgagagcagcgccaagggcgtgcacagcttctacaacaacatcagcggcctgaccgacttcggcgagaaggtggtggccgagatgaacagactgggcatgatggtggacctgagccacgtgagcgacgccgtggccagaagagccctggaggtgagccaggcccccgtgatcttcagccacagcgccgccagaggcgtgtgcaacagcgccagaaacgtgcccgacgacatcctgcagctgctgaagaagaacggcggcgtggtgatggtgagcctgagcatgggcgtgatccagtgcaaccccagcgccaacgtgagcaccgtggccgaccacttcgaccacatcaaggccgtgatcggcagcaagttcatcggcatcggcggcgactacgacggcgccggcaagttcccccagggcctggaggacgtgagcacctaccccgtgctgatcgaggagctgctgagcagaggctggagcgaggaggagctgcagggcgtgctgagaggcaacctgctgagagtgttcagacaggtggagaaggtgcaggaggagaacaagtggcagagccccctggaggacaagttccccgacgagcagctgagcagcagctgccacagcgacctgagcagactgagacagagacagagcctgaccagcggccaggagctgaccgagatccccatccactggaccgccaagctgcccgccaagtggagcgtgagcgagagcagcccccacatggcccccgtgctggccgtggtggccaccttccccgtgctgatcctgtggctgtag

SEQ ID NO: 79275 - DNA, 1461 bp, synthetic construct
  misc_feature 1..1461: note = Description of Artificial Sequence: Synthetic coding sequence
  source 1..1461: mol_type = other DNA
atgcagcccagcggcctggagggccccggcaccttcggcagatggcccctgctgagcctgctgctgctgctgctgctgctgcagcccgtgacctgcgcctacaccacccccggcccccccagagccctgaccaccctgggcgcccccagagcccacaccatgcccggcacctacgcccccagcaccaccctgagcagccccagcacccagggcctgcaggagcaggccagagccctgatgagagacttccccctggtggacggccacaacgacctgcccctggtgctgagacaggtgtaccagaagggcctgcaggacgtgaacctgagaaacttcagctacggccagaccagcctggacagactgagagacggcctggtgggcgcccagttctggagcgcctacgtgccctgccagacccaggacagagacgccctgagactgaccctggagcagatcgacctgatcagaagaatgtgcgccagctacagcgagctggagctggtgaccagcgccaaggccctgaacgacacccagaagctggcctgcctgatcggcgtggagggcggccacagcctggacaacagcctgagcatcctgcccaccttctacatgctgggcgtgagatacctgaccctgacccacacctgcaacaccccctgggccgagagcagcgccaagggcgtgcacagcttctacaacaacatcagcggcctgaccgacttcggcgagaaggtggtggccgagatgaacagactgggcatgatggtggacctgagccacgtgagcgacgccgtggccagaagagccctggaggtgagccaggcccccgtgatcttcagccacagcgccgccagaggcgtgtgcaacagcgccagaaacgtgcccgacgacatcctgcagctgctgaagaagaacggcggcgtggtgatggtgagcctgagcatgggcgtgatccagtgcaaccccagcgccaacgtgagcaccgtggccgaccacttcgaccacatcaaggccgtgatcggcagcaagttcatcggcatcggcggcgactacgacggcgccggcaagttcccccagggcctggaggacgtgagcacctaccccgtgctgatcgaggagctgctgagcagaggctggagcgaggaggagctgcagggcgtgctgagaggcaacctgctgagagtgttcagacaggtggagaaggtgcaggaggagaacaagtggcagagccccctggaggacaagttccccgacgagcagctgagcagcagctgccacagcgacctgagcagactgagacagagacagagcctgaccagcggccaggagctgaccgagatccccatccactggaccgccaagctgcccgccaagtggagcgtgagcgagagcagcccccacatggcccccgtgctggccgtggtggccaccttccccgtgctgatcctgtggctgtag

SEQ ID NO: 79276 - DNA, 1461 bp, synthetic construct; identical to SEQ ID NO: 79275
  misc_feature 1..1461: note = Description of Artificial Sequence: Synthetic coding sequence
  source 1..1461: mol_type = other DNA

SEQ ID NO: 79277 - DNA, 1542 bp, synthetic construct
  misc_feature 1..1542: note = Description of Artificial Sequence: Synthetic coding sequence
  source 1..1542: mol_type = other DNA
atgatcagaacccccctgagcgccagcgcccacagactgctgctgcccggcagcagaggcagaccccccagaaacatgcagcccaccggcagagagggcagcagagccctgagcagaagatacctgagaagactgctgctgctgctgctgctgctgctgctgagacagcccgtgaccagagccgagaccacccccggcgcccccagagccctgagcaccctgggcagccccagcctgttcaccacccccggcgtgcccagcgccctgaccacccccggcctgaccacccccggcacccccaagaccctggacctgagaggcagagcccaggccctgatgagaagcttccccctggtggacggccacaacgacctgccccaggtgctgagacagagatacaagaacgtgctgcaggacgtgaacctgagaaacttcagccacggccagaccagcctggacagactgagagacggcctggtgggcgcccagttctggagcgccagcgtgagctgccagagccaggaccagaccgccgtgagactggccctggagcagatcgacctgatccacagaatgtgcgccagctacagcgagctggagctggtgaccagcgccgagggcctgaacagcagccagaagctggcctgcctgatcggcgtggagggcggccacagcctggacagcagcctgagcgtgctgagaagcttctacgtgctgggcgtgagatacctgaccctgaccttcacctgcagcaccccctgggccgagagcagcaccaagttcagacaccacatgtacaccaacgtgagcggcctgaccagcttcggcgagaaggtggtggaggagctgaacagactgggcatgatgatcgacctgagctacgccagcgacaccctgatcagaagagtgctggaggtgagccaggcccccgtgatcttcagccacagcgccgccagagccgtgtgcgacaacctgctgaacgtgcccgacgacatcctgcagctgctgaagaagaacggcggcatcgtgatggtgaccctgagcatgggcgtgctgcagtgcaacctgctggccaacgtgagcaccgtggccgaccacttcgaccacatcagagccgtgatcggcagcgagttcatcggcatcggcggcaactacgacggcaccggcagattcccccagggcctggaggacgtgagcacctaccccgtgctgatcgaggagctgctgagcagaagctggagcgaggaggagctgcagggcgtgctgagaggcaacctgctgagagtgttcagacaggtggagaaggtgagagaggagagcagagcccagagccccgtggaggccgagttcccctacggccagctgagcaccagctgccacagccacctggtgccccagaacggccaccaggccacccacctggaggtgaccaagcagcccaccaacagagtgccctggagaagcagcaacgccagcccctacctggtgcccggcctggtggccgccgccaccatccccaccttcacccagtggctgtgctag

SEQ ID NO: 79278 - DNA, 2370 bp, synthetic construct
  misc_feature 1..2370: note = Description of Artificial Sequence: Synthetic coding sequence
  source 1..2370: mol_type = other DNA
atgagaaaggtggagagcagaggcgagggcggcagagaggagctgggcagcaacagccccccccagagaaactggaagggcatcgccatcgccctgctggtgatcctggtggtgtgcagcctgatcaccatgagcgtgatcctgctgacccccgacgagctgaccaacagcagcgagaccagactgagcctggaggacctgttcagaaaggacttcgtgctgcacgaccccgaggccagatggatcaacgacaccgacgtggtgtacaagagcgagaacggccacgtgatcaagctgaacatcgagaccaacgccaccaccctgctgctggagaacaccaccttcgtgaccttcaaggccagcagacacagcgtgagccccgacctgaagtacgtgctgctggcctacgacgtgaagcagatcttccactacagctacaccgccagctacgtgatctacaacatccacaccagagaggtgtgggagctgaacccccccgaggtggaggacagcgtgctgcagtacgccgcctggggcgtgcagggccagcagctgatctacatcttcgagaacaacatctactaccagcccgacatcaagagcagcagcctgagactgaccagcagcggcaaggaggagatcatcttcaacggcatcgccgactggctgtacgaggaggagctgctgcacagccacatcgcccactggtggagccccgacggcgagagactggccttcctgatgatcaacgacagcctggtgcccaccatggtgatccccagattcaccggcgccctgtaccccaagggcaagcagtacccctaccccaaggccggccaggtgaaccccaccatcaagctgtacgtggtgaacctgtacggccccacccacaccctggagctgatgccccccgacagcttcaagagcagagagtactacatcaccatggtgaagtgggtgagcaacaccaagaccgtggtgagatggctgaacagagcccagaacatcagcatcctgaccgtgtgcgagaccaccaccggcgcctgcagcaagaagtacgagatgaccagcgacacctggctgagccagcagaacgaggagcccgtgttcagcagagacggcagcaagttcttcatgaccgtgcccgtgaagcagggcggcagaggcgagttccaccacgtggccatgttcctgatccagagcaagagcgagcagatcaccgtgagacacctgaccagcggcaactgggaggtgatcaagatcctggcctacgacgagaccacccagaagatctacttcctgagcaccgagagcagccccagaggcagacagctgtacagcgccagcaccgagggcctgctgaacagacagtgcatcagctgcaacttcatgaaggagcagtgcacctacttcgacgccagcttcagccccatgaaccagcacttcctgctgttctgcgagggccccagagtgcccgtggtgagcctgcacagcaccgacaaccccgccaagtacttcatcctggagagcaacagcatgctgaaggaggccatcctgaagaagaagatcggcaagcccgagatcaagatcctgcacatcgacgactacgagctgcccctgcagctgagcctgcccaaggacttcatggacagaaaccagtacgccctgctgctgatcatggacgaggagcccggcggccagctggtgaccgacaagttccacatcgactgggacagcgtgctgatcgacatggacaacgtgatcgtggccagattcgacggcagaggcagcggcttccagggcctgaagatcctgcaggagatccacagaagactgggcagcgtggaggtgaaggaccagatcaccgccgtgaagttcctgctgaagctgccctacatcgacagcaagagactgagcatcttcggcaagggctacggcggctacatcgccagcatgatcctgaagagcgacgagaagctgttcaagtgcggcagcgtggtggcccccatcaccgacctgaagctgtacgccagcgccttcagcgagagatacctgggcatgcccagcaaggaggagagcacctaccaggccgccagcgtgctgcacaacgtgcacggcctgaaggaggagaacatcctgatcatccacggcaccgccgacaccaaggtgcacttccagcacagcgccgagctgatcaagcacctgatcaaggccggcgtgaactacaccatgcaggtgtaccccgacgagggccacaacgtgagcgagaagagcaagtaccacctgtacagcaccatcctgaagttcttcagcgactgcctgaaggaggagatcagcgtgctgccccaggagcccgaggaggacgagtag

SEQ ID NO: 79279 - DNA, 2403 bp, synthetic construct
  misc_feature 1..2403: note = Description of Artificial Sequence: Synthetic coding sequence
  source 1..2403: mol_type = other DNA
atgaccgccgccaagcaggagccccagcccacccccggcgccagagccagccaggcccagcccgccgaccaggagctgggcagcaacagccccccccagagaaactggaagggcatcgccatcgccctgctggtgatcctggtggtgtgcagcctgatcaccatgagcgtgatcctgctgacccccgacgagctgaccaacagcagcgagaccagactgagcctggaggacctgttcagaaaggacttcgtgctgcacgaccccgaggccagatggatcaacgacaccgacgtggtgtacaagagcgagaacggccacgtgatcaagctgaacatcgagaccaacgccaccaccctgctgctggagaacaccaccttcgtgaccttcaaggccagcagacacagcgtgagccccgacctgaagtacgtgctgctggcctacgacgtgaagcagatcttccactacagctacaccgccagctacgtgatctacaacatccacaccagagaggtgtgggagctgaacccccccgaggtggaggacagcgtgctgcagtacgccgcctggggcgtgcagggccagcagctgatctacatcttcgagaacaacatctactaccagcccgacatcaagagcagcagcctgagactgaccagcagcggcaaggaggagatcatcttcaacggcatcgccgactggctgtacgaggaggagctgctgcacagccacatcgcccactggtggagccccgacggcgagagactggccttcctgatgatcaacgacagcctggtgcccaccatggtgatccccagattcaccggcgccctgtaccccaagggcaagcagtacccctaccccaaggccggccaggtgaaccccaccatcaagctgtacgtggtgaacctgtacggccccacccacaccctggagctgatgccccccgacagcttcaagagcagagagtactacatcaccatggtgaagtgggtgagcaacaccaagaccgtggtgagatggctgaacagagcccagaacatcagcatcctgaccgtgtgcgagaccaccaccggcgcctgcagcaagaagtacgagatgaccagcgacacctggctgagccagcagaacgaggagcccgtgttcagcagagacggcagcaagttcttcatgaccgtgcccgtgaagcagggcggcagaggcgagttccaccacgtggccatgttcctgatccagagcaagagcgagcagatcaccgtgagacacctgaccagcggcaactgggaggtgatcaagatcctggcctacgacgagaccacccagaagatctacttcctgagcaccgagagcagccccagaggcagacagctgtacagcgccagcaccgagggcctgctgaacagacagtgcatcagctgcaacttcatgaaggagcagtgcacctacttcgacgccagcttcagccccatgaaccagcacttcctgctgttctgcgagggccccagagtgcccgtggtgagcctgcacagcaccgacaaccccgccaagtacttcatcctggagagcaacagcatgctgaaggaggccatcctgaagaagaagatcggcaagcccgagatcaagatcctgcacatcgacgactacgagctgcccctgcagctgagcctgcccaaggacttcatggacagaaaccagtacgccctgctgctgatcatggacgaggagcccggcggccagctggtgaccgacaagttccacatcgactgggacagcgtgctgatcgacatggacaacgtgatcgtggccagattcgacggcagaggcagcggcttccagggcctgaagatcctgcaggagatccacagaagactgggcagcgtggaggtgaaggaccagatcaccgccgtgaagttcctgctgaagctgccctacatcgacagcaagagactgagcatcttcggcaagggctacggcggctacatcgccagcatgatcctgaagagcgacgagaagctgttcaagtgcggcagcgtggtggcccccatcaccgacctgaagctgtacgccagcgccttcagcgagagatacctgggcatgcccagcaaggaggagagcacctaccaggccgccagcgtgctgcacaacgtgcacggcctgaaggaggagaacatcctgatcatccacggcaccgccgacaccaaggtgcacttccagcacagcgccgagctgatcaagcacctgatcaaggccggcgtgaactacaccatgcaggtgtaccccgacgagggccacaacgtgagcgagaagagcaagtaccacctgtacagcaccatcctgaagttcttcagcgactgcctgaaggaggagatcagcgtgctgccccaggagcccgaggaggacgagtag

SEQ ID NO: 79280 - DNA, 2391 bp, synthetic construct
  misc_feature 1..2391: note = Description of Artificial Sequence: Synthetic coding sequence
  source 1..2391: mol_type = other DNA
atgaaccagaccgccagcgtgagccaccacatcaagtgccagcccagcaagaccatcaaggagctgggcagcaacagccccccccagagaaactggaagggcatcgccatcgccctgctggtgatcctggtggtgtgcagcctgatcaccatgagcgtgatcctgctgacccccgacgagctgaccaacagcagcgagaccagactgagcctggaggacctgttcagaaaggacttcgtgctgcacgaccccgaggccagatggatcaacgacaccgacgtggtgtacaagagcgagaacggccacgtgatcaagctgaacatcgagaccaacgccaccaccctgctgctggagaacaccaccttcgtgaccttcaaggccagcagacacagcgtgagccccgacctgaagtacgtgctgctggcctacgacgtgaagcagatcttccactacagctacaccgccagctacgtgatctacaacatccacaccagagaggtgtgggagctgaacccccccgaggtggaggacagcgtgctgcagtacgccgcctggggcgtgcagggccagcagctgatctacatcttcgagaacaacatctactaccagcccgacatcaagagcagcagcctgagactgaccagcagcggcaaggaggagatcatcttcaacggcatcgccgactggctgtacgaggaggagctgctgcacagccacatcgcccactggtggagccccgacggcgagagactggccttcctgatgatcaacgacagcctggtgcccaccatggtgatccccagattcaccggcgccctgtaccccaagggcaagcagtacccctaccccaaggccggccaggtgaaccccaccatcaagctgtacgtggtgaacctgtacggccccacccacaccctggagctgatgccccccgacagcttcaagagcagagagtactacatcaccatggtgaagtgggtgagcaacaccaagaccgtggtgagatggctgaacagagcccagaacatcagcatcctgaccgtgtgcgagaccaccaccggcgcctgcagcaagaagtacgagatgaccagcgacacctggctgagccagcagaacgaggagcccgtgttcagcagagacggcagcaagttcttcatgaccgtgcccgtgaagcagggcggcagaggcgagttccaccacgtggccatgttcctgatccagagcaagagcgagcagatcaccgtgagacacctgaccagcggcaactgggaggtgatcaagatcctggcctacgacgagaccacccagaagatctacttcctgagcaccgagagcagccccagaggcagacagctgtacagcgccagcaccgagggcctgctgaacagacagtgcatcagctgcaacttcatgaaggagcagtgcacctacttcgacgccagcttcagccccatgaaccagcacttcctgctgttctgcgagggccccagagtgcccgtggtgagcctgcacagcaccgacaaccccgccaagtacttcatcctggagagcaacagcatgctgaaggaggccatcctgaagaagaagatcggcaagcccgagatcaagatcctgcacatcgacgactacgagctgcccctgcagctgagcctgcccaaggacttcatggacagaaaccagtacgccctgctgctgatcatggacgaggagcccggcggccagctggtgaccgacaagttccacatcgactgggacagcgtgctgatcgacatggacaacgtgatcgtggccagattcgacggcagaggcagcggcttccagggcctgaagatcctgcaggagatccacagaagactgggcagcgtggaggtgaaggaccagatcaccgccgtgaagttcctgctgaagctgccctacatcgacagcaagagactgagcatcttcggcaagggctacggcggctacatcgccagcatgatcctgaagagcgacgagaagctgttcaagtgcggcagcgtggtggcccccatcaccgacctgaagctgtacgccagcgccttcagcgagagatacctgggcatgcccagcaaggaggagagcacctaccaggccgccagcgtgctgcacaacgtgcacggcctgaaggaggagaacatcctgatcatccacggcaccgccgacaccaaggtgcacttccagcacagcgccgagctgatcaagcacctgatcaaggccggcgtgaactacaccatgcaggtgtaccccgacgagggccacaacgtgagcgagaagagcaagtaccacctgtacagcaccatcctgaagttcttcagcgactgcctgaaggaggagatcagcgtgctgccccaggagcccgaggaggacgagtag

SEQ ID NO: 79281 - DNA, 294 bp, synthetic construct
  misc_feature 1..294: note = Description of Artificial Sequence: Synthetic coding sequence
  source 1..294: mol_type = other DNA
atgagcgtgatcctgctgacccccgacgagctgaccaacagcagcgagaccagactgagcctggaggacctgttcagaaaggacttcgtgctgcacgaccccgaggccagatggatcaacgacaccgacgtggtgtacaagagcgagaacggccacgtgatcaagctgaacatcgagaccaacgccaccaccctgctgctggagaacaccaccttcgtgaccttcaaggccagcagacacagcgtgagccccgacctgaagtacgtgctgctggcctacgacgtgaagcagtag

SEQ ID NO: 79282 - DNA, 1803 bp, synthetic construct
  misc_feature 1..1803: note = Description of Artificial Sequence: Synthetic coding sequence
  source 1..1803: mol_type = other DNA
ctgagcatcctgatcctgaccagcaacgagctgaccaacagcagcgagaccagactgagcctggaggacctgttcagaaaggacttcgtgctgcacgaccccgaggccagatggatcaacgacaccgacgtggtgtacaagagcgagaacggccacgtgatcaagctgaacatcgagaccaacgccaccaccctgctgctggagaacaccaccttcgtgaccttcaaggccagcagacacagcgtgagccccgacctgaagtacgtgctgctggcctacgacgtgaagcagatcttccactacagctacaccgccagctacgtgatctacaacatccacaccagagaggtgtgggagctgaacccccccgaggtggaggacagcgtgctgcagtacgccgcctggggcgtgcagggccagcagctgatctacatcttcgagaacaacatctactaccagcccgacatcaagagcagcagcctgagactgaccagcagcggcaaggaggagatcatcttcaacggcatcgccgactggctgtacgaggaggagctgctgcacagccacatcgcccactggtggagccccgacggcgagagactggccttcctgatgatcaacgacagcctggtgcccaccatggtgatccccagattcaccggcgccctgtaccccaagggcaagcagtacccctaccccaaggccggccaggtgaaccccaccatcaagctgtacgtggtgaacctgtacggccccacccacaccctggagctgatgccccccgacagcttcaagagcagagagtactacatcaccatggtgaagtgggtgagcaacaccaagaccgtggtgagatggctgaacagagcccagaacatcagcatcctgaccgtgtgcgagaccaccaccggcgcctgcagcaagaagtacgagatgaccagcgacacctggctgagccagcagaacgaggagcccgtgttcagcagagacggcagcaagttcttcatgaccgtgcccgtgaagcagggcggcagaggcgagttccaccacgtggccatgttcctgatccagagcaagagcgagcagatcaccgtgagacacctgaccagcggcaactgggaggtgatcaagatcctggcctacgacgagaccacccagaagatctacttcctgagcaccgagagcagccccagaggcagacagctgtacagcgccagcaccgagggcctgctgaacagacagtgcatcagctgcaacttcatgaaggagcagtgcacctacttcgacgccagcttcagccccatgaaccagcacttcctgctgttctgcgagggccccagagtgcccgtggtgagcctgcacagcaccgacaaccccgccaagtacttcatcctggagagcaacagcatgctgaaggaggccatcctgaagaagaagatcggcaagcccgagatcaagatcctgcacatcgacgactacgagctgcccctgcagctgagcctgcccaaggacttcatggacagaaaccagtacgccctgctgctgatcatggacgaggagcccggcggccagctggtgaccgacaagttccacatcgactgggacagcgtgctgatcgacatggacaacgtgatcgtggccagattcgacggcagaggcagcggcttccagggcctgaagatcctgcaggagatccacagaagactgggcagcgtggaggtgaaggaccagatcaccgccgtgaagttcctgctgaagctgccctacatcgacagcaagagactgagcatcttcggcaagtag

SEQ ID NO: 79283 - DNA, 2241 bp, synthetic construct
  misc_feature 1..2241: note = Description of Artificial Sequence: Synthetic coding sequence
  source 1..2241: mol_type = other DNA
atgagcgtgatcctgctgacccccgacgagctgaccaacagcagcgagaccagactgagcctggaggacctgttcagaaaggacttcgtgctgcacgaccccgaggccagatggatcaacgacaccgacgtggtgtacaagagcgagaacggccacgtgatcaagctgaacatcgagaccaacgccaccaccctgctgctggagaacaccaccttcgtgaccttcaaggccagcagacacagcgtgagccccgacctgaagtacgtgctgctggcctacgacgtgaagcagatcttccactacagctacaccgccagctacgtgatctacaacatccacaccagagaggtgtgggagctgaacccccccgaggtggaggacagcgtgctgcagtacgccgcctggggcgtgcagggccagcagctgatctacatcttcgagaacaacatctactaccagcccgacatcaagagcagcagcctgagactgaccagcagcggcaaggaggagatcatcttcaacggcatcgccgactggctgtacgaggaggagctgctgcacagccacatcgcccactggtggagccccgacggcgagagactggccttcctgatgatcaacgacagcctggtgcccaccatggtgatccccagattcaccggcgccctgtaccccaagggcaagcagtacccctaccccaaggccggccaggtgaaccccaccatcaagctgtacgtggtgaacctgtacggccccacccacaccctggagctgatgccccccgacagcttcaagagcagagagtactacatcaccatggtgaagtgggtgagcaacaccaagaccgtggtgagatggctgaacagagcccagaacatcagcatcctgaccgtgtgcgagaccaccaccggcgcctgcagcaagaagtacgagatgaccagcgacacctggctgagccagcagaacgaggagcccgtgttcagcagagacggcagcaagttcttcatgaccgtgcccgtgaagcagggcggcagaggcgagttccaccacgtggccatgttcctgatccagagcaagagcgagcagatcaccgtgagacacctgaccagcggcaactgggaggtgatcaagatcctggcctacgacgagaccacccagaagatctacttcctgagcaccgagagcagccccagaggcagacagctgtacagcgccagcaccgagggcctgctgaacagacagtgcatcagctgcaacttcatgaaggagcagtgcacctacttcgacgccagcttcagccccatgaaccagcacttcctgctgttctgcgagggccccagagtgcccgtggtgagcctgcacagcaccgacaaccccgccaagtacttcatcctggagagcaacagcatgctgaaggaggccatcctgaagaagaagatcggcaagcccgagatcaagatcctgcacatcgacgactacgagctgcccctgcagctgagcctgcccaaggacttcatggacagaaaccagtacgccctgctgctgatcatggacgaggagcccggcggccagctggtgaccgacaagttccacatcgactgggacagcgtgctgatcgacatggacaacgtgatcgtggccagattcgacggcagaggcagcggcttccagggcctgaagatcctgcaggagatccacagaagactgggcagcgtggaggtgaaggaccagatcaccgccgtgaagttcctgctgaagctgccctacatcgacagcaagagactgagcatcttcggcaagggctacggcggctacatcgccagcatgatcctgaagagcgacgagaagctgttcaagtgcggcagcgtggtggcccccatcaccgacctgaagctgtacgccagcgccttcagcgagagatacctgggcatgcccagcaaggaggagagcacctaccaggccgccagcgtgctgcacaacgtgcacggcctgaaggaggagaacatcctgatcatccacggcaccgccgacaccaaggtgcacttccagcacagcgccgagctgatcaagcacctgatcaaggccggcgtgaactacaccatgcaggtgtaccccgacgagggccacaacgtgagcgagaagagcaagtaccacctgtacagcaccatcctgaagttcttcagcgactgcctgaaggaggagatcagcgtgctgccccaggagcccgaggaggacgagtag

SEQ ID NO: 79284 - DNA, 954 bp, synthetic construct
  misc_feature 1..954: note = Description of Artificial Sequence: Synthetic coding sequence
  source 1..954: mol_type = other DNA
atggccgacacccagtacatcctgcccaacgacatcggcgtgagcagcctggactgcagagaggccttcagactgctgagccccaccgagagactgtacgcctaccacctgagcagagccgcctggtacggcggcctggccgtgctgctgcagaccagccccgaggccccctacatctacgccctgctgagcagactgttcagagcccaggaccccgaccagctgagacagcacgccctggccgagggcctgaccgaggaggagtaccaggccttcctggtgtacgccgccggcgtgtacagcaacatgggcaactacaagagcttcggcgacaccaagttcgtgcccaacctgcccaaggagaagctggagagagtgatcctgggcagcgaggccgcccagcagcaccccgaggaggtgagaggcctgtggcagacctgcggcgagctgatgttcagcctggagcccagactgagacacctgggcctgggcaaggagggcatcaccacctacttcagcggcaactgcaccatggaggacgccagagtgagactggacagaagcaagatcagaagcgtgggcaagcccgccctggagagattcctgagaagactgcaggtgctgaagagcaccggcgacgtggccggcggcagagccctgtacgagggctacgccaccgtgaccgacgccccccccgagtgcttcctgaccctgagagacaccgtgctgctgagaaaggagagcagaaagctgatcgtgcagcccaacaccagactggagggcagcgacgtgcagctgctggagtacgaggccagcgccgccggcctgatcagaagcttcagcgagagattccccgaggacggccccgagctggaggagatcctgacccagctggccaccgccgacgccagattctggaagggccccagcgaggcccccagcggccaggcctag

SEQ ID NO: 79285 - DNA, 2214 bp, synthetic construct
  misc_feature 1..2214: note = Description of Artificial Sequence: Synthetic coding sequence
  source 1..2214: mol_type = other DNA
atggccgacacccagtacatcctgcccaacgacatcggcgtgagcagcctggactgcagagaggccttcagactgctgagccccaccgagagactgtacgcctaccacctgagcagagccgcctggtacggcggcctggccgtgctgctgcagaccagccccgaggccccctacatctacgccctgctgagcagactgttcagagcccaggaccccgaccagctgagacagcacgccctggccgagggcctgaccgaggaggagtaccaggccttcctggtgtacgccgccggcgtgtacagcaacatgggcaactacaagagcttcggcgacaccaagttcgtgcccaacctgcccaaggagaagctggagagagtgatcctgggcagcgaggccgcccagcagcaccccgaggaggtgagaggcctgtggcagacctgcggcgagctgatgttcagcctggagcccagactgagacacctgggcctgggcaaggagggcatcaccacctacttcagcggcaactgcaccatggaggacgccaagctggcccaggacttcctggacagccagaacctgagcgcctacaacaccagactgttcaaggaggtggacggcgagggcaagccctactacgaggtgagactggccagcgtgctgggcagcgagcccagcctggacagcgaggtgaccagcaagctgaagagctacgagttcagaggcagccccttccaggtgaccagaggcgactacgcccccatcctgcagaaggtggtggagcagctggagaaggccaaggcctacgccgccaacagccaccagggccagatgctggcccagtacatcgagagcttcacccagggcagcatcgaggcccacaagagaggcagcagattctggatccaggacaagggccccatcgtggagagctacatcggcttcatcgagagctacagagaccccttcggcagcagaggcgagttcgagggcttcgtggccgtggtgaacaaggccatgagcgccaagttcgagagactggtggccagcgccgagcagctgctgaaggagctgccctggccccccaccttcgagaaggacaagttcctgacccccgacttcaccagcctggacgtgctgaccttcgccggcagcggcatccccgccggcatcaacatccccaactacgacgacctgagacagaccgagggcttcaagaacgtgagcctgggcaacgtgctggccgtggcctacgccacccagagagagaagctgaccttcctggaggaggacgacaaggacctgtacatcctgtggaagggccccagcttcgacgtgcaggtgggcctgcacgagctgctgggccacggcagcggcaagctgttcgtgcaggacgagaagggcgccttcaacttcgaccaggagaccgtgatcaaccccgagaccggcgagcagatccagagctggtacagaagcggcgagacctgggacagcaagttcagcaccatcgccagcagctacgaggagtgcagagccgagagcgtgggcctgtacctgtgcctgcacccccaggtgctggagatcttcggcttcgagggcgccgacgccgaggacgtgatctacgtgaactggctgaacatggtgagagccggcctgctggccctggagttctacacccccgaggccttcaactggagacaggcccacatgcaggccagattcgtgatcctgagagtgctgctggaggccggcgagggcctggtgaccatcacccccaccaccggcagcgacggcagacccgacgccagagtgagactggacagaagcaagatcagaagcgtgggcaagcccgccctggagagattcctgagaagactgcaggtgctgaagagcaccggcgacgtggccggcggcagagccctgtacgagggctacgccaccgtgaccgacgccccccccgagtgcttcctgaccctgagagacaccgtgctgctgagaaaggagagcagaaagctgatcgtgcagcccaacaccagactggagggcagcgacgtgcagctgctggagtacgaggccagcgccgccggcctgatcagaagcttcagcgagagattccccgaggacggccccgagctggaggagatcctgacccagctggccaccgccgacgccagattctggaagggccccagcgaggcccccagcggccaggcctag

SEQ ID NO: 79286 - DNA, 2214 bp, synthetic construct; identical to SEQ ID NO: 79285
  misc_feature 1..2214: note = Description of Artificial Sequence: Synthetic coding sequence
  source 1..2214: mol_type = other DNA

SEQ ID NO: 79287 - DNA, 273 bp, synthetic construct
  misc_feature 1..273: note = Description of Artificial Sequence: Synthetic coding sequence
  source 1..273: mol_type = other DNA
atggccgacacccagtacatcctgcccaacgacatcggcgtgagcagcctggactgcagagaggccttcagactgctgagccccaccgagagactgtacgcctaccacctgagcagagccgcctggtacggcggcctggccgtgctgctgcagaccagccccgaggccccctacatctacgccctgctgagcagactgttcagagcccaggaccccgaccagctgagacagcacgccctggccgagggcctgaccgaggaggagtaccagtag

SEQ ID NO: 79288 - DNA, 606 bp, synthetic construct
  misc_feature 1..606: note = Description of Artificial Sequence: Synthetic coding sequence
  source 1..606: mol_type = other DNA
atggccgacacccagtacatcctgcccaacgacatcggcgtgagcagcctggactgcagagaggccttcagactgctgagccccaccgagagactgtacgcctaccacctgagcagagccgcctggtacggcggcctggccgtgctgctgcagaccagccccgaggccccctacatctacgccctgctgagcagactgttcagagcccaggaccccgaccagctgagacagcacgccctggccgagggcctgaccgaggaggagtaccaggccttcctggtgtacgccgccggcgtgtacagcaacatgggcaactacaagagcttcggcgacaccaagttcgtgcccaacctgcccaaggagaagctggagagagtgatcctgggcagcgaggccgcccagcagcaccccgaggaggtgagaggcctgtggcagacctgcggcgagctgatgttcagcctggagcccagactgagacacctgggcctgggcaaggagggcatcaccacctacttcagcggcaactgcaccatggaggacgccaagctggcccaggacttcctggacagccagaacctgagcgcctacaacaccagactgttctag

SEQ ID NO: 79289 - DNA, 2274 bp, synthetic construct
  misc_feature 1..2274: note = Description of Artificial Sequence: Synthetic coding sequence
  source 1..2274: mol_type = other DNA
atgggcgagcccgaggccggcagcgagttcgccaacggcgccgccgccgccgccggccccatggccgacacccagtacatcctgcccaacgacatcggcgtgagcagcctggactgcagagaggccttcagactgctgagccccaccgagagactgtacgcctaccacctgagcagagccgcctggtacggcggcctggccgtgctgctgcagaccagccccgaggccccctacatctacgccctgctgagcagactgttcagagcccaggaccccgaccagctgagacagcacgccctggccgagggcctgaccgaggaggagtaccaggccttcctggtgtacgccgccggcgtgtacagcaacatgggcaactacaagagcttcggcgacaccaagttcgtgcccaacctgcccaaggagaagctggagagagtgatcctgggcagcgaggccgcccagcagcaccccgaggaggtgagaggcctgtggcagacctgcggcgagctgatgttcagcctggagcccagactgagacacctgggcctgggcaaggagggcatcaccacctacttcagcggcaactgcaccatggaggacgccaagctggcccaggacttcctggacagccagaacctgagcgcctacaacaccagactgttcaaggaggtggacggcgagggcaagccctactacgaggtgagactggccagcgtgctgggcagcgagcccagcctggacagcgaggtgaccagcaagctgaagagctacgagttcagaggcagccccttccaggtgaccagaggcgactacgcccccatcctgcagaaggtggtggagcagctggagaaggccaaggcctacgccgccaacagccaccagggccagatgctggcccagtacatcgagagcttcacccagggcagcatcgaggcccacaagagaggcagcagattctggatccaggacaagggccccatcgtggagagctacatcggcttcatcgagagctacagagaccccttcggcagcagaggcgagttcgagggcttcgtggccgtggtgaacaaggccatgagcgccaagttcgagagactggtggccagcgccgagcagctgctgaaggagctgccctggccccccaccttcgagaaggacaagttcctgacccccgacttcaccagcctggacgtgctgaccttcgccggcagcggcatccccgccggcatcaacatccccaactacgacgacctgagacagaccgagggcttcaagaacgtgagcctgggcaacgtgctggccgtggcctacgccacccagagagagaagctgaccttcctggaggaggacgacaaggacctgtacatcctgtggaagggccccagcttcgacgtgcaggtgggcctgcacgagctgctgggccacggcagcggcaagctgttcgtgcaggacgagaagggcgccttcaacttcgaccaggagaccgtgatcaaccccgagaccggcgagcagatccagagctggtacagaagcggcgagacctgggacagcaagttcagcaccatcgccagcagctacgaggagtgcagagccgagagcgtgggcctgtacctgtgcctgcacccccaggtgctggagatcttcggcttcgagggcgccgacgccgaggacgtgatctacgtgaactggctgaacatggtgagagccggcctgctggccctggagttctacacccccgaggccttcaactggagacaggcccacatgcaggccagattcgtgatcctgagagtgctgctggaggccggcgagggcctggtgaccatcacccccaccaccggcagcgacggcagacccgacgccagagtgagactggacagaagcaagatcagaagcgtgggcaagcccgccctggagagattcctgagaagactgcaggtgctgaagagcaccggcgacgtggccggcggcagagccctgtacgagggctacgccaccgtgaccgacgccccccccgagtgcttcctgaccctgagagacaccgtgctgctgagaaaggagagcagaaagctgatcgtgcagcccaacaccagactggagggcagcgacgtgcagctgctggagtacgaggccagcgccgccggcctgatcagaagcttcagcgagagattccccgaggacggccccgagctggaggagatcctgacccagctggccaccgccgacgccagattctggaagggccccagcgaggcccccagcggccaggcctag

SEQ ID NO: 79290 - DNA, 2271 bp, synthetic construct
  misc_feature 1..2271: note = Description of Artificial Sequence: Synthetic coding sequence
  source 1..2271: mol_type = other DNA
atgggcgagcccgaggccggcagcgagttcgccaacggcgccgccgccgccggccccatggccgacacccagtacatcctgcccaacgacatcggcgtgagcagcctggactgcagagaggccttcagactgctgagccccaccgagagactgtacgcctaccacctgagcagagccgcctggtacggcggcctggccgtgctgctgcagaccagccccgaggccccctacatctacgccctgctgagcagactgttcagagcccaggaccccgaccagctgagacagcacgccctggccgagggcctgaccgaggaggagtaccaggccttcctggtgtacgccgccggcgtgtacagcaacatgggcaactacaagagcttcggcgacaccaagttcgtgcccaacctgcccaaggagaagctggagagagtgatcctgggcagcgaggccgcccagcagcaccccgaggaggtgagaggcctgtggcagacctgcggcgagctgatgttcagcctggagcccagactgagacacctgggcctgggcaaggagggcatcaccacctacttcagcggcaactgcaccatggaggacgccaagctggcccaggacttcctggacagccagaacctgagcgcctacaacaccagactgttcaaggaggtggacggcgagggcaagccctactacgaggtgagactggccagcgtgctgggcagcgagcccagcctggacagcgaggtgaccagcaagctgaagagctacgagttcagaggcagccccttccaggtgaccagaggcgactacgcccccatcctgcagaaggtggtggagcagctggagaaggccaaggcctacgccgccaacagccaccagggccagatgctggcccagtacatcgagagcttcacccagggcagcatcgaggcccacaagagaggcagcagattctggatccaggacaagggccccatcgtggagagctacatcggcttcatcgagagctacagagaccccttcggcagcagaggcgagttcgagggcttcgtggccgtggtgaacaaggccatgagcgccaagttcgagagactggtggccagcgccgagcagctgctgaaggagctgccctggccccccaccttcgagaaggacaagttcctgacccccgacttcaccagcctggacgtgctgaccttcgccggcagcggcatccccgccggcatcaacatccccaactacgacgacctgagacagaccgagggcttcaagaacgtgagcctgggcaacgtgctggccgtggcctacgccacccagagagagaagctgaccttcctggaggaggacgacaaggacctgtacatcctgtggaagggccccagcttcgacgtgcaggtgggcctgcacgagctgctgggccacggcagcggcaagctgttcgtgcaggacgagaagggcgccttcaacttcgaccaggagaccgtgatcaaccccgagaccggcgagcagatccagagctggtacagaagcggcgagacctgggacagcaagttcagcaccatcgccagcagctacgaggagtgcagagccgagagcgtgggcctgtacctgtgcctgcacccccaggtgctggagatcttcggcttcgagggcgccgacgccgaggacgtgatctacgtgaactggctgaacatggtgagagccggcctgctggccctggagttctacacccccgaggccttcaactggagacaggcccacatgcaggccagattcgtgatcctgagagtgctgctggaggccggcgagggcctggtgaccatcacccccaccaccggcagcgacggcagacccgacgccagagtgagactggacagaagcaagatcagaagcgtgggcaagcccgccctggagagattcctgagaagactgcaggtgctgaagagcaccggcgacgtggccggcggcagagccctgtacgagggctacgccaccgtgaccgacgccccccccgagtgcttcctgaccctgagagacaccgtgctgctgagaaaggagagcagaaagctgatcgtgcagcccaacaccagactggagggcagcgacgtgcagctgctggagtacgaggccagcgccgccggcctgatcagaagcttcagcgagagattccccgaggacggccccgagctggaggagatcctgacccagctggccaccgccgacgccagattctggaagggccccagcgaggcccccagcggccaggcctag

SEQ ID NO: 79291 - DNA, 2214 bp, synthetic construct; identical to SEQ ID NO: 79285
  misc_feature 1..2214: note = Description of Artificial Sequence: Synthetic coding sequence
  source 1..2214: mol_type = other DNA

SEQ ID NO: 79292 - DNA, 1908 bp, synthetic construct
  misc_feature 1..1908: note = Description of Artificial Sequence: Synthetic coding sequence
  source 1..1908: mol_type = other DNA
atgggcaactacaagagcttcggcgacaccaagttcgtgcccaacctgcccaaggagaagctggagagagtgatcctgggcagcgaggccgcccagcagcaccccgaggaggtgagaggcctgtggcagacctgcggcgagctgatgttcagcctggagcccagactgagacacctgggcctgggcaaggagggcatcaccacctacttcagcggcaactgcaccatggaggacgccaagctggcccaggacttcctggacagccagaacctgagcgcctacaacaccagactgttcaaggaggtggacggcgagggcaagccctactacgaggtgagactggccagcgtgctgggcagcgagcccagcctggacagcgaggtgaccagcaagctgaagagctacgagttcagaggcagccccttccaggtgaccagaggcgactacgcccccatcctgcagaaggtggtggagcagctggagaaggccaaggcctacgccgccaacagccaccagggccagatgctggcccagtacatcgagagcttcacccagggcagcatcgaggcccacaagagaggcagcagattctggatccaggacaagggccccatcgtggagagctacatcggcttcatcgagagctacagagaccccttcggcagcagaggcgagttcgagggcttcgtggccgtggtgaacaaggccatgagcgccaagttcgagagactggtggccagcgccgagcagctgctgaaggagctgccctggccccccaccttcgagaaggacaagttcctgacccccgacttcaccagcctggacgtgctgaccttcgccggcagcggcatccccgccggcatcaacatccccaactacgacgacctgagacagaccgagggcttcaagaacgtgagcctgggcaacgtgctggccgtggcctacgccacccagagagagaagctgaccttcctggaggaggacgacaaggacctgtacatcctgtggaagggccccagcttcgacgtgcaggtgggcctgcacgagctgctgggccacggcagcggcaagctgttcgtgcaggacgagaagggcgccttcaacttcgaccaggagaccgtgatcaaccccgagaccggcgagcagatccagagctggtacagaagcggcgagacctgggacagcaagttcagcaccatcgccagcagctacgaggagtgcagagccgagagcgtgggcctgtacctgtgcctgcacccccaggtgctggagatcttcggcttcgagggcgccgacgccgaggacgtgatctacgtgaactggctgaacatggtgagagccggcctgctggccctggagttctacacccccgaggccttcaactggagacaggcccacatgcaggccagattcgtgatcctgagagtgctgctggaggccggcgagggcctggtgaccatcacccccaccaccggcagcgacggcagacccgacgccagagtgagactggacagaagcaagatcagaagcgtgggcaagcccgccctggagagattcctgagaagactgcaggtgctgaagagcaccggcgacgtggccggcggcagagccctgtacgagggctacgccaccgtgaccgacgccccccccgagtgcttcctgaccctgagagacaccgtgctgctgagaaaggagagcagaaagctgatcgtgcagcccaacaccagactggagggcagcgacgtgcagctgctggagtacgaggccagcgccgccggcctgatcagaagcttcagcgagagattccccgaggacggccccgagctggaggagatcctgacccagctggccaccgccgacgccagattctggaagggccccagcgaggcccccagcggccaggcctag

SEQ ID NO: 79293 - DNA, 2412 bp, synthetic construct
  misc_feature 1..2412: note = Description of Artificial Sequence: Synthetic coding sequence
  source 1..2412: mol_type = other DNA
atgaccaccgccaaggagcccagcgccagcggcaagagcgtgcagcagcaggagcaggagctggtgggcagcaaccccccccagagaaactggaagggcatcgccatcgccctgctggtgatcctggtgatctgcagcctgatcgtgaccagcgtgatcctgctgacccccgccgaggacaacagcctgagccagaagaagaaggtgaccgtggaggacctgttcagcgaggacttcaagatccacgaccccgaggccaagtggatcagcgacaccgagttcatctacagagagcagaagggcaccgtgagactgtggaacgtggagaccaacaccagcaccgtgctgatcgagggcaagaagatcgagagcctgagagccatcagatacgagatcagccccgacagagagtacgccctgttcagctacaacgtggagcccatctaccagcacagctacaccggctactacgtgctgagcaagatcccccacggcgacccccagagcctggacccccccgaggtgagcaacgccaagctgcagtacgccggctggggccccaagggccagcagctgatcttcatcttcgagaacaacatctactactgcgcccacgtgggcaagcaggccatcagagtggtgagcaccggcaaggagggcgtgatctacaacggcctgagcgactggctgtacgaggaggagatcctgaagacccacatcgcccactggtggagccccgacggcaccagactggcctacgccgccatcaacgacagcagagtgcccatcatggagctgcccacctacaccggcagcatctaccccaccgtgaagccctaccactaccccaaggccggcagcgagaaccccagcatcagcctgcacgtgatcggcctgaacggccccacccacgacctggagatgatgccccccgacgaccccagaatgagagagtactacatcaccatggtgaagtgggccaccagcaccaaggtggccgtgacctggctgaacagagcccagaacgtgagcatcctgaccctgtgcgacgccaccaccggcgtgtgcaccaagaagcacgaggacgagagcgaggcctggctgcacagacagaacgaggagcccgtgttcagcaaggacggcagaaagttcttcttcatcagagccatcccccagggcggcagaggcaagttctaccacatcaccgtgagcagcagccagcccaacagcagcaacgacaacatccagagcatcaccagcggcgactgggacgtgaccaagatcctggcctacgacgagaagggcaacaagatctacttcctgagcaccgaggacctgcccagaagaagacagctgtacagcgccaacaccgtgggcaacttcaacagacagtgcctgagctgcgacctggtggagaactgcacctacttcagcgccagcttcagccacagcatggacttcttcctgctgaagtgcgagggccccggcgtgcccatggtgaccgtgcacaacaccaccgacaagaagaagatgttcgacctggagaccaacgagcacgtgaagaaggccatcaacgacagacagatgcccaaggtggagtacagagacatcgagatcgacgactacaacctgcccatgcagatcctgaagcccgccaccttcaccgacaccacccactaccccctgctgctggtggtggacggcacccccggcagccagagcgtggccgagaagttcgaggtgagctgggagaccgtgatggtgagcagccacggcgccgtggtggtgaagtgcgacggcagaggcagcggcttccagggcaccaagctgctgcacgaggtgagaagaagactgggcctgctggaggagaaggaccagatggaggccgtgagaaccatgctgaaggagcagtacatcgacagaaccagagtggccgtgttcggcaaggactacggcggctacctgagcacctacatcctgcccgccaagggcgagaaccagggccagaccttcacctgcggcagcgccctgagccccatcaccgacttcaagctgtacgccagcgccttcagcgagagatacctgggcctgcacggcctggacaacagagcctacgagatgaccaaggtggcccacagagtgagcgccctggaggagcagcagttcctgatcatccaccccaccgccgacgagaagatccacttccagcacaccgccgagctgatcacccagctgatcagaggcaaggccaactacagcctgcagatctaccccgacgagagccactacttcaccagcagcagcctgaagcagcacctgtacagaagcatcatcaacttcttcgtggagtgcttcagaatccaggacaagctgctgaccgtgaccgccaaggaggacgaggaggaggactag

SEQ ID NO: 79294 - DNA, 2598 bp, synthetic construct
  misc_feature 1..2598: note = Description of Artificial Sequence: Synthetic coding sequence
  source 1..2598: mol_type = other DNA
atggccagcctgtaccagagattcaccggcaagatcaacaccagcagaagcttccccgccccccccgaggccagccacctgctgggcggccagggccccgaggaggacggcggcgccggcgccaagcccctgggccccagagcccaggccgccgcccccagagagagaggcggcggcggcggcggcgccggcggcagacccagattccagtaccaggccagaagcgacggcgacgaggaggacgagctggtgggcagcaaccccccccagagaaactggaagggcatcgccatcgccctgctggtgatcctggtgatctgcagcctgatcgtgaccagcgtgatcctgctgacccccgccgaggacaacagcctgagccagaagaagaaggtgaccgtggaggacctgttcagcgaggacttcaagatccacgaccccgaggccaagtggatcagcgacaccgagttcatctacagagagcagaagggcaccgtgagactgtggaacgtggagaccaacaccagcaccgtgctgatcgagggcaagaagatcgagagcctgagagccatcagatacgagatcagccccgacagagagtacgccctgttcagctacaacgtggagcccatctaccagcacagctacaccggctactacgtgctgagcaagatcccccacggcgacccccagagcctggacccccccgaggtgagcaacgccaagctgcagtacgccggctggggccccaagggccagcagctgatcttcatcttcgagaacaacatctactactgcgcccacgtgggcaagcaggccatcagagtggtgagcaccggcaaggagggcgtgatctacaacggcctgagcgactggctgtacgaggaggagatcctgaagacccacatcgcccactggtggagccccgacggcaccagactggcctacgccgccatcaacgacagcagagtgcccatcatggagctgcccacctacaccggcagcatctaccccaccgtgaagccctaccactaccccaaggccggcagcgagaaccccagcatcagcctgcacgtgatcggcctgaacggccccacccacgacctggagatgatgccccccgacgaccccagaatgagagagtactacatcaccatggtgaagtgggccaccagcaccaaggtggccgtgacctggctgaacagagcccagaacgtgagcatcctgaccctgtgcgacgccaccaccggcgtgtgcaccaagaagcacgaggacgagagcgaggcctggctgcacagacagaacgaggagcccgtgttcagcaaggacggcagaaagttcttcttcatcagagccatcccccagggcggcagaggcaagttctaccacatcaccgtgagcagcagccagcccaacagcagcaacgacaacatccagagcatcaccagcggcgactgggacgtgaccaagatcctggcctacgacgagaagggcaacaagatctacttcctgagcaccgaggacctgcccagaagaagacagctgtacagcgccaacaccgtgggcaacttcaacagacagtgcctgagctgcgacctggtggagaactgcacctacttcagcgccagcttcagccacagcatggacttcttcctgctgaagtgcgagggccccggcgtgcccatggtgaccgtgcacaacaccaccgacaagaagaagatgttcgacctggagaccaacgagcacgtgaagaaggccatcaacgacagacagatgcccaaggtggagtacagagacatcgagatcgacgactacaacctgcccatgcagatcctgaagcccgccaccttcaccgacaccacccactaccccctgctgctggtggtggacggcacccccggcagccagagcgtggccgagaagttcgaggtgagctgggagaccgtgatggtgagcagccacggcgccgtggtggtgaagtgcgacggcagaggcagcggcttccagggcaccaagctgctgcacgaggtgagaagaagactgggcctgctggaggagaaggaccagatggaggccgtgagaaccatgctgaaggagcagtacatcgacagaaccagagtggccgtgttcggcaaggactacggcggctacctgagcacctacatcctgcccgccaagggcgagaaccagggccagaccttcacctgcggcagcgccctgagccccatcaccgacttcaagctgtacgccagcgccttcagcgagagatacctgggcctgcacggcctggacaacagagcctacgagatgaccaaggtggcccacagagtgagcgccctggaggagcagcagttcctgatcatccaccccaccgccgacgagaagatccacttccagcacaccgccgagctgatcacccagctgatcagaggcaaggccaactacagcctgcagatctaccccgacgagagccactacttcaccagcagcagcctgaagcagcacctgtacagaagcatcatcaacttcttcgtggagtgcttcagaatccaggacaagctgctgaccgtgaccgccaaggaggacgaggaggaggactag

SEQ ID NO: 79295 - DNA, 2406 bp, synthetic construct
  misc_feature 1..2406: note = Description of Artificial Sequence: Synthetic coding sequence
  source 1..2406: mol_type = other DNA
atgaaggagaaggccatgatcaagaccgccaagatgcagggcaacgtgatggagctggtgggcagcaaccccccccagagaaactggaagggcatcgccatcgccctgctggtgatcctggtgatctgcagcctgatcgtgaccagcgtgatcctgctgacccccgccgaggacaacagcctgagccagaagaagaaggtgaccgtggaggacctgttcagcgaggacttcaagatccacgaccccgaggccaagtggatcagcgacaccgagttcatctacagagagcagaagggcaccgtgagactgtggaacgtggagaccaacaccagcaccgtgctgatcgagggcaagaagatcgagagcctgagagccatcagatacgagatcagccccgacagagagtacgccctgttcagctacaacgtggagcccatctaccagcacagctacaccggctactacgtgctgagcaagatcccccacggcgacccccagagcctggacccccccgaggtgagcaacgccaagctgcagtacgccggctggggccccaagggccagcagctgatcttcatcttcgagaacaacatctactactgcgcccacgtgggcaagcaggccatcagagtggtgagcaccggcaaggagggcgtgatctacaacggcctgagcgactggctgtacgaggaggagatcctgaagacccacatcgcccactggtggagccccgacggcaccagactggcctacgccgccatcaacgacagcagagtgcccatcatggagctgcccacctacaccggcagcatctaccccaccgtgaagccctaccactaccccaaggccggcagcgagaaccccagcatcagcctgcacgtgatcggcctgaacggccccacccacgacctggagatgatgccccccgacgaccccagaatgagagagtactacatcaccatggtgaagtgggccaccagcaccaaggtggccgtgacctggctgaacagagcccagaacgtgagcatcctgaccctgtgcgacgccaccaccggcgtgtgcaccaagaagcacgaggacgagagcgaggcctggctgcacagacagaacgaggagcccgtgttcagcaaggacggcagaaagttcttcttcatcagagccatcccccagggcggcagaggcaagttctaccacatcaccgtgagcagcagccagcccaacagcagcaacgacaacatccagagcatcaccagcggcgactgggacgtgaccaagatcctggcctacgacgagaagggcaacaagatctacttcctgagcaccgaggacctgcccagaagaagacagctgtacagcgccaacaccgtgggcaacttcaacagacagtgcctgagctgcgacctggtggagaactgcacctacttcagcgccagcttcagccacagcatggacttcttcctgctgaagtgcgagggccccggcgtgcccatggtgaccgtgcacaacaccaccgacaagaagaagatgttcgacctggagaccaacgagcacgtgaagaaggccatcaacgacagacagatgcccaaggtggagtacagagacatcgagatcgacgactacaacctgcccatgcagatcctgaagcccgccaccttcaccgacaccacccactaccccctgctgctggtggtggacggcacccccggcagccagagcgtggccgagaagttcgaggtgagctgggagaccgtgatggtgagcagccacggcgccgtggtggtgaagtgcgacggcagaggcagcggcttccagggcaccaagctgctgcacgaggtgagaagaagactgggcctgctggaggagaaggaccagatggaggccgtgagaaccatgctgaaggagcagtacatcgacagaaccagagtggccgtgttcggcaaggactacggcggctacctgagcacctacatcctgcccgccaagggcgagaaccagggccagaccttcacctgcggcagcgccctgagccccatcaccgacttcaagctgtacgccagcgccttcagcgagagatacctgggcctgcacggcctggacaacagagcctacgagatgaccaaggtggcccacagagtgagcgccctggaggagcagcagttcctgatcatccaccccaccgccgacgagaagatccacttccagcacaccgccgagctgatcacccagctgatcagaggcaaggccaactacagcctgcagatctaccccgacgagagccactacttcaccagcagcagcctgaagcagcacctgtacagaagcatcatcaacttcttcgtggagtgcttcagaatccaggacaagctgctgaccgtgaccgccaaggaggacgaggaggaggactag

SEQ ID NO: 79296 - DNA, 2277 bp, synthetic construct
  misc_feature 1..2277: note = Description of Artificial Sequence: Synthetic coding sequence
  source 1..2277: mol_type = other DNA
atgaccaccgccaaggagcccagcgccagcggcaagagcgtgcagcagcaggagcaggagctggtgggcagcaaccccccccagagaaactggaagggcatcgccatcgccctgctggtgatcctggtgatctgcagcctgatcgtgaccagcgtgatcctgctgacccccgccgaggacaacagcctgagccagaagaagaaggtgaccgtggaggacctgttcagcgaggacttcaagatccacgaccccgaggccaagtggatcagcgacaccgagttcatctacagagagcagaagggcaccgtgagactgtggaacgtggagaccaacaccagcaccgtgctgatcgagggcaagaagatcgagagcctgagagccatcagatacgagatcagccccgacagagagtacgccctgttcagctacaacgtggagcccatcttcatcttcgagaacaacatctactactgcgcccacgtgggcaagcaggccatcagagtggtgagcaccggcaaggagggcgtgatctacaacggcctgagcgactggctgtacgaggaggagatcctgaagacccacatcgcccactggtggagccccgacggcaccagactggcctacgccgccatcaacgacagcagagtgcccatcatggagctgcccacctacaccggcagcatctaccccaccgtgaagccctaccactaccccaaggccggcagcgagaaccccagcatcagcctgcacgtgatcggcctgaacggccccacccacgacctggagatgatgccccccgacgaccccagaatgagagagtactacatcaccatggtgaagtgggccaccagcaccaaggtggccgtgacctggctgaacagagcccagaacgtgagcatcctgaccctgtgcgacgccaccaccggcgtgtgcaccaagaagcacgaggacgagagcgaggcctggctgcacagacagaacgaggagcccgtgttcagcaaggacggcagaaagttcttcttcatcagagccatcccccagggcggcagaggcaagttctaccacatcaccgtgagcagcagccagcccaacagcagcaacgacaacatccagagcatcaccagcggcgactgggacgtgaccaagatcctggcctacgacgagaagggcaacaagatctacttcctgagcaccgaggacctgcccagaagaagacagctgtacagcgccaacaccgtgggcaacttcaacagacagtgcctgagctgcgacctggtggagaactgcacctacttcagcgccagcttcagccacagcatggacttcttcctgctgaagtgcgagggccccggcgtgcccatggtgaccgtgcacaacaccaccgacaagaagaagatgttcgacctggagaccaacgagcacgtgaagaaggccatcaacgacagacagatgcccaaggtggagtacagagacatcgagatcgacgactacaacctgcccatgcagatcctgaagcccgccaccttcaccgacaccacccactaccccctgctgctggtggtggacggcacccccggcagccagagcgtggccgagaagttcgaggtgagctgggagaccgtgatggtgagcagccacggcgccgtggtggtgaagtgcgacggcagaggcagcggcttccagggcaccaagctgctgcacgaggtgagaagaagactgggcctgctggaggagaaggaccagatggaggccgtgagaaccatgctgaaggagcagtacatcgacagaaccagagtggccgtgttcggcaaggactacggcggctacctgagcacctacatcctgcccgccaagggcgagaaccagggccagaccttcacctgcggcagcgccctgagccccatcaccgacttcaagctgtacgccagcgccttcagcgagagatacctgggcctgcacggcctggacaacagagcctacgagatgaccaaggtggcccacagagtgagcgccctggaggagcagcagttcctgatcatccaccccaccgccgacgagaagatccacttccagcacaccgccgagctgatcacccagctgatcagaggcaaggccaactacagcctgcagatctaccccgacgagagccactacttcaccagcagcagcctgaagcagcacctgtacagaagcatcatcaacttcttcgtggagtgcttcagaatccaggacaagctgctgaccgtgaccgccaaggaggacgaggaggaggactag

SEQ ID NO: 79297 - DNA, 2649 bp, synthetic construct
  misc_feature 1..2649: note = Description of Artificial Sequence: Synthetic coding sequence
  source 1..2649: mol_type = other DNA
atggccgccgccatggagaccgagcagctgggcgtggagatcttcgagaccgccgactgcgaggagaacatcgagagccaggacagacccaagctggagcccttctacgtggagagatacagctggagccagctgaagaagctgctggccgacaccagaaagtaccacggctacatgatggccaaggccccccacgacttcatgttcgtgaagagaaacgaccccgacggcccccacagcgacagaatctactacctggccatgagcggcgagaacagagagaacaccctgttctacagcgagatccccaagaccatcaacagagccgccgtgctgatgctgagctggaagcccctgctggacctgttccaggccaccctggactacggcatgtacagcagagaggaggagctgctgagagagagaaagagaatcggcaccgtgggcatcgccagctacgactaccaccagggcagcggcaccttcctgttccaggccggcagcggcatctaccacgtgaaggacggcggcccccagggcttcacccagcagcccctgagacccaacctggtggagaccagctgccccaacatcagaatggaccccaagctgtgccccgccgaccccgactggatcgccttcatccacagcaacgacatctggatcagcaacatcgtgaccagagaggagagaagactgacctacgtgcacaacgagctggccaacatggaggaggacgccagaagcgccggcgtggccaccttcgtgctgcaggaggagttcgacagatacagcggctactggtggtgccccaaggccgagaccacccccagcggcggcaagatcctgagaatcctgtacgaggagaacgacgagagcgaggtggagatcatccacgtgaccagccccatgctggagaccagaagagccgacagcttcagataccccaagaccggcaccgccaaccccaaggtgaccttcaagatgagcgagatcatgatcgacgccgagggcagaatcatcgacgtgatcgacaaggagctgatccagcccttcgagatcctgttcgagggcgtggagtacatcgccagagccggctggacccccgagggcaagtacgcctggagcatcctgctggacagaagccagaccagactgcagatcgtgctgatcagccccgagctgttcatccccgtggaggacgacgtgatggagagacagagactgatcgagagcgtgcccgacagcgtgacccccctgatcatctacgaggagaccaccgacatctggatcaacatccacgacatcttccacgtgttcccccagagccacgaggaggagatcgagttcatcttcgccagcgagtgcaagaccggcttcagacacctgtacaagatcaccagcatcctgaaggagagcaagtacaagagaagcagcggcggcctgcccgcccccagcgacttcaagtgccccatcaaggaggagatcgccatcaccagcggcgagtgggaggtgctgggcagacacggcagcaacatccaggtggacgaggtgagaagactggtgtacttcgagggcaccaaggacagccccctggagcaccacctgtacgtggtgagctacgtgaaccccggcgaggtgaccagactgaccgacagaggctacagccacagctgctgcatcagccagcactgcgacttcttcatcagcaagtacagcaaccagaagaacccccactgcgtgagcctgtacaagctgagcagccccgaggacgaccccacctgcaagaccaaggagttctgggccaccatcctggacagcgccggccccctgcccgactacaccccccccgagatcttcagcttcgagagcaccaccggcttcaccctgtacggcatgctgtacaagccccacgacctgcagcccggcaagaagtaccccaccgtgctgttcatctacggcggcccccaggtgcagctggtgaacaacagattcaagggcgtgaagtacttcagactgaacaccctggccagcctgggctacgtggtggtggtgatcgacaacagaggcagctgccacagaggcctgaagttcgagggcgccttcaagtacaagatgggccagatcgagatcgacgaccaggtggagggcctgcagtacctggccagcagatacgacttcatcgacctggacagagtgggcatccacggctggagctacggcggctacctgagcctgatggccctgatgcagagaagcgacatcttcagagtggccatcgccggcgcccccgtgaccctgtggatcttctacgacaccggctacaccgagagatacatgggccaccccgaccagaacgagcagggctactacctgggcagcgtggccatgcaggccgagaagttccccagcgagcccaacagactgctgctgctgcacggcttcctggacgagaacgtgcacttcgcccacaccagcatcctgctgagcttcctggtgagagccggcaagccctacgacctgcagatctacccccaggagagacacagcatcagagtgcccgagagcggcgagcactacgagctgcacctgctgcactacctgcaggagaacctgggcagcagaatcgccgccctgaaggtgatctag

SEQ ID NO: 79298 - DNA, 2550 bp, synthetic construct
  misc_feature 1..2550: note = Description of Artificial Sequence: Synthetic coding sequence
  source 1..2550: mol_type = other DNA
atgtggaagagaagcgagcagatgaagatcaagagcggcaagtgcaacatggccgccgccatggagaccgagcagctgggcgtggagatcttcgagaccgccgactgcgaggagaacatcgagagccaggacagacccaagctggagcccttctacgtggagagatacagctggagccagctgaagaagctgctggccgacaccagaaagtaccacggctacatgatggccaaggccccccacgacttcatgttcgtgaagagaaacgaccccgacggcccccacagcgacagaatctactacctggccatgagcggcgagaacagagagaacaccctgttctacagcgagatccccaagaccatcaacagagccgccgtgctgatgctgagctggaagcccctgctggacctgttccaggccaccctggactacggcatgtacagcagagaggaggagctgctgagagagagaaagagaatcggcaccgtgggcatcgccagctacgactaccaccagggcagcggcaccttcctgttccaggccggcagcggcatctaccacgtgaaggacggcggcccccagggcttcacccagcagcccctgagacccaacctggtggagaccagctgccccaacatcagaatggaccccaagctgtgccccgccgaccccgactggatcgccttcatccacagcaacgacatctggatcagcaacatcgtgaccagagaggagagaagactgacctacgtgcacaacgagctggccaacatggaggaggacgccagaagcgccggcgtggccaccttcgtgctgcaggaggagttcgacagatacagcggctactggtggtgccccaaggccgagaccacccccagcggcggcaagatcctgagaatcctgtacgaggagaacgacgagagcgaggtggagatcatccacgtgaccagccccatgctggagaccagaagagccgacagcttcagataccccaagaccggcaccgccaaccccaaggtgaccttcaagatgagcgagatcatgatcgacgccgagggcagaatcatcgacgtgatcgacaaggagctgatccagcccttcgagatcctgttcgagggcgtggagtacatcgccagagccggctggacccccgagggcaagtacgcctggagcatcctgctggacagaagccagaccagactgcagatcgtgctgatcagccccgagctgttcatccccgtggaggacgacgtgatggagagacagagactgatcgagagcgtgcccgacagcgtgacccccctgatcatctacgaggagaccaccgacatctggatcaacatccacgacatcttccacgtgttcccccagagccacgaggaggagatcgagttcatcttcgccagcgagtgcaagaccggcttcagacacctgtacaagatcaccagcatcctgaaggagagcaagtacaagagaagcagcggcggcctgcccgcccccagcgacttcaagtgccccatcaaggaggagatcgccatcaccagcggcgagtgggaggtgctgggcagacacggcagcaacatccaggtggacgaggtgagaagactggtgtacttcgagggcaccaaggacagccccctggagcaccacctgtacgtggtgagctacgtgaaccccggcgaggtgaccagactgaccgacagaggctacagccacagctgctgcatcagccagcactgcgacttcttcatcagcaagtacagcaaccagaagaacccccactgcgtgagcctgtacaagctgagcagccccgaggacgaccccacctgcaagaccaaggagttctgggccaccatcctggacagcgccggccccctgcccgactacaccccccccgagatcttcagcttcgagagcaccaccggcttcaccctgtacggcatgctgtacaagccccacgacctgcagcccggcaagaagtaccccaccgtgctgttcatctacggcggcccccagggccagatcgagatcgacgaccaggtggagggcctgcagtacctggccagcagatacgacttcatcgacctggacagagtgggcatccacggctggagctacggcggctacctgagcctgatggccctgatgcagagaagcgacatcttcagagtggccatcgccggcgcccccgtgaccctgtggatcttctacgacaccggctacaccgagagatacatgggccaccccgaccagaacgagcagggctactacctgggcagcgtggccatgcaggccgagaagttccccagcgagcccaacagactgctgctgctgcacggcttcctggacgagaacgtgcacttcgcccacaccagcatcctgctgagcttcctggtgagagccggcaagccctacgacctgcagatctacccccaggagagacacagcatcagagtgcccgagagcggcgagcactacgagctgcacctgctgcactacctgcaggagaacctgggcagcagaatcgccgccctgaaggtgatctag

SEQ ID NO: 79299 - DNA, 2544 bp, synthetic construct
  misc_feature 1..2544: note = Description of Artificial Sequence: Synthetic coding sequence
  source 1..2544: mol_type = other DNA
atgtggaagagaagcgagcagatgaagatcaagagcggcaagtgcaacatggccgccgccatggagaccgagcagctgggcgtggagatcttcgagaccgccgactgcgaggagaacatcgagagccaggacagacccaagctggagcccttctacgtggagagatacagctggagccagctgaagaagctgctggccgacaccagaaagtaccacggctacatgatggccaaggccccccacgacttcatgttcgtgaagagaaacgaccccgacggcccccacagcgacagaatctactacctggccatgagcggcgagaacagagagaacaccctgttctacagcgagatccccaagaccatcaacagagccgccgtgctgatgctgagctggaagcccctgctggacctgttccaggccaccctggactacggcatgtacagcagagaggaggagctgctgagagagagaaagagaatcggcaccgtgggcatcgccagctacgactaccaccagggcagcggcaccttcctgttccaggccggcagcggcatctaccacgtgaaggacggcggcccccagggcttcacccagcagcccctgagacccaacctggtggagaccagctgccccaacatcagaatggaccccaagctgtgccccgccgaccccgactggatcgccttcatccacagcaacgacatctggatcagcaacatcgtgaccagagaggagagaagactgacctacgtgcacaacgagctggccaacatggaggaggacgccagaagcgccggcgtggccaccttcgtgctgcaggaggagttcgacagatacagcggctactggtggtgccccaaggccgagaccacccccagcggcggcaagatcctgagaatcctgtacgaggagaacgacgagagcgaggtggagatcatccacgtgaccagccccatgctggagaccagaagagccgacagcttcagataccccaagaccggcaccgccaaccccaaggtgaccttcaagatgagcgagatcatgatcgacgccgagggcagaatcatcgacgtgatcgacaaggagctgatccagcccttcgagatcctgttcgagggcgtggagtacatcgccagagccggctggacccccgagggcaagtacgcctggagcatcctgctggacagaagccagaccagactgcagatcgtgctgatcagccccgagctgttcatccccgtggaggacgacgtgatggagagacagagactgatcgagagcgtgcccgacagcgtgacccccctgatcatctacgaggagaccaccgacatctggatcaacatccacgacatcttccacgtgttcccccagagccacgaggaggagatcgagttcatcttcgccagcgagtgcaagaccggcttcagacacctgtacaagatcaccagcatcctgaaggagagcaagtacaagagaagcagcggcggcctgcccgcccccagcgacttcaagtgccccatcaaggaggagatcgccatcaccagcggcgagtgggaggtgctgggcagacacggcagcaacatccaggtggacgaggtgagaagactggtgtacttcgagggcaccaaggacagccccctggagcaccacctgtacgtggtgagctacgtgaaccccggcgaggtgaccagactgaccgacagaggctacagccacagctgctgcatcagccagcactgcgacttcttcatcagcaagtacagcaaccagaagaacccccactgcgtgagcctgtacaagctgagcagccccgaggacgaccccacctgcaagaccaaggagttctgggccaccatcctggacagcgccggccccctgcccgactacaccccccccgagatcttcagcttcgagagcaccaccggcttcaccctgtacggcatgctgtacaagccccacgacctgcagcccggcaagaagtaccccaccgtgctgttcatctacggcggcccccaggtgcagctggtgaacaacagattcaagggcgtgaagtacttcagactgaacaccctggccagcctgggctacgtggtggtggtgatcgacaacagaggcagctgccacagaggcctgaagttcgagggcgccttcaagtacaagatggtggccatcgccggcgcccccgtgaccctgtggatcttctacgacaccggctacaccgagagatacatgggccaccccgaccagaacgagcagggctactacctgggcagcgtggccatgcaggccgagaagttccccagcgagcccaacagactgctgctgctgcacggcttcctggacgagaacgtgcacttcgcccacaccagcatcctgctgagcttcctggtgagagccggcaagccctacgacctgcagatctacccccaggagagacacagcatcagagtgcccgagagcggcgagcactacgagctgcacctgctgcactacctgcaggagaacctgggcagcagaatcgccgccctgaaggtgatctag

SEQ ID NO: 79300 - DNA, 2178 bp, synthetic construct
  misc_feature 1..2178: note = Description of Artificial Sequence: Synthetic coding sequence
  source 1..2178: mol_type = other DNA
atgtggaagagaagcgagcagatgaagatcaagagcggcaagtgcaacatggccgccgccatggagaccgagcagctgggcgtggagatcttcgagaccgccgactgcgaggagaacatcgagagccaggacagacccaagctggagcccttctacgtggagagatacagctggagccagctgaagaagctgctggccgacaccagaaagtaccacggctacatgatggccaaggccccccacgacttcatgttcgtgaagagaaacgaccccgacggcccccacagcgacagaatctactacctggccatgagcggcgagaacagagagaacaccctgttctacagcgagatccccaagaccatcaacagagccgccgtgctgatgctgagctggaagcccctgctggacctgttccaggccaccctggactacggcatgtacagcagagaggaggagctgctgagagagagaaagagaatcggcaccgtgggcatcgccagctacgactaccaccagggcagcggcaccttcctgttccaggccggcagcggcatctaccacgtgaaggacggcggcccccagggcttcacccagcagcccctgagacccaacctggtggagaccagctgccccaacatcagaatggaccccaagctgtgccccgccgaccccgactggatcgccttcatccacagcaacgacatctggatcagcaacatcgtgaccagagaggagagaagactgacctacgtgcacaacgagctggccaacatggaggaggacgccagaagcgccggcgtggccaccttcgtgctgcaggaggagttcgacagatacagcggctactggtggtgccccaaggccgagaccacccccagcggcggcaagatcctgagaatcctgtacgaggagaacgacgagagcgaggtggagatcatccacgtgaccagccccatgctggagaccagaagagccgacagcttcagataccccaagaccggcaccgccaaccccaaggtgaccttcaagatgagcgagatcatgatcgacgccgagggcagaatccaggtggacgaggtgagaagactggtgtacttcgagggcaccaaggacagccccctggagcaccacctgtacgtggtgagctacgtgaaccccggcgaggtgaccagactgaccgacagaggctacagccacagctgctgcatcagccagcactgcgacttcttcatcagcaagtacagcaaccagaagaacccccactgcgtgagcctgtacaagctgagcagccccgaggacgaccccacctgcaagaccaaggagttctgggccaccatcctggacagcgccggccccctgcccgactacaccccccccgagatcttcagcttcgagagcaccaccggcttcaccctgtacggcatgctgtacaagccccacgacctgcagcccggcaagaagtaccccaccgtgctgttcatctacggcggcccccaggtgcagctggtgaacaacagattcaagggcgtgaagtacttcagactgaacaccctggccagcctgggctacgtggtggtggtgatcgacaacagaggcagctgccacagaggcctgaagttcgagggcgccttcaagtacaagatgggccagatcgagatcgacgaccaggtggagggcctgcagtacctggccagcagatacgacttcatcgacctggacagagtgggcatccacggctggagctacggcggctacctgagcctgatggccctgatgcagagaagcgacatcttcagagtggccatcgccggcgcccccgtgaccctgtggatcttctacgacaccggctacaccgagagatacatgggccaccccgaccagaacgagcagggctactacctgggcagcgtggccatgcaggccgagaagttccccagcgagcccaacagactgctgctgctgcacggcttcctggacgagaacgtgcacttcgcccacaccagcatcctgctgagcttcctggtgagagccggcaagccctacgacctgcagatctacccccaggagagacacagcatcagagtgcccgagagcggcgagcactacgagctgcacctgctgcactacctgcaggagaacctgggcagcagaatcgccgccctgaaggtgatctag

SEQ ID NO: 79301 - DNA, 2697 bp, synthetic construct
  misc_feature 1..2697: note = Description of Artificial Sequence: Synthetic coding sequence
  source 1..2697: mol_type = other DNA
atgtggaagagaagcgagcagatgaagatcaagagcggcaagtgcaacatggccgccgccatggagaccgagcagctgggcgtggagatcttcgagaccgccgactgcgaggagaacatcgagagccaggacagacccaagctggagcccttctacgtggagagatacagctggagccagctgaagaagctgctggccgacaccagaaagtaccacggctacatgatggccaaggccccccacgacttcatgttcgtgaagagaaacgaccccgacggcccccacagcgacagaatctactacctggccatgagcggcgagaacagagagaacaccctgttctacagcgagatccccaagaccatcaacagagccgccgtgctgatgctgagctggaagcccctgctggacctgttccaggccaccctggactacggcatgtacagcagagaggaggagctgctgagagagagaaagagaatcggcaccgtgggcatcgccagctacgactaccaccagggcagcggcaccttcctgttccaggccggcagcggcatctaccacgtgaaggacggcggcccccagggcttcacccagcagcccctgagacccaacctggtggagaccagctgccccaacatcagaatggaccccaagctgtgccccgccgaccccgactggatcgccttcatccacagcaacgacatctggatcagcaacatcgtgaccagagaggagagaagactgacctacgtgcacaacgagctggccaacatggaggaggacgccagaagcgccggcgtggccaccttcgtgctgcaggaggagttcgacagatacagcggctactggtggtgccccaaggccgagaccacccccagcggcggcaagatcctgagaatcctgtacgaggagaacgacgagagcgaggtggagatcatccacgtgaccagccccatgctggagaccagaagagccgacagcttcagataccccaagaccggcaccgccaaccccaaggtgaccttcaagatgagcgagatcatgatcgacgccgagggcagaatcatcgacgtgatcgacaaggagctgatccagcccttcgagatcctgttcgagggcgtggagtacatcgccagagccggctggacccccgagggcaagtacgcctggagcatcctgctggacagaagccagaccagactgcagatcgtgctgatcagccccgagctgttcatccccgtggaggacgacgtgatggagagacagagactgatcgagagcgtgcccgacagcgtgacccccctgatcatctacgaggagaccaccgacatctggatcaacatccacgacatcttccacgtgttcccccagagccacgaggaggagatcgagttcatcttcgccagcgagtgcaagaccggcttcagacacctgtacaagatcaccagcatcctgaaggagagcaagtacaagagaagcagcggcggcctgcccgcccccagcgacttcaagtgccccatcaaggaggagatcgccatcaccagcggcgagtgggaggtgctgggcagacacggcagcaacatccaggtggacgaggtgagaagactggtgtacttcgagggcaccaaggacagccccctggagcaccacctgtacgtggtgagctacgtgaaccccggcgaggtgaccagactgaccgacagaggctacagccacagctgctgcatcagccagcactgcgacttcttcatcagcaagtacagcaaccagaagaacccccactgcgtgagcctgtacaagctgagcagccccgaggacgaccccacctgcaagaccaaggagttctgggccaccatcctggacagcgccggccccctgcccgactacaccccccccgagatcttcagcttcgagagcaccaccggcttcaccctgtacggcatgctgtacaagccccacgacctgcagcccggcaagaagtaccccaccgtgctgttcatctacggcggcccccaggtgcagctggtgaacaacagattcaagggcgtgaagtacttcagactgaacaccctggccagcctgggctacgtggtggtggtgatcgacaacagaggcagctgccacagaggcctgaagttcgagggcgccttcaagtacaagatgggccagatcgagatcgacgaccaggtggagggcctgcagtacctggccagcagatacgacttcatcgacctggacagagtgggcatccacggctggagctacggcggctacctgagcctgatggccctgatgcagagaagcgacatcttcagagtggccatcgccggcgcccccgtgaccctgtggatcttctacgacaccggctacaccgagagatacatgggccaccccgaccagaacgagcagggctactacctgggcagcgtggccatgcaggccgagaagttccccagcgagcccaacagactgctgctgctgcacggcttcctggacgagaacgtgcacttcgcccacaccagcatcctgctgagcttcctggtgagagccggcaagccctacgacctgcagatctacccccaggagagacacagcatcagagtgcccgagagcggcgagcactacgagctgcacctgctgcactacctgcaggagaacctgggcagcagaatcgccgccctgaaggtgatctag

SEQ ID NO: 79302 - DNA, 2349 bp, synthetic construct
  misc_feature 1..2349: note = Description of Artificial Sequence: Synthetic coding sequence
  source 1..2349: mol_type = other DNA
atggccgccgccatggagaccgagcagctgggcgtggagatcttcgagaccgccgactgcgaggagaacatcgagagccaggacagacccaagctggagcccttctacgtggagagatacagctggagccagctgaagaagctgctggccgacaccagaaagtaccacggctacatgatggccaaggccccccacgacttcatgttcgtgaagagaaacgaccccgacggcccccacagcgacagaatctactacctggccatgagcggcgagaacagagagaacaccctgttctacagcgagatccccaagaccatcaacagagccgccgtgctgatgctgagctggaagcccctgctggacctgttccaggccaccctggactacggcatgtacagcagagaggaggagctgctgagagagagaaagagaatcggcaccgtgggcatcgccagctacgactaccaccagggcagcggcaccttcctgttccaggccggcagcggcatctaccacgtgaaggacggcggcccccagggcttcacccagcagcccctgagacccaacctggtggagaccagctgccccaacatcagaatggaccccaagctgtgccccgccgaccccgactggatcgccttcatccacagcaacgacatctggatcagcaacatcgtgaccagagaggagagaagactgacctacgtgcacaacgagctggccaacatggaggaggacgccagaagcgccggcgtggccaccttcgtgctgcaggaggagttcgacagatacagcggctactggtggtgccccaaggccgagaccacccccagcggcggcaagatcctgagaatcctgtacgaggagaacgacgagagcgaggtggagatcatccacgtgaccagccccatgctggagaccagaagagccgacagcttcagataccccaagaccggcaccgccaaccccaaggtgaccttcaagatgagcgagatcatgatcgacgccgagggcagaatcatcgacgtgatcgacaaggagctgatccagcccttcgagatcctgttcgagggcgtggagtacatcgccagagccggctggacccccgagggcaagtacgcctggagcatcctgctggacagaagccagaccagactgcagatcgtgctgatcagccccgagctgttcatccccgtggaggacgacgtgatggagagacagagactgatcgagagcgtgcccgacagcgtgacccccctgatcatctacgaggagaccaccgacatctggatcaacatccacgacatcttccacgtgttcccccagagccacgaggaggagatcgagttcatcttcgccagcgagtgcaagaccggcttcagacacctgtacaagatcaccagcatcctgaaggagagcaagtacaagagaagcagcggcggcctgcccgcccccagcgacttcaagtgccccatcaaggaggagatcgccatcaccagcggcgagtgggaggtgctgggcagacacggcagcaacatccaggtggacgaggtgagaagactggtgtacttcgagggcaccaaggacagccccctggagcaccacctgtacgtggtgagctacgtgaaccccggcgaggtgaccagactgaccgacagaggctacagccacagctgctgcatcagccagcactgcgacttcttcatcagcaagtacagcaaccagaagaacccccactgcgtgagcctgtacaagctgagcagccccgaggacgaccccacctgcaagaccaaggagttctgggccaccatcctggacagcgccggccccctgcccgactacaccccccccgagatcttcagcttcgagagcaccaccggcttcaccctgtacggcatgctgtacaagccccacgacctgcagcccggcaagaagtaccccaccgtgctgttcatctacggcggcccccaggtggccatcgccggcgcccccgtgaccctgtggatcttctacgacaccggctacaccgagagatacatgggccaccccgaccagaacgagcagggctactacctgggcagcgtggccatgcaggccgagaagttccccagcgagcccaacagactgctgctgctgcacggcttcctggacgagaacgtgcacttcgcccacaccagcatcctgctgagcttcctggtgagagccggcaagccctacgacctgcagatctacccccaggagagacacagcatcagagtgcccgagagcggcgagcactacgagctgcacctgctgcactacctgcaggagaacctgggcagcagaatcgccgccctgaaggtgatctag

SEQ ID NO: 79303 - DNA, 2697 bp, synthetic construct; identical to SEQ ID NO: 79301
  misc_feature 1..2697: note = Description of Artificial Sequence: Synthetic coding sequence
  source 1..2697: mol_type = other DNA

SEQ ID NO: 79304 - DNA, 3669 bp, synthetic construct
  misc_feature 1..3669: note = Description of Artificial Sequence: Synthetic coding sequence
  source 1..3669: mol_type = other DNA
atgagcgaggcccccagattcttcgtgggccccgaggacaccgagatcaaccccggcaactacagacacttcttccaccacgccgacgaggacgacgaggaggaggacgacagcccccccgagagacagatcgtggtgggcatctgcagcatggccaagaagagcaagagcaagcccatgaaggagatcctggagagaatcagcctgttcaagtacatcaccgtggtggtgttcgaggaggaggtgatcctgaacgagcccgtggagaactggcccctgtgcgactgcctgatcagcttccacagcaagggcttccccctggacaaggccgtggcctacgccaagctgagaaaccccttcgtgatcaacgacctgaacatgcagtacctgatccaggacagaagagaggtgtacagcatcctgcaggccgagggcatcctgctgcccagatacgccatcctgaacagagaccccaacaaccccaaggagtgcaacctgatcgagggcgaggaccacgtggaggtgaacggcgaggtgttccagaagcccttcgtggagaagcccgtgagcgccgaggaccacaacgtgtacatctactaccccaccagcgccggcggcggcagccagagactgttcagaaagatcggcagcagaagcagcgtgtacagccccgagagcaacgtgagaaagaccggcagctacatctacgaggagttcatgcccaccgacggcaccgacgtgaaggtgtacaccgtgggccccgactacgcccacgccgaggccagaaagagccccgccctggacggcaaggtggagagagacagcgagggcaaggaggtgagataccccgtgatcctgaacgccagagagaagctgatcgcctggaaggtgtgcctggccttcaagcagaccgtgtgcggcttcgacctgctgagagccaacggccagagctacgtgtgcgacgtgaacggcttcagcttcgtgaagaacagcatgaagtactacgacgactgcgccaagatcctgggcaacatcgtgatgagagagctggccccccagttccacatcccctggagcatccccctggaggccgaggacatccccatcgtgcccaccaccagcggcaccatgatggagctgagatgcgtgatcgccgtgatcagacacggcgacagaacccccaagcagaagatgaagatggaggtgagacaccagaagttcttcgacctgttcgagaagtgcgacggctacaagagcggcaagctgaagctgaagaagcccaagcagctgcaggaggtgctggacatcgccagacagctgctgatggagctgggccagaacaacgacagcgagatcgaggagaacaagcccaagctggagcagctgaagaccgtgctggagatgtacggccacttcagcggcatcaacagaaaggtgcagctgacctacctgccccacggctgccccaagaccagcagcgaggaggaggacagcagaagagaggagcccagcctgctgctggtgctgaagtggggcggcgagctgacccccgccggcagagtgcaggccgaggagctgggcagagccttcagatgcatgtaccccggcggccagggcgactacgccggcttccccggctgcggcctgctgagactgcacagcacctacagacacgacctgaagatctacgccagcgacgagggcagagtgcagatgaccgccgccgccttcgccaagggcctgctggccctggagggcgagctgacccccatcctggtgcagatggtgaagagcgccaacatgaacggcctgctggacagcgacagcgacagcctgagcagctgccagcagagagtgaaggccagactgcacgagatcctgcagaaggacagagacttcaccgccgaggactacgagaagctgacccccagcggcagcatcagcctgatcaagagcatgcacctgatcaagaaccccgtgaagacctgcgacaaggtgtacagcctgatccagagcctgaccagccagatcagacacagaatggaggaccccaagagcagcgacatccagctgtaccacagcgagaccctggagctgatgctgagaagatggagcaagctggagaaggacttcaagaccaagaacggcagatacgacatcagcaagatccccgacatctacgactgcatcaagtacgacgtgcagcacaacggcagcctgaagctggagaacaccatggagctgtacagactgagcaaggccctggccgacatcgtgatcccccaggagtacggcatcaccaaggccgagaagctggagatcgccaagggctactgcacccccctggtgagaaagatcagaagcgacctgcagagaacccaggacgacgacaccgtgaacaagctgcaccccgtgtacagcagaggcgtgctgagccccgagagacacgtgagaaccagactgtacttcaccagcgagagccacgtgcacagcctgctgagcatcctgagatacggcgccctgtgcaacgagagcaaggacgagcagtggaagagagccatggactacctgaacgtggtgaacgagctgaactacatgacccagatcgtgatcatgctgtacgaggaccccaacaaggacctgagcagcgaggagagattccacgtggagctgcacttcagccccggcgccaagggctgcgaggaggacaagaacctgcccagcggctacggctacagacccgccagcagagagaacgagggcagaagacccttcaagatcgacaacgacgacgagccccacaccagcaagagagacgaggtggacagagccgtgatcctgttcaagcccatggtgagcgagcccatccacatccacagaaagagccccctgcccagaagcagaaagaccgccaccaacgacgaggagagccccctgagcgtgagcagccccgagggcaccggcacctggctgcactacaccagcggcgtgggcaccggcagaagaagaagaagaagcggcgagcagatcaccagcagccccgtgagccccaagagcctggccttcaccagcagcatcttcggcagctggcagcaggtggtgagcgagaacgccaactacctgagaacccccagaaccctggtggagcagaagcagaaccccaccgtgggcagccactgcgccggcctgttcagcaccagcgtgctgggcggcagcagcagcgcccccaacctgcaggactacgccagaacccacagaaagaagctgaccagcagcggctgcatcgacggcttcgagctgtacagcatggtgcccagcatctgccccctggagaccctgcacaacgccctgagcctgaagcaggtggacgagttcctggccagcatcgccagccccagcagcgacgtgcccagaaagaccgccgagatcagcagcaccgccctgagaagcagccccatcatgagaaagaaggtgagcctgaacacctacacccccgccaagatcctgcccaccccccccgccaccctgaagagcaccaaggccagcagcaagcccgccaccagcggccccagcagcgccgtggtgcccaacaccagcagcagaaagaagaacatcaccagcaagaccgagacccacgagcacaagaagaacaccggcaagaagaagtag

SEQ ID NO: 79305 - DNA, 3732 bp, synthetic construct
  misc_feature 1..3732: note = Description of Artificial Sequence: Synthetic coding sequence
  source 1..3732: mol_type = other DNA
atgagcgaggcccccagattcttcgtgggccccgaggacaccgagatcaaccccggcaactacagacacttcttccaccacgccgacgaggacgacgaggaggaggacgacagcccccccgagagacagatcgtggtgggcatctgcagcatggccaagaagagcaagagcaagcccatgaaggagatcctggagagaatcagcctgttcaagtacatcaccgtggtggtgttcgaggaggaggtgatcctgaacgagcccgtggagaactggcccctgtgcgactgcctgatcagcttccacagcaagggcttccccctggacaaggccgtggcctacgccaagctgagaaaccccttcgtgatcaacgacctgaacatgcagtacctgatccaggacagaagagaggtgtacagcatcctgcaggccgagggcatcctgctgcccagatacgccatcctgaacagagaccccaacaaccccaaggagtgcaacctgatcgagggcgaggaccacgtggaggtgaacggcgaggtgttccagaagcccttcgtggagaagcccgtgagcgccgaggaccacaacgtgtacatctactaccccaccagcgccggcggcggcagccagagactgttcagaaagatcggcagcagaagcagcgtgtacagccccgagagcaacgtgagaaagaccggcagctacatctacgaggagttcatgcccaccgacggcaccgacgtgaaggtgtacaccgtgggccccgactacgcccacgccgaggccagaaagagccccgccctggacggcaaggtggagagagacagcgagggcaaggaggtgagataccccgtgatcctgaacgccagagagaagctgatcgcctggaaggtgtgcctggccttcaagcagaccgtgtgcggcttcgacctgctgagagccaacggccagagctacgtgtgcgacgtgaacggcttcagcttcgtgaagaacagcatgaagtactacgacgactgcgccaagatcctgggcaacatcgtgatgagagagctggccccccagttccacatcccctggagcatccccctggaggccgaggacatccccatcgtgcccaccaccagcggcaccatgatggagctgagatgcgtgatcgccgtgatcagacacggcgacagaacccccaagcagaagatgaagatggaggtgagacaccagaagttcttcgacctgttcgagaagtgcgacggctacaagagcggcaagctgaagctgaagaagcccaagcagctgcaggaggtgctggacatcgccagacagctgctgatggagctgggccagaacaacgacagcgagatcgaggagaacaagcccaagctggagcagctgaagaccgtgctggagatgtacggccacttcagcggcatcaacagaaaggtgcagctgacctacctgccccacggctgccccaagaccagcagcgaggaggaggacagcagaagagaggagcccagcctgctgctggtgctgaagtggggcggcgagctgacccccgccggcagagtgcaggccgaggagctgggcagagccttcagatgcatgtaccccggcggccagggcgactacgccggcttccccggctgcggcctgctgagactgcacagcacctacagacacgacctgaagatctacgccagcgacgagggcagagtgcagatgaccgccgccgccttcgccaagggcctgctggccctggagggcgagctgacccccatcctggtgcagatggtgaagagcgccaacatgaacggcctgctggacagcgacagcgacagcctgagcagctgccagcagagagtgaaggccagactgcacgagatcctgcagaaggacagagacttcaccgccgaggactacgagaagctgacccccagcggcagcatcagcctgatcaagagcatgcacctgatcaagaaccccgtgaagacctgcgacaaggtgtacagcctgatccagagcctgaccagccagatcagacacagaatggaggaccccaagagcagcgacatccagctgtaccacagcgagaccctggagctgatgctgagaagatggagcaagctggagaaggacttcaagaccaagaacggcagatacgacatcagcaagatccccgacatctacgactgcatcaagtacgacgtgcagcacaacggcagcctgaagctggagaacaccatggagctgtacagactgagcaaggccctggccgacatcgtgatcccccaggagtacggcatcaccaaggccgagaagctggagatcgccaagggctactgcacccccctggtgagaaagatcagaagcgacctgcagagaacccaggacgacgacaccgtgaacaagctgcaccccgtgtacagcagaggcgtgctgagccccgagagacacgtgagaaccagactgtacttcaccagcgagagccacgtgcacagcctgctgagcatcctgagatacggcgccctgtgcaacgagagcaaggacgagcagtggaagagagccatggactacctgaacgtggtgaacgagctgaactacatgacccagatcgtgatcatgctgtacgaggaccccaacaaggacctgagcagcgaggagagattccacgtggagctgcacttcagccccggcgccaagggctgcgaggaggacaagaacctgcccagcggctacggctacagacccgccagcagagagaacgagggcagaagacccttcaagatcgacaacgacgacgagccccacaccagcaagagagacgaggtggacagagccgtgatcctgttcaagcccatggtgagcgagcccatccacatccacagaaagagccccctgcccagaagcagaaagaccgccaccaacgacgaggagagccccctgagcgtgagcagccccgagggcaccggcacctggctgcactacaccagcggcgtgggcaccggcagaagaagaagaagaagcggcgagcagatcaccagcagccccgtgagccccaagagcctggccttcaccagcagcatcttcggcagctggcagcaggtggtgagcgagaacgccaactacctgagaacccccagaaccctggtggagcagaagcagaaccccaccgtgggcagccactgcgccggcctgttcagcaccagcgtgctgggcggcagcagcagcgcccccaacctgcaggactacgccagaacccacagaaagaagctgaccagcagcggctgcatcgacgacgccaccagaggcagcgccgtgaagagattcagcatcagcttcgccagacaccccaccaacggcttcgagctgtacagcatggtgcccagcatctgccccctggagaccctgcacaacgccctgagcctgaagcaggtggacgagttcctggccagcatcgccagccccagcagcgacgtgcccagaaagaccgccgagatcagcagcaccgccctgagaagcagccccatcatgagaaagaaggtgagcctgaacacctacacccccgccaagatcctgcccaccccccccgccaccctgaagagcaccaaggccagcagcaagcccgccaccagcggccccagcagcgccgtggtgcccaacaccagcagcagaaagaagaacatcaccagcaagaccgagacccacgagcacaagaagaacaccggcaagaagaagtag

SEQ ID NO: 79306 - DNA, 3669 bp, synthetic construct; identical to SEQ ID NO: 79304
  misc_feature 1..3669: note = Description of Artificial Sequence: Synthetic coding sequence
  source 1..3669: mol_type = other DNA

SEQ ID NO: 79307 - DNA, 3837 bp, synthetic construct
  misc_feature 1..3837: note = Description of Artificial Sequence: Synthetic coding sequence
  source 1..3837: mol_type = other DNA
atgagcgaggcccccagattcttcgtgggccccgaggacaccgagatcaaccccggcaactacagacacttcttccaccacgccgacgaggacgacgaggaggaggacgacagcccccccgagagacagatcgtggtgggcatctgcagcatggccaagaagagcaagagcaagcccatgaaggagatcctggagagaatcagcctgttcaagtacatcaccgtggtggtgttcgaggaggaggtgatcctgaacgagcccgtggagaactggcccctgtgcgactgcctgatcagcttccacagcaagggcttccccctggacaaggccgtggcctacgccaagctgagaaaccccttcgtgatcaacgacctgaacatgcagtacctgatccaggacagaagagaggtgtacagcatcctgcaggccgagggcatcctgctgcccagatacgccatcctgaacagagaccccaacaaccccaaggagtgcaacctgatcgagggcgaggaccacgtggaggtgaacggcgaggtgttccagaagcccttcgtggagaagcccgtgagcgccgaggaccacaacgtgtacatctactaccccaccagcgccggcggcggcagccagagactgttcagaaagatcggcagcagaagcagcgtgtacagccccgagagcaacgtgagaaagaccggcagctacatctacgaggagttcatgcccaccgacggcaccgacgtgaaggtgtacaccgtgggccccgactacgcccacgccgaggccagaaagagccccgccctggacggcaaggtggagagagacagcgagggcaaggaggtgagataccccgtgatcctgaacgccagagagaagctgatcgcctggaaggtgtgcctggccttcaagcagaccgtgtgcggcttcgacctgctgagagccaacggccagagctacgtgtgcgacgtgaacggcttcagcttcgtgaagaacagcatgaagtactacgacgactgcgccaagatcctgggcaacatcgtgatgagagagctggccccccagttccacatcccctggagcatccccctggaggccgaggacatccccatcgtgcccaccaccagcggcaccatgatggagctgagatgcgtgatcgccgtgatcagacacggcgacagaacccccaagcagaagatgaagatggaggtgagacaccagaagttcttcgacctgttcgagaagtgcgacggctacaagagcggcaagctgaagctgaagaagcccaagcagctgcaggaggtgctggacatcgccagacagctgctgatggagctgggccagaacaacgacagcgagatcgaggagaacaagcccaagctggagcagctgaagaccgtgctggagatgtacggccacttcagcggcatcaacagaaaggtgcagctgacctacctgccccacggctgccccaagaccagcagcgaggaggaggacagcagaagagaggagcccagcctgctgctggtgctgaagtggggcggcgagctgacccccgccggcagagtgcaggccgaggagctgggcagagccttcagatgcatgtaccccggcggccagggcgactacgccggcttccccggctgcggcctgctgagactgcacagcacctacagacacgacctgaagatctacgccagcgacgagggcagagtgcagatgaccgccgccgccttcgccaagggcctgctggccctggagggcgagctgacccccatcctggtgcagatggtgaagagcgccaacatgaacggcctgctggacagcgacagcgacagcctgagcagctgccagcagagagtgaaggccagactgcacgagatcctgcagaaggacagagacttcaccgccgaggactacgagaagctgacccccagcggcagcatcagcctgatcaagagcatgcacctgatcaagaaccccgtgaagacctgcgacaaggtgtacagcctgatccagagcctgaccagccagatcagacacagaatggaggaccccaagagcagcgacatccagctgtaccacagcgagaccctggagctgatgctgagaagatggagcaagctggagaaggacttcaagaccaagaacggcagatacgacatcagcaagatccccgacatctacgactgcatcaagtacgacgtgcagcacaacggcagcctgaagctggagaacaccatggagctgtacagactgagcaaggccctggccgacatcgtgatcccccaggagtacggcatcaccaaggccgagaagctggagatcgccaagggctactgcacccccctggtgagaaagatcagaagcgacctgcagagaacccaggacgacgacaccgtgaacaagctgcaccccgtgtacagcagaggcgtgctgagccccgagagacacgtgagaaccagactgtacttcaccagcgagagccacgtgcacagcctgctgagcatcctgagatacggcgccctgtgcaacgaccacgacagccagaacgaggacggcggcatggtgaaggagatggagagcaaggacgagcagtggaagagagccatggactacctgaacgtggtgaacgagctgaactacatgacccagatcgtgatcatgctgtacgaggaccccaacaaggacctgagcagcgaggagagattccacgtggagctgcacttcagccccggcgccaagggctgcgaggaggacaagaacctgcccagcggctacggctacagacccgccagcagagagaacgagggcagaagacccttcaagatcgacaacgacgacgagccccacaccagcaagagagacgaggtggacagagccgtgatcctgttcaagcccatggtgagcgagcccatccacatccacagaaagagccccctgcccagaagcagaaagaccgccaccaacgacgaggagagccccctgagcgtgagcagccccgagggcaccggcacctggctgcactacaccagcggcgtgggcaccggcagaagaagaagaagaagcggcgagcagatcaccagcagccccgtgagccccaagagcctggccttcaccagcagcatcttcggcagctggcagcaggtggtgagcgagaacgccaactacctgagaacccccagaaccctggtggagcagaagcagaaccccaccgtgggcagccactgcgccggcctgttcagcaccagcgtgctgggcggcagcagcagcgcccccaacctgcaggactacgccagaacccacagaaagaagctgaccagcagcggctgcatcgacgacgccaccagaggcagcgccgtgaagagattcagcatcagcttcgccagacaccccaccaacgagcacctgcacctgtacagatgctggagcgtgagcagcgtggagttcctgggcagcagcggcttcgagctgtacagcatggtgcccagcatctgccccctggagaccctgcacaacgccctgagcctgaagcaggtggacgagttcctggccagcatcgccagccccagcagcgacgtgcccagaaagaccgccgagatcagcagcaccgccctgagaagcagccccatcatgagaaagaaggtgagcctgaacacctacacccccgccaagatcctgcccaccccccccgccaccctgaagagcaccaaggccagcagcaagcccgccaccagcggccccagcagcgccgtggtgcccaacaccagcagcagaaagaagaacatcaccagcaagaccgagacccacgagcacaagaagaacaccggcaagaagaagtag

SEQ ID NO: 79308 - DNA, 177 bp, synthetic construct
  misc_feature 1..177: note = Description of Artificial Sequence: Synthetic coding sequence
  source 1..177: mol_type = other DNA
atgagcgaggcccccagattcttcgtgggccccgaggacaccgagatcaaccccggcaactacagacacttcttccaccacgccgacgaggacgacgaggaggaggacgacagcccccccgagagacagatcgtggtgggcatctgcagcatggccaagaagagcaagagcaagtag

SEQ ID NO: 79309 - DNA, 2877 bp, synthetic construct
  misc_feature 1..2877: note = Description of Artificial Sequence: Synthetic coding sequence
  source 1..2877: mol_type = other DNA
atgctgaagagcaagaccttcctgaagaagaccagagccggcggcgtgatgaagatcgtgagagagcactacctgagagacgacatcggctgcggcgcccccggctgcgccgcctgcggcggcgcccacgagggccccgccctggagccccagccccaggaccccgccagcagcgtgtgcccccagccccactacctgctgcccgacaccaacgtgctgctgcaccagatcgacgtgctggaggaccccgccatcagaaacgtgatcgtgctgcagaccgtgctgcaggaggtgagaaacagaagcgcccccgtgtacaagagaatcagagacgtgaccaacaaccaggagaagcacttctacaccttcaccaacgagcaccacagagagacctacgtggagcaggagcagggcgagaacgccaacgacagaaacgacagagccatcagagtggccgccaagtggtacaacgagcacctgaagaagatgagcgccgacaaccagctgcaggtgatcttcatcaccaacgacagaagaaacaaggagaaggccatcgaggagggcatccccgccttcacctgcgaggagtacgtgaagagcctgaccgccaaccccgagctgatcgacagactggcctgcctgagcgaggagggcaacgagatcgagagcggcaagatcatcttcagcgagcacctgcccctgagcaagctgcagcagggcatcaagagcggcacctacctgcagggcaccttcagagccagcagagagaactacctggaggccaccgtgtggatccacggcgacaacgaggagaacaaggagatcatcctgcagggcctgaagcacctgaacagagccgtgcacgaggacatcgtggccgtggagctgctgcccaagagccagtgggtggcccccagcagcgtggtgctgcacgacgagggccagaacgaggaggacgtggagaaggaggaggagaccgagagaatgctgaagaccgccgtgagcgagaagatgctgaagcccaccggcagagtggtgggcatcatcaagagaaactggagaccctactgcggcatgctgagcaagagcgacatcaaggagagcagaagacacctgttcacccccgccgacaagagaatccccagaatcagaatcgagaccagacaggccagcaccctggagggcagaagaatcatcgtggccatcgacggctggcccagaaacagcagataccccaacggccacttcgtgagaaacctgggcgacgtgggcgagaaggagaccgagaccgaggtgctgctgctggagcacgacgtgccccaccagcccttcagccaggccgtgctgagcttcctgcccaagatgccctggagcatcaccgagaaggacatgaagaacagagaggacctgagacacctgtgcatctgcagcgtggacccccccggctgcaccgacatcgacgacgccctgcactgcagagagctggagaacggcaacctggaggtgggcgtgcacatcgccgacgtgagccacttcatcagacccggcaacgccctggaccaggagagcgccagaagaggcaccaccgtgtacctgtgcgagaagagaatcgacatggtgcccgagctgctgagcagcaacctgtgcagcctgaagtgcgacgtggacagactggccttcagctgcatctgggagatgaaccacaacgccgagatcctgaagaccaagttcaccaagagcgtgatcaacagcaaggccagcctgacctacgccgaggcccagctgagaatcgacagcgccaacatgaacgacgacatcaccaccagcctgagaggcctgaacaagctggccaagatcctgaagaagagaagaatcgagaagggcgccctgaccctgagcagccccgaggtgagattccacatggacagcgagacccacgaccccatcgacctgcagaccaaggagctgagagagaccaacagcatggtggaggagttcatgctgctggccaacatcagcgtggccaagaagatccacgaggagttcagcgagcacgccctgctgagaaagcaccccgcccccccccccagcaactacgagatcctggtgaaggccgccagaagcagaaacctggagatcaagaccgacaccgccaagagcctggccgagagcctggaccaggccgagagccccaccttcccctacctgaacaccctgctgagaatcctggccaccagatgcatgatgcaggccgtgtacttctgcagcggcatggacaacgacttccaccactacggcctggccagccccatctacacccacttcaccagccccatcagaagatacgccgacgtgatcgtgcacagactgctggccgtggccatcggcgccgactgcacctaccccgagctgaccgacaagcacaagctggccgacatctgcaagaacctgaacttcagacacaagatggcccagtacgcccagagagccagcgtggccttccacacccagctgttcttcaagagcaagggcatcgtgagcgaggaggcctacatcctgttcgtgagaaagaacgccatcgtggtgctgatccccaagtacggcctggagggcaccgtgttcttcgaggagaaggacaagcccaacccccagctgatctacgacgacgagatccccagcctgaagatcgaggacaccgtgttccacgtgttcgacaaggtgaaggtgaagatcatgctggacagcagcaacctgcagcaccagaagatcagaatgagcctggtggagccccagatccccggcatcagcatccccaccgacaccagcaacatggacctgaacggccccaagaagaagaagatgaagctgggcaagtag

SEQ ID NO: 79310 - DNA, 2391 bp, synthetic construct
  misc_feature 1..2391: note = Description of Artificial Sequence: Synthetic coding sequence
  source 1..2391: mol_type = other DNA
atgagcgccgacaaccagctgcaggtgatcttcatcaccaacgacagaagaaacaaggagaaggccatcgaggagggcatccccgccttcacctgcgaggagtacgtgaagagcctgaccgccaaccccgagctgatcgacagactggcctgcctgagcgaggagggcaacgagatcgagagcggcaagatcatcttcagcgagcacctgcccctgagcaagctgcagcagggcatcaagagcggcacctacctgcagggcaccttcagagccagcagagagaactacctggaggccaccgtgtggatccacggcgacaacgaggagaacaaggagatcatcctgcagggcctgaagcacctgaacagagccgtgcacgaggacatcgtggccgtggagctgctgcccaagagccagtgggtggcccccagcagcgtggtgctgcacgacgagggccagaacgaggaggacgtggagaaggaggaggagaccgagagaatgctgaagaccgccgtgagcgagaagatgctgaagcccaccggcagagtggtgggcatcatcaagagaaactggagaccctactgcggcatgctgagcaagagcgacatcaaggagagcagaagacacctgttcacccccgccgacaagagaatccccagaatcagaatcgagaccagacaggccagcaccctggagggcagaagaatcatcgtggccatcgacggctggcccagaaacagcagataccccaacggccacttcgtgagaaacctgggcgacgtgggcgagaaggagaccgagaccgaggtgctgctgctggagcacgacgtgccccaccagcccttcagccaggccgtgctgagcttcctgcccaagatgccctggagcatcaccgagaaggacatgaagaacagagaggacctgagacacctgtgcatctgcagcgtggacccccccggctgcaccgacatcgacgacgccctgcactgcagagagctggagaacggcaacctggaggtgggcgtgcacatcgccgacgtgagccacttcatcagacccggcaacgccctggaccaggagagcgccagaagaggcaccaccgtgtacctgtgcgagaagagaatcgacatggtgcccgagctgctgagcagcaacctgtgcagcctgaagtgcgacgtggacagactggccttcagctgcatctgggagatgaaccacaacgccgagatcctgaagaccaagttcaccaagagcgtgatcaacagcaaggccagcctgacctacgccgaggcccagctgagaatcgacagcgccaacatgaacgacgacatcaccaccagcctgagaggcctgaacaagctggccaagatcctgaagaagagaagaatcgagaagggcgccctgaccctgagcagccccgaggtgagattccacatggacagcgagacccacgaccccatcgacctgcagaccaaggagctgagagagaccaacagcatggtggaggagttcatgctgctggccaacatcagcgtggccaagaagatccacgaggagttcagcgagcacgccctgctgagaaagcaccccgcccccccccccagcaactacgagatcctggtgaaggccgccagaagcagaaacctggagatcaagaccgacaccgccaagagcctggccgagagcctggaccaggccgagagccccaccttcccctacctgaacaccctgctgagaatcctggccaccagatgcatgatgcaggccgtgtacttctgcagcggcatggacaacgacttccaccactacggcctggccagccccatctacacccacttcaccagccccatcagaagatacgccgacgtgatcgtgcacagactgctggccgtggccatcggcgccgactgcacctaccccgagctgaccgacaagcacaagctggccgacatctgcaagaacctgaacttcagacacaagatggcccagtacgcccagagagccagcgtggccttccacacccagctgttcttcaagagcaagggcatcgtgagcgaggaggcctacatcctgttcgtgagaaagaacgccatcgtggtgctgatccccaagtacggcctggagggcaccgtgttcttcgaggagaaggacaagcccaacccccagctgatctacgacgacgagatccccagcctgaagatcgaggacaccgtgttccacgtgttcgacaaggtgaaggtgaagatcatgctggacagcagcaacctgcagcaccagaagatcagaatgagcctggtggagccccagatccccggcatcagcatccccaccgacaccagcaacatggacctgaacggccccaagaagaagaagatgaagctgggcaagtag

SEQ ID NO: 79311 - DNA, 2787 bp, synthetic construct
  misc_feature 1..2787: note = Description of Artificial Sequence: Synthetic coding sequence
  source 1..2787: mol_type = other DNA
atgctgaagagcaagaccttcctgaagaagaccagagccggcggcgtgatgaagatcgtgagagagcactacctgagagacgacatcggctgcggcgcccccggctgcgccgcctgcggcggcgcccacgagggccccgccctggagccccagccccaggaccccgccagcagcgtgtgcccccagccccactacctgctgcccgacaccaacgtgctgctgcaccagatcgtgagcgcctggagacccggcacctgggccagcgtggccagcagcctgagactgcccggcagcctggagacctacgtggagcaggagcagggcgagaacgccaacgacagaaacgacagagccatcagagtggccgccaagtggtacaacgagcacctgaagaagatgagcgccgacaaccagctgcaggtgatcttcatcaccaacgacagaagaaacaaggagaaggccatcgaggagggcatccccgccttcacctgcgaggagtacgtgaagagcctgaccgccaaccccgagctgatcgacagactggcctgcctgagcgaggagggcaacgagatcgagagcggcaagatcatcttcagcgagcacctgcccctgagcaagctgcagcagggcatcaagagcggcacctacctgcagggcaccttcagagccagcagagagaactacctggaggccaccgtgtggatccacggcgacaacgaggagaacaaggagatcatcctgcagggcctgaagcacctgaacagagccgtgcacgaggacatcgtggccgtggagctgctgcccaagagccagtgggtggcccccagcagcgtggtgctgcacgacgagggccagaacgaggaggacgtggagaaggaggaggagaccgagagaatgctgaagaccgccgtgagcgagaagatgctgaagcccaccggcagagtggtgggcatcatcaagagaaactggagaccctactgcggcatgctgagcaagagcgacatcaaggagagcagaagacacctgttcacccccgccgacaagagaatccccagaatcagaatcgagaccagacaggccagcaccctggagggcagaagaatcatcgtggccatcgacggctggcccagaaacagcagataccccaacggccacttcgtgagaaacctgggcgacgtgggcgagaaggagaccgagaccgaggtgctgctgctggagcacgacgtgccccaccagcccttcagccaggccgtgctgagcttcctgcccaagatgccctggagcatcaccgagaaggacatgaagaacagagaggacctgagacacctgtgcatctgcagcgtggacccccccggctgcaccgacatcgacgacgccctgcactgcagagagctggagaacggcaacctggaggtgggcgtgcacatcgccgacgtgagccacttcatcagacccggcaacgccctggaccaggagagcgccagaagaggcaccaccgtgtacctgtgcgagaagagaatcgacatggtgcccgagctgctgagcagcaacctgtgcagcctgaagtgcgacgtggacagactggccttcagctgcatctgggagatgaaccacaacgccgagatcctgaagaccaagttcaccaagagcgtgatcaacagcaaggccagcctgacctacgccgaggcccagctgagaatcgacagcgccaacatgaacgacgacatcaccaccagcctgagaggcctgaacaagctggccaagatcctgaagaagagaagaatcgagaagggcgccctgaccctgagcagccccgaggtgagattccacatggacagcgagacccacgaccccatcgacctgcagaccaaggagctgagagagaccaacagcatggtggaggagttcatgctgctggccaacatcagcgtggccaagaagatccacgaggagttcagcgagcacgccctgctgagaaagcaccccgcccccccccccagcaactacgagatcctggtgaaggccgccagaagcagaaacctggagatcaagaccgacaccgccaagagcctggccgagagcctggaccaggccgagagccccaccttcccctacctgaacaccctgctgagaatcctggccaccagatgcatgatgcaggccgtgtacttctgcagcggcatggacaacgacttccaccactacggcctggccagccccatctacacccacttcaccagccccatcagaagatacgccgacgtgatcgtgcacagactgctggccgtggccatcggcgccgactgcacctaccccgagctgaccgacaagcacaagctggccgacatctgcaagaacctgaacttcagacacaagatggcccagtacgcccagagagccagcgtggccttccacacccagctgttcttcaagagcaagggcatcgtgagcgaggaggcctacatcctgttcgtgagaaagaacgccatcgtggtgctgatccccaagtacggcctggagggcaccgtgttcttcgaggagaaggacaagcccaacccccagctgatctacgacgacgagatccccagcctgaagatcgaggacaccgtgttccacgtgttcgacaaggtgaaggtgaagatcatgctggacagcagcaacctgcagcaccagaagatcagaatgagcctggtggagccccagatccccggcatcagcatccccaccgacaccagcaacatggacctgaacggccccaagaagaagaagatgaagctgggcaagtag

SEQ ID NO: 79312 - DNA, 2916 bp, synthetic construct
  misc_feature 1..2916: note = Description of Artificial Sequence: Synthetic coding sequence
  source 1..2916: mol_type = other DNA
atgcagaccgcctgccaggccgtgcagcaccagagaggcagaagacagtacaacaagctgagaaacctgctgaaggacgccagacacgactgcatcctgttcgccaacgagttccagcagtgctgctacctgcccagagagagaggcgagagcatggagaagtggcagaccagaagcatctacaacgccgccgtgtggtactaccaccactgccaggacagaatgcccatcgtgatggtgaccgaggacgaggaggccatccagcagtacggcagcgagaccgagggcgtgttcgtgatcaccttcaagaactacctggacaacttctggcccgacctgaaggccgcccacgagctgtgcgacagcatcctgcagagcagaagagagagagagaacgagagccaggagagccacggcaaggagtaccccgagcacctgcccctggaggtgctggaggccggcatcaagagcggcagatacatccagggcatcctgaacgtgaacaagcacagagcccagatcgaggccttcgtgagactgcagggcgccagcagcaaggacagcgacctggtgagcgacatcctgatccacggcatgaaggccagaaacagaagcatccacggcgacgtggtggtggtggagctgctgcccaagaacgagtggaagggcagaaccgtggccctgtgcgagaacgactgcgacgacaaggccagcggcgagagccccagcgagcccatgcccaccggcagagtggtgggcatcctgcagaagaactggagagactacgtggtgaccttccccagcaaggaggaggtgcagagccagggcaagaacgcccagaagatcctggtgaccccctgggactacagaatccccaagatcagaatcagcacccagcaggccgagaccctgcaggacttcagagtggtggtgagaatcgacagctgggagagcaccagcgtgtaccccaacggccacttcgtgagagtgctgggcagaatcggcgacctggagggcgagatcgccaccatcctggtggagaacagcatcagcgtgatccccttcagcgaggcccagatgtgcgagatgcccgtgaacacccccgagagcccctggaaggtgagccccgaggaggagcagaagagaaaggacctgagaaagagccacctggtgttcagcatcgaccccaagggctgcgaggacgtggacgacaccctgagcgtgagaaccctgaacaacggcaacctggagctgggcgtgcacatcgccgacgtgacccacttcgtggcccccaacagctacatcgacatcgaggccagaaccagagccaccacctactacctggccgacagaagatacgacatgctgcccagcgtgctgagcgccgacctgtgcagcctgctgggcggcgtggacagatacgccgtgagcatcatgtgggagctggacaaggccagctacgagatcaagaaggtgtggtacggcagaaccatcatcagaagcgcctacaagctgttctacgaggccgcccaggagctgctggacggcaacctgagcgtggtggacgacatccccgagttcaaggacctggacgagaagagcagacaggccaagctggaggagctggtgtgggccatcggcaagctgaccgacatcgccagacacgtgagagccaagagagacggctgcggcgccctggagctggagggcgtggaggtgtgcgtgcagctggacgacaagaagaacatccacgacctgatccccaagcagcccctggaggtgcacgagaccgtggccgagtgcatgatcctggccaaccactgggtggccaagaagatctgggagagcttcccccaccaggccctgctgagacagcacccccccccccaccaggagttcttcagcgagctgagagagtgcgccaaggccaagggcttcttcatcgacaccagaagcaacaagaccctggccgacagcctggacaacgccaacgacccccacgaccccatcgtgaacagactgctgagaagcatggccacccaggccatgagcaacgccctgtacttcagcaccggcagctgcgccgaggaggagttccaccactacggcctggccctggacaagtacacccacttcaccagccccatcagaagatacagcgacatcgtggtgcacagactgctgatggccgccatcagcaaggacaagaagatggagatcaagggcaacctgttcagcaacaaggacctggaggagctgtgcagacacatcaacaacagaaaccaggccgcccagcacagccagaagcagagcaccgagctgttccagtgcatgtacttcaaggacaaggaccccgccaccgaggagagatgcatcagcgacggcgtgatctacagcatcagaaccaacggcgtgctgctgttcatccccagattcggcatcaagggcgccgcctacctgaagaacaaggacggcctggtgatcagctgcggccccgacagctgcagcgagtggaagcccggcagcctgcagagattccagaacaagatcaccagcaccaccaccgacggcgagagcgtgaccttccacctgttcgaccacgtgaccgtgagaatcagcatccaggccagcagatgccacagcgacaccatcagactggagatcatcagcaacaagccctacaagatccccaacaccgagctgatccaccagagcagccccctgctgaagagcgagctggtgaaggaggtgaccaagagcgtggaggaggcccagctggcccaggaggtgaaggtgaacatcatccaggaggagtaccaggagtacagacagaccaagggcagaagcctgtacaccctgctggaggagatcagagacctggccctgctggacgtgagcaacaactacggcatctag

SEQ ID NO: 79313 - DNA, 3165 bp, synthetic construct
  misc_feature 1..3165: note = Description of Artificial Sequence: Synthetic coding sequence
  source 1..3165: mol_type = other DNA
atgctgcagaagagagagaaggtgctgctgctgagaaccttccagggcagaaccctgagaatcgtgagagagcactacctgagaccctgcgtgccctgccacagccccctgtgcccccagcccgccgcctgcagccacgacggcaagctgctgagcagcgacgtgacccactacgtgatccccgactggaaggtggtgcaggactacctggagatcctggagttccccgagctgaagggcatcatcttcatgcagaccgcctgccaggccgtgcagcaccagagaggcagaagacagtacaacaagctgagaaacctgctgaaggacgccagacacgactgcatcctgttcgccaacgagttccagcagtgctgctacctgcccagagagagaggcgagagcatggagaagtggcagaccagaagcatctacaacgccgccgtgtggtactaccaccactgccaggacagaatgcccatcgtgatggtgaccgaggacgaggaggccatccagcagtacggcagcgagaccgagggcgtgttcgtgatcaccttcaagaactacctggacaacttctggcccgacctgaaggccgcccacgagctgtgcgacagcatcctgcagagcagaagagagagagagaacgagagccaggagagccacggcaaggagtaccccgagcacctgcccctggaggtgctggaggccggcatcaagagcggcagatacatccagggcatcctgaacgtgaacaagcacagagcccagatcgaggccttcgtgagactgcagggcgccagcagcaaggacagcgacctggtgagcgacatcctgatccacggcatgaaggccagaaacagaagcatccacggcgacgtggtggtggtggagctgctgcccaagaacgagtggaagggcagaaccgtggccctgtgcgagaacgactgcgacgacaaggccagcggcgagagccccagcgagcccatgcccaccggcagagtggtgggcatcctgcagaagaactggagagactacgtggtgaccttccccagcaaggaggaggtgcagagccagggcaagaacgcccagaagatcctggtgaccccctgggactacagaatccccaagatcagaatcagcacccagcaggccgagaccctgcaggacttcagagtggtggtgagaatcgacagctgggagagcaccagcgtgtaccccaacggccacttcgtgagagtgctgggcagaatcggcgacctggagggcgagatcgccaccatcctggtggagaacagcatcagcgtgatccccttcagcgaggcccagatgtgcgagatgcccgtgaacacccccgagagcccctggaaggtgagccccgaggaggagcagaagagaaaggacctgagaaagagccacctggtgttcagcatcgaccccaagggctgcgaggacgtggacgacaccctgagcgtgagaaccctgaacaacggcaacctggagctgggcgtgcacatcgccgacgtgacccacttcgtggcccccaacagctacatcgacatcgaggccagaaccagagccaccacctactacctggccgacagaagatacgacatgctgcccagcgtgctgagcgccgacctgtgcagcctgctgggcggcgtggacagatacgccgtgagcatcatgtgggagctggacaaggccagctacgagatcaagaaggtgtggtacggcagaaccatcatcagaagcgcctacaagctgttctacgaggccgcccaggagctgctggacggcaacctgagcgtggtggacgacatccccgagttcaaggacctggacgagaagagcagacaggccaagctggaggagctggtgtgggccatcggcaagctgaccgacatcgccagacacgtgagagccaagagagacggctgcggcgccctggagctggagggcgtggaggtgtgcgtgcagctggacgacaagaagaacatccacgacctgatccccaagcagcccctggaggtgcacgagaccgtggccgagtgcatgatcctggccaaccactgggtggccaagaagatctgggagagcttcccccaccaggccctgctgagacagcacccccccccccaccaggagttcttcagcgagctgagagagtgcgccaaggccaagggcttcttcatcgacaccagaagcaacaagaccctggccgacagcctggacaacgccaacgacccccacgaccccatcgtgaacagactgctgagaagcatggccacccaggccatgagcaacgccctgtacttcagcaccggcagctgcgccgaggaggagttccaccactacggcctggccctggacaagtacacccacttcaccagccccatcagaagatacagcgacatcgtggtgcacagactgctgatggccgccatcagcaaggacaagaagatggagatcaagggcaacctgttcagcaacaaggacctggaggagctgtgcagacacatcaacaacagaaaccaggccgcccagcacagccagaagcagagcaccgagctgttccagtgcatgtacttcaaggacaaggaccccgccaccgaggagagatgcatcagcgacggcgtgatctacagcatcagaaccaacggcgtgctgctgttcatccccagattcggcatcaagggcgccgcctacctgaagaacaaggacggcctggtgatcagctgcggccccgacagctgcagcgagtggaagcccggcagcctgcagagattccagaacaagatcaccagcaccaccaccgacggcgagagcgtgaccttccacctgttcgaccacgtgaccgtgagaatcagcatccaggccagcagatgccacagcgacaccatcagactggagatcatcagcaacaagccctacaagatccccaacaccgagctgatccaccagagcagccccctgctgaagagcgagctggtgaaggaggtgaccaagagcgtggaggaggcccagctggcccaggaggtgaaggtgaacatcatccaggaggagtaccaggagtacagacagaccaagggcagaagcctgtacaccctgctggaggagatcagagacctggccctgctggacgtgagcaacaactacggcatctag

SEQ ID NO: 79314 - DNA, 762 bp, synthetic construct
  misc_feature 1..762: note = Description of Artificial Sequence: Synthetic coding sequence
  source 1..762: mol_type = other DNA
atggagaagtggcagaccagaagcatctacaacgccgccgtgtggtactaccaccactgccaggacagaatgcccatcgtgatggtgaccgaggacgaggaggccatccagcagtacggcagcgagaccgagggcgtgttcgtgatcaccttcaagaactacctggacaacttctggcccgacctgaaggccgcccacgagctgtgcgacagcatcctgcagagcagaagagagagagagaacgagagccaggagagccacggcaaggagtaccccgagcacctgcccctggaggtgctggaggccggcatcaagagcggcagatacatccagggcatcctgaacgtgaacaagcacagagcccagatcgaggccttcgtgagactgcagggcgccagcagcaaggacagcgacctggtgagcgacatcctgatccacggcatgaaggccagaaacagaagcatccacggcgacgtggtggtggtggagctgctgcccaagaacgagtggaagggcagaaccgtggccctgtgcgagaacgactgcgacgacaaggccagcggcgagagccccagcgagcccatgcccaccggcctgcagggcggcagagcccacagattcctgggcgtgaacatctgcgtgagcaagtggaccttctgcgcctgcttcagaaagaacagaagaagcggcagaggcaactgcaaccaccccggcggcaagcagtacttcagctacagcttcctgagaagcagcgacgtgtag

SEQ ID NO: 79315 - DNA, 453 bp, synthetic construct
  misc_feature 1..453: note = Description of Artificial Sequence: Synthetic coding sequence
  source 1..453: mol_type = other DNA
atggagaagtggcagaccagaagcatctacaacgccgccgtgtggtactaccaccactgccaggacagaatgcccatcgtgatggtgaccgaggacgaggaggccatccagcagtacggcagcgagaccgagggcgtgttcgtgatcaccttcaagaactacctggacaacttctggcccgacctgaaggccgcccacgagctgtgcgacagcatcctgcagagcagaagagagagagagaacgagagccaggagagccacggcaaggagtaccccgagcacctgcccctggaggtgctggaggccggcatcaagagcggcagatacatccagggcatcctgaacgtgaacaagcacagagcccagatcgaggccttcgtgagactgcagggcgccagcagcaaggacagcgacctggtgagcgacatcctgatccacggcatgaaggcctag

SEQ ID NO: 79316 - DNA, 174 bp, synthetic construct
  misc_feature 1..174: note = Description of Artificial Sequence: Synthetic coding sequence
  source 1..174: mol_type = other DNA
atgcagaccgcctgccaggccgtgcagcaccagagaggcagaagacagtacaacaagctgagaaacctgctgaaggacgccagacacgactgcatcctgttcgccaacgagttccagcagtgctgctacctgcccagagagagaggcgagagcatggagaagtggcagacctag

SEQ ID NO: 79317 - DNA, 294 bp, synthetic construct
  misc_feature 1..294: note = Description of Artificial Sequence: Synthetic coding sequence
  source 1..294: mol_type = other DNA
atgcagaccgcctgccaggccgtgcagcaccagagaggcagaagacagtacaacaagctgagaaacctgctgaaggacgccagacacgactgcatcctgttcgccaacgagttccagcagtgctgctacctgcccagagagagaggcgagagcatggagaagtggcagaccagaagcatctacaacgccgccgtgtggtactaccaccactgccaggacagaatgcccatcgtgatggtgaccgaggacgaggaggccatccagcagtacggcagcgagaccgagggcgtgtag

SEQ ID NO: 79318 - DNA, 312 bp, synthetic construct
  misc_feature 1..312: note = Description of Artificial Sequence: Synthetic coding sequence
  source 1..312: mol_type = other DNA
atgcagaccgcctgccaggccgtgcagcaccagagaggcagaagacagtacaacaagctgagaaacctgctgaaggacgccagacacgactgcatcctgttcgccaacgagttccagcagtgctgctacctgcccagagagagaggcgagagcatggagaagtggcagaccagaagcatctacaacgccgccgtgtggtactaccaccactgccaggacagaatgcccatcgtgatggtgaccgaggacgaggaggccatccagcagtacggcagcgagaccgagggcgtgttcgtgatcaccttcaagtag

SEQ ID NO: 79319 - DNA, 1812 bp, synthetic construct
  misc_feature 1..1812: note = Description of Artificial Sequence: Synthetic coding sequence
  source 1..1812: mol_type = other DNA
atgagccaccccgactacagaatgaacctgagacccctgggcacccccagaggcgtgagcgccgtggccggcccccacgacatcggcgccagccccggcgacaagaagagcaagaacagaagcaccagaggcaagaagaagagcatcttcgagacctacatgagcaaggaggacgtgagcgagggcctgaagagaggcaccctgatccagggcgtgctgagaatcaaccccaagaagttccacgaggccttcatccccagccccgacggcgacagagacatcttcatcgacggcgtggtggccagaaacagagccctgaacggcgacctggtggtggtgaagctgctgcccgaggagcactggaaggtggtgaagcccgagagcaacgacaaggagaccgaggccgcctacgagagcgacatccccgaggagctgtgcggccaccacctgccccagcagagcctgaagagctacaacgacagccccgacgtgatcgtggaggcccagttcgacggcagcgacagcgaggacggccacggcatcacccagaacgtgctggtggacggcgtgaagaagctgagcgtgtgcgtgagcgagaagggcagagaggacggcgacgcccccgtgaccaaggacgagaccacctgcatcagccaggacaccagagccctgagcgagaagagcctgcagagaagcgccaaggtggtgtacatcctggagaagaagcacagcagagccgccaccggcttcctgaagctgctggccgacaagaacagcgagctgttcagaaagtacgccctgttcagccccagcgaccacagagtgcccagaatctacgtgcccctgaaggactgcccccaggacttcgtggccagacccaaggactacgccaacaccctgttcatctgcagaatcgtggactggaaggaggactgcaacttcgccctgggccagctggccaagagcctgggccaggccggcgagatcgagcccgagaccgagggcatcctgaccgagtacggcgtggacttcagcgacttcagcagcgaggtgctggagtgcctgccccagggcctgccctggaccatcccccccgaggagttcagcaagagaagagacctgagaaaggactgcatcttcaccatcgaccccagcaccgccagagacctggacgacgccctgagctgcaagcccctggccgacggcaacttcaaggtgggcgtgcacatcgccgacgtgagctacttcgtgcccgagggcagcgacctggacaaggtggccgccgagagagccaccagcgtgtacctggtgcagaaggtggtgcccatgctgcccagactgctgtgcgaggagctgtgcagcctgaaccccatgagcgacaagctgaccttcagcgtgatctggaccctgacccccgagggcaagatcctggacgagtggttcggcagaaccatcatcagaagctgcaccaagctgagctacgagcacgcccagagcatgatcgagagccccaccgagaagatccccgccaaggagctgccccccatcagccccgagcacagcagcgaggaggtgcaccagcagaacgccgacaaggacggcgccgcccacctgcaggccagccacagccccagcgccgaggacgccgaggcccagcccagcaccgaggagagactgcccgagaccagaggcatctgcgacagagaccccgacaccagactgttcttcctgcagcagcagagcagagtgctggaggccaagccccagaacaccatcagagtggaggagcagaccacccagctgcagatctag

SEQ ID NO: 79320 - DNA, 2658 bp, synthetic construct
  misc_feature 1..2658: note = Description of Artificial Sequence: Synthetic coding sequence
  source 1..2658: mol_type = other DNA
atgagccaccccgactacagaatgaacctgagacccctgggcacccccagaggcgtgagcgccgtggccggcccccacgacatcggcgccagccccggcgacaagaagagcaagaacagaagcaccagaggcaagaagaagagcatcttcgagacctacatgagcaaggaggacgtgagcgagggcctgaagagaggcaccctgatccagggcgtgctgagaatcaaccccaagaagttccacgaggccttcatccccagccccgacggcgacagagacatcttcatcgacggcgtggtggccagaaacagagccctgaacggcgacctggtggtggtgaagctgctgcccgaggagcactggaaggtggtgaagcccgagagcaacgacaaggagaccgaggccgcctacgagagcgacatccccgaggagctgtgcggccaccacctgccccagcagagcctgaagagctacaacgacagccccgacgtgatcgtggaggcccagttcgacggcagcgacagcgaggacggccacggcatcacccagaacgtgctggtggacggcgtgaagaagctgagcgtgtgcgtgagcgagaagggcagagaggacggcgacgcccccgtgaccaaggacgagaccacctgcatcagccaggacaccagagccctgagcgagaagagcctgcagagaagcgccaaggtggtgtacatcctggagaagaagcacagcagagccgccaccggcttcctgaagctgctggccgacaagaacagcgagctgttcagaaagtacgccctgttcagccccagcgaccacagagtgcccagaatctacgtgcccctgaaggactgcccccaggacttcgtggccagacccaaggactacgccaacaccctgttcatctgcagaatcgtggactggaaggaggactgcaacttcgccctgggccagctggccaagagcctgggccaggccggcgagatcgagcccgagaccgagggcatcctgaccgagtacggcgtggacttcagcgacttcagcagcgaggtgctggagtgcctgccccagggcctgccctggaccatcccccccgaggagttcagcaagagaagagacctgagaaaggactgcatcttcaccatcgaccccagcaccgccagagacctggacgacgccctgagctgcaagcccctggccgacggcaacttcaaggtgggcgtgcacatcgccgacgtgagctacttcgtgcccgagggcagcgacctggacaaggtggccgccgagagagccaccagcgtgtacctggtgcagaaggtggtgcccatgctgcccagactgctgtgcgaggagctgtgcagcctgaaccccatgagcgacaagctgaccttcagcgtgatctggaccctgacccccgagggcaagatcctggacgagtggttcggcagaaccatcatcagaagctgcaccaagctgagctacgagcacgcccagagcatgatcgagagccccaccgagaagatccccgccaaggagctgccccccatcagccccgagcacagcagcgaggaggtgcaccaggccgtgctgaacctgcacggcatcgccaagcagctgagacagcagagattcgtggacggcgccctgagactggaccagctgaagctggccttcaccctggaccacgagaccggcctgccccagggctgccacatctacgagtacagagagagcaacaagctggtggaggagttcatgctgctggccaacatggccgtggcccacaagatccacagagccttccccgagcaggccctgctgagaagacacccccccccccagaccagaatgctgagcgacctggtggagttctgcgaccagatgggcctgcccgtggacttcagcagcgccggcgccctgaacaagagcctgacccagaccttcggcgacgacaagtacagcctggccagaaaggaggtgctgaccaacatgtgcagcagacccatgcagatggccctgtacttctgcagcggcctgctgcaggaccccgcccagttcagacactacgccctgaacgtgcccctgtacacccacttcaccagccccatcagaagattcgccgacgtgctggtgcacagactgctggccgccgccctgggctacagagagagactggacatggcccccgacaccctgcagaagcaggccgaccactgcaacgacagaagaatggccagcaagagagtgcaggagctgagcaccagcctgttcttcgccgtgctggtgaaggagagcggccccctggagagcgaggccatggtgatgggcatcctgaagcaggccttcgacgtgctggtgctgagatacggcgtgcagaagagaatctactgcaacgccctggccctgagaagccaccacttccagaaggtgggcaagaagcccgagctgaccctggtgtgggagcccgaggacatggagcaggagcccgcccagcaggtgatcaccatcttcagcctggtggaggtggtgctgcaggccgagagcaccgccctgaagtacagcgccatcctgaagagacccggcacccagggccacctgggccccgagaaggaggaggaggagagcgacggcgagcccgaggacagcagcaccagctag

SEQ ID NO: 79321 - DNA, 1071 bp, synthetic construct
  misc_feature 1..1071: note = Description of Artificial Sequence: Synthetic coding sequence
  source 1..1071: mol_type = other DNA
atgagccaccccgactacagaatgaacctgagacccctgggcacccccagaggcgtgagcgccgtggccggcccccacgacatcggcgccagccccggcgacaagaagagcaagaacagaagcaccagaggcaagaagaagagcatcttcgagacctacatgagcaaggaggacgtgagcgagggcctgaagagaggcaccctgatccagggcgtgctgagaatcaaccccaagaagttccacgaggccttcatccccagccccgacggcgacagagacatcttcatcgacggcgtggtggccagaaacagagccctgaacggcgacctggtggtggtgaagctgctgcccgaggagcactggaaggtggtgaagcccgagagcaacgacaaggagaccgaggccgcctacgagagcgacatccccgaggagctgtgcggccaccacctgccccagcagagcctgaagagctacaacgacagccccgacgtgatcgtggaggcccagttcgacggcagcgacagcgaggacggccacggcatcacccagaacgtgctggtggacggcgtgaagaagctgagcgtgtgcgtgagcgagaaggacaacgagatcgaggcccagagaagcagctgggcctaccccgtgagccacagaaagagcgaggagagaatggtgatgcacagactgcagaagatgagaccccccgccttccacaagacccaggagctgtacagaagaaacccctgcaaggaccagcagagatggttcaccagctggagaaagaacatcctggagcagcagcccgccagcagcaacagctggctgatcagaaccgccaactgcctgggcaacaccccctgcttcctgccccagaccaccgagtgcctggagttcatgtgcctgagcagaaccgtgcccagaaccctgtggcacggcctgaagatcatgcccacccactgcagcagcgccgccctgtggaccggcagaagaaccgccatcctgccctggggcagctggctgagagtgctgggcagactggtgaagctgagcctgaagcagaaggagtactag

SEQ ID NO: 79322 - DNA, 2658 bp, synthetic construct; identical to SEQ ID NO: 79320
  misc_feature 1..2658: note = Description of Artificial Sequence: Synthetic coding sequence
  source 1..2658: mol_type = other DNA

SEQ ID NO: 79323 - DNA, 750 bp, synthetic construct
  misc_feature 1..750: note = Description of Artificial Sequence: Synthetic coding sequence
  source 1..750: mol_type = other DNA
atgagccaccccgactacagaatgaacctgagacccctgggcacccccagaggcgtgagcgccgtggccggcccccacgacatcggcgccagccccggcgacaagaagagcaagaacagaagcaccagaggcaagaagaagagcatcttcgagacctacatgagcaaggaggacgtgagcgagggcctgaagagaggcaccctgatccagggcgtgctgagaatcaaccccaagaagttccacgaggccttcatccccagccccgacggcgacagagacatcttcatcgacggcgtggtggccagaaacagagccctgaacggcgacctggtggtggtgaagctgctgcccgaggagcactggaaggtggtgaagcccgagagcaacgacaaggagaccgaggccgcctacgagagcgacatccccgaggagctgtgcggccaccacctgccccagcagagcctgaagagctacaacgacagccccgacgtgatcgtggaggcccagttcgacggcagcgacagcgaggacggccacggcatcacccagaacgtgctggtggacggcgtgaagaagctgagcgtgtgcgtgagcgagaagggcagagaggacggcgacgcccccgtgaccaaggacgagaccacctgcatcagccaggacaccagagccctgagcgagaagagcctgcagagaagcgccaaggtgatcgcctacagattcagccccagagtgcagatggccttcacctag

SEQ ID NO: 79324 - DNA, 2028 bp, synthetic construct
  misc_feature 1..2028: note = Description of Artificial Sequence: Synthetic coding sequence
  source 1..2028: mol_type = other DNA
atgagccaccccgactacagaatgaacctgagacccctgggcacccccagaggcgtgagcgccgtggccggcccccacgacatcggcgccagccccggcgacaagaagagcaagaacagaagcaccagaggcaagaagaagagcatcttcgagacctacatgagcaaggaggacgtgagcgagggcctgaagagaggcaccctgatccagggcgtgctgagaatcaaccccaagaagttccacgaggccttcatccccagccccgacggcgacagagacatcttcatcgacggcgtggtggccagaaacagagccctgaacggcgacctggtggtggtgaagctgctgcccgaggagcactggaaggtggtgaagcccgagagcaacgacaaggagaccgaggccgcctacgagagcgacatccccgaggagctgtgcggccaccacctgccccagcagagcctgaagagctacaacgacagccccgacgtgatcgtggaggcccagttcgacggcagcgacagcgaggacggccacggcatcacccagaacgtgctggtggacggcgtgaagaagctgagcgtgtgcgtgagcgagaagggcagagaggacggcgacgcccccgtgaccaaggacgagaccacctgcatcagccaggacaccagagccctgagcgagaagagcctgcagagaagcgccaaggtggtgtacatcctggagaagaagcacagcagagccgccaccggcttcctgaagctgctggccgacaagaacagcgagctgttcagaaagtacgccctgttcagccccagcgaccacagagtgcccagaatctacgtgcccctgaaggactgcccccaggacttcgtggccagacccaaggactacgccaacaccctgttcatctgcagaatcgtggactggaaggaggactgcaacttcgccctgggccagctggccaagagcctgggccaggccggcgagatcgagcccgagaccgagggcatcctgaccgagtacggcgtggacttcagcgacttcagcagcgaggtgctggagtgcctgccccagggcctgccctggaccatcccccccgaggagttcagcaagagaagagacctgagaaaggactgcatcttcaccatcgaccccagcaccgccagagacctggacgacgccctgagctgcaagcccctggccgacggcaacttcaaggtgggcgtgcacatcgccgacgtgagctacttcgtgcccgagggcagcgacctggacaaggtggccgccgagagagccaccagcgtgtacctggtgcagaaggtggtgcccatgctgcccagactgctgtgcgaggagctgtgcagcctgaaccccatgagcgacaagctgaccttcagcgtgatctggaccctgacccccgagggcaagatcctggacgagtggttcggcagaaccatcatcagaagctgcaccaagctgagctacgagcacgcccagagcatgatcgagagccccaccgagaagatccccgccaaggagctgccccccatcagccccgagcacagcagcgaggaggtgcaccaggccgtgctgaacctgcacggcatcgccaagcagctgagacagcagagattcgtggacggcgccctgagactggaccagctgaagctggccttcaccctggaccacgagaccggcctgccccagggctgccacatctacgagtacagagagagcaacaagctggtggaggagttcatgctgctggccaacatggccgtggcccacaagatccacagagccttccccgagcaggccctgctgagaagacacccccccccccagaccagaatgctgagcgacctggtggagttctgcgaccagatgggcctgcccgtggacttcagcagcgccggcgccctgaacaagagcctgacccagaccttcggcgacgacaagtacagcctggccagaaaggaggtgctgaccaacatgtgcagcagactgcccgtgcccccccactggctgtag

SEQ ID NO: 79325 - DNA, 435 bp, synthetic construct
  misc_feature 1..435: note = Description of Artificial Sequence: Synthetic coding sequence
  source 1..435: mol_type = other DNA
atgagccaccccgactacagaatgaacctgagacccctgggcacccccagaggcgtgagcgccgtggccggcccccacgacatcggcgccagccccggcgacaagaagagcaagaacagaagcaccagaggcaagaagaagagcatcttcgagacctacatgagcaaggaggacgtgagcgagggcctgaagagaggcaccctgatccagggcgtgctgagaatcaaccccaagaagttccacgaggccttcatccccagccccgacggcgacagagacatcttcatcgacggcgtggtggccagaaacagagccctgaacggcgacctggtggtggtgaagctgctgcccgaggagcactggaaggtggtgaagcccgagagcaacgacaaggagaccgaggccgcctacgagagcgacatccccgaggagtag

SEQ ID NO: 79326 - DNA, 1860 bp, synthetic construct
  misc_feature 1..1860: note = Description of Artificial Sequence: Synthetic coding sequence
  source 1..1860: mol_type = other DNA
atgagccaccccgactacagaatgaacctgagacccctgggcacccccagaggcgtgagcgccgtggccggcccccacgacatcggcgccagccccggcgacaagaagagcaagaacagaagcaccagaggcaagaagaagagcatcttcgagacctacatgagcaaggaggacgtgagcgagggcctgaagagaggcaccctgatccagggcgtgctgagaatcaaccccaagaagttccacgaggccttcatccccagccccgacggcgacagagacatcttcatcgacggcgtggtggccagaaacagagccctgaacggcgacctggtggtggtgaagctgctgcccgaggagcactggaaggtggtgaagcccgagagcaacgacaaggagaccgaggccgcctacgagagcgacatccccgaggagctgtgcggccaccacctgccccagcagagcctgaagagctacaacgacagccccgacgtgatcgtggaggcccagttcgacggcagcgacagcgaggacggccacggcatcacccagaacgtgctggtggacggcgtgaagaagctgagcgtgtgcgtgagcgagaagggcagagaggacggcgacgcccccgtgaccaaggacgagaccacctgcatcagccaggacaccagagccctgagcgagaagagcctgcagagaagcgccaaggtggtgtacatcctggagaagaagcacagcagagccgccaccggcttcctgaagctgctggccgacaagaacagcgagctgttcagaaagtacgccctgttcagccccagcgaccacagagtgcccagaatctacgtgcccctgaaggactgcccccaggacttcgtggccagacccaaggactacgccaacaccctgttcatctgcagaatcgtggactggaaggaggactgcaacttcgccctgggccagctggccaagagcctgggccaggccggcgagatcgagcccgagaccgagggcatcctgaccgagtacggcgtggacttcagcgacttcagcagcgaggtgctggagtgcctgccccagggcctgccctggaccatcccccccgaggagttcagcaagagaagagacctgagaaaggactgcatcttcaccatcgaccccagcaccgccagagacctggacgacgccctgagctgcaagcccctggccgacggcaacttcaaggtgggcgtgcacatcgccgacgtgagctacttcgtgcccgagggcagcgacctggacaaggtggccgccgagagagccaccagcgtgtacctggtgcagaaggtggtgcccatgctgcccagactgctgtgcgaggagctgtgcagcctgaaccccatgagcgacaagctgaccttcagcgtgatctggaccctgacccccgagggcaagatcctggacgagtggttcggcagaaccatcatcagaagctgcaccaagctgagctacgagcacgcccagagcatgatcgagagccccaccgagaagatccccgccaaggagctgccccccatcagccccgagcacagcagcgaggaggtgcaccaggccgtgctgaacctgcacggcatcgccaagcagctgagacagcagagattcgtggacggcgccctgagactggaccagctgaagctggccttcaccctggaccacgagaccggcctgccccagggctgccacatctacgagtacagagagagcaacaagccctgctgcgccggcacccccagacccaagcagggctgcagcgtgacctggtggaacagcgccaccagatggggctgcccctggaccagcgccccccaggagcccagcatgaaggcctag

SEQ ID NO: 79327 - DNA, 615 bp, synthetic construct
  misc_feature 1..615: note = Description of Artificial Sequence: Synthetic coding sequence
  source 1..615: mol_type = other DNA
atgagcaccgagaccgagctgcaggtggccgtgaagaccagcgccaagaaggacagcagaaagaagggccaggacagaagcgaggccaccctgatcaagagattcaagggcgagggcgtgagatacaaggccaagctgatcggcatcgacgaggtgagcgccgccagaggcgacaagctgtgccaggacagcatgatgaagctgaagggcgtggtggccggcgccagaagcaagggcgagcacaagcagaagatcttcctgaccatcagcttcggcggcatcaagatcttcgacgagaagaccggcgccctgcagcaccaccacgccgtgcacgagatcagctacatcgccaaggacatcaccgaccacagagccttcggctacgtgtgcggcaaggagggcaaccacagattcgtggccatcaagaccgcccaggccgccgagcccgtgatcctggacctgagagacctgttccagctgatctacgagctgaagcagagagaggagctggagaagaaggcccagaaggacaagcagtgcgagcaggccgtgtaccaggtgcccaccagccagaagaaggagggcgtgtacgacgtgcccaagagccagccctag

SEQ ID NO: 79328 - DNA, 642 bp, synthetic construct
  misc_feature 1..642: note = Description of Artificial Sequence: Synthetic coding sequence
  source 1..642: mol_type = other DNA
atgagcaccgagaccgagctgcaggtggccgtgaagaccagcgccaagaaggacagcagaaagaagggccaggacagaagcgaggccaccctgatcaagagattcaagggcgagggcgtgagatacaaggccaagctgatcggcatcgacgaggtgagcgccgccagaggcgacaagctgtgccaggacagcatgatgaagctgaagggcgtggtggccggcgccagaagcaagggcgagcacaagcagaagatcttcctgaccatcagcttcggcggcatcaagatcttcgacgagaagaccggcgccctgcagcaccaccacgccgtgcacgagatcagctacatcgccaaggacatcaccgaccacagagccttcggctacgtgtgcggcaaggagggcaaccacagattcgtggccatcaagaccgcccaggccgccgagcccgtgatcctggacctgagagacctgttccagctgatctacgagctgaagcagagagaggagctggagaagaaggcccagaaggacaagcagtgcgagcaggccgtgtaccagaccatcctggaggaggacgtggaggaccccgtgtaccaggtgatcagcgagaccagcagaggcttcagattcaagagcgactag

SEQ ID NO: 79329 - DNA, 1767 bp, synthetic construct
  misc_feature 1..1767: note = Description of Artificial Sequence: Synthetic coding sequence
  source 1..1767: mol_type = other DNA
atgagcaccgagaccgagctgcaggtggccgtgaagaccagcgccaagaaggacagcagaaagaagggccaggacagaagcgaggccaccctgatcaagagattcaagggcgagggcgtgagatacaaggccaagctgatcggcatcgacgaggtgagcgccgccagaggcgacaagctgtgccaggacagcatgatgaagctgaagggcgtggtggccggcgccagaagcaagggcgagcacaagcagaagatcttcctgaccatcagcttcggcggcatcaagatcttcgacgagaagaccggcgccctgcagcaccaccacgccgtgcacgagatcagctacatcgccaaggacatcaccgaccacagagccttcggctacgtgtgcggcaaggagggcaaccacagattcgtggccatcaagaccgcccaggccgccgagcccgtgatcctggacctgagagacctgttccagctgatctacgagctgaagcagagagaggagctggagaagaaggcccagaaggacaagcagtgcgagcaggccgtgtaccagaccatcctggaggaggacgtggaggaccccgtgtaccagtacatcgtgttcgaggccggccacgagcccatcagagaccccgagaccgaggagaacatctaccaggtgcccaccagccagaagaaggagggcgtgtacgacgtgcccaagagccagcccgtgagcaacggctacagcttcgaggacttcgaggagagattcgccgccgccacccccaacagaaacctgcccaccgacttcgacgagatcttcgaggccaccaaggccgtgacccagctggagctgttcggcgacatgagcaccccccccgacatcaccagcccccccacccccgccacccccggcgacgccttcatccccagcagcagccagaccctgcccgccagcgccgacgtgttcagcagcgtgcccttcggcaccgccgccgtgcccagcggctacgtggccatgggcgccgtgctgcccagcttctggggccagcagcccctggtgcagcagcagatggtgatgggcgcccagccccccgtggcccaggtgatgcccggcgcccagcccatcgcctggggccagcccggcctgttccccgccacccagcagccctggcccaccgtggccggccagttcccccccgccgccttcatgcccacccagaccgtgatgcccctgcccgccgccatgttccagggccccctgacccccctggccaccgtgcccggcaccagcgacagcaccagaagcagcccccagaccgacaagcccagacagaagatgggcaaggagaccttcaaggacttccagatggcccagcccccccccgtgcccagcagaaagcccgaccagcccagcctgacctgcaccagcgaggccttcagcagctacttcaacaaggtgggcgtggcccaggacaccgacgactgcgacgacttcgacatcagccagctgaacctgacccccgtgaccagcaccacccccagcaccaacagcccccccacccccgcccccagacagagcagccccagcaagagcagcgccagccacgccagcgaccccaccaccgacgacatcttcgaggagggcttcgagagccccagcaagagcgaggagcaggaggcccccgacggcagccaggccagcagcaacagcgaccccttcggcgagcccagcggcgagcccagcggcgacaacatcagcccccaggccggcagctag

SEQ ID NO: 79330 - DNA, 720 bp, synthetic construct
  misc_feature 1..720: note = Description of Artificial Sequence: Synthetic coding sequence
  source 1..720: mol_type = other DNA
atgagcaccgagaccgagctgcaggtggccgtgaagaccagcgccaagaaggacagcagaaagaagggccaggacagaagcgaggccaccctgatcaagagattcaagggcgagggcgtgagatacaaggccaagctgatcggcatcgacgaggtgagcgccgccagaggcgacaagctgtgccaggacagcatgatgaagctgaagggcgtggtggccggcgccagaagcaagggcgagcacaagcagaagatcttcctgaccatcagcttcggcggcatcaagatcttcgacgagaagaccggcgtgcccaccagccagaagaaggagggcgtgtacgacgtgcccaagagccagcccgtgagcaacggctacagcttcgaggacttcgaggagagattcgccgccgccacccccaacagaaacctgcccaccgacttcgacgagatcttcgaggccaccaaggccgtgacccagctggagctgttcggcgacatgagcaccccccccgacatcaccagcccccccacccccgccacccccggcgacgccttcatccccagcagcagccagaccctgcccgccagcgccgacgtgttcagcagcgtgcccttcggcaccgccgccgtgcccagcggctacgtggccatgggcgccgtgctgcccagcttctggggccagcagcccctggtgcagcagcagatggtgatgggcgcctag

SEQ ID NO: 79331 - DNA, 1668 bp, synthetic construct
  misc_feature 1..1668: note = Description of Artificial Sequence: Synthetic coding sequence
  source 1..1668: mol_type = other DNA
atgagcaccgagaccgagctgcaggtggccgtgaagaccagcgccaagaaggacagcagaaagaagggccaggacagaagcgaggccaccctgatcaagagattcaagggcgagggcgtgagatacaaggccaagctgatcggcatcgacgaggtgagcgccgccagaggcgacaagctgtgccaggacagcatgatgaagctgaagggcgtggtggccggcgccagaagcaagggcgagcacaagcagaagatcttcctgaccatcagcttcggcggcatcaagatcttcgacgagaagaccggcgccctgcagcaccaccacgccgtgcacgagatcagctacatcgccaaggacatcaccgaccacagagccttcggctacgtgtgcggcaaggagggcaaccacagattcgtggccatcaagaccgcccaggccgccgagcccgtgatcctggacctgagagacctgttccagctgatctacgagctgaagcagagagaggagctggagaagaaggcccagaaggacaagcagtgcgagcaggccgtgtaccagaccatcctggaggaggacgtggaggaccccgtgtaccagtacatcgtgttcgaggccggccacgagcccatcagagaccccgagaccgaggagaacatctaccaggtgcccaccagccagaagaaggagggcgtgtacgacgtgcccaagagccagcccgtgagcgccgtgacccagctggagctgttcggcgacatgagcaccccccccgacatcaccagcccccccacccccgccacccccggcgacgccttcatccccagcagcagccagaccctgcccgccagcgccgacgtgttcagcagcgtgcccttcggcaccgccgccgtgcccagcggctacgtggccatgggcgccgtgctgcccagcttctggggccagcagcccctggtgcagcagcagatggtgatgggcgcccagccccccgtggcccaggtgatgcccggcgcccagcccatcgcctggggccagcccggcctgttccccgccacccagcagccctggcccaccgtggccggccagttcccccccgccgccttcatgcccacccagaccgtgatgcccctgcccgccgccatgttccagggccccctgacccccctggccaccgtgcccggcaccagcgacagcaccagaagcagcccccagaccgacaagcccagacagaagatgggcaaggagaccttcaaggacttccagatggcccagcccccccccgtgcccagcagaaagcccgaccagcccagcctgacctgcaccagcgaggccttcagcagctacttcaacaaggtgggcgtggcccaggacaccgacgactgcgacgacttcgacatcagccagctgaacctgacccccgtgaccagcaccacccccagcaccaacagcccccccacccccgcccccagacagagcagccccagcaagagcagcgccagccacgccagcgaccccaccaccgacgacatcttcgaggagggcttcgagagccccagcaagagcgaggagcaggaggcccccgacggcagccaggccagcagcaacagcgaccccttcggcgagcccagcggcgagcccagcggcgacaacatcagcccccaggccggcagctag

SEQ ID NO: 79332 - DNA, 1668 bp, synthetic construct; identical to SEQ ID NO: 79331
  misc_feature 1..1668: note = Description of Artificial Sequence: Synthetic coding sequence
  source 1..1668: mol_type = other DNA

SEQ ID NO: 79333 - DNA, 1668 bp, synthetic construct; identical to SEQ ID NO: 79331
  misc_feature 1..1668: note = Description of Artificial Sequence: Synthetic coding sequence
  source 1..1668: mol_type = other DNA

SEQ ID NO: 79334 - DNA, 1614 bp, synthetic construct
  misc_feature 1..1614: note = Description of Artificial Sequence: Synthetic coding sequence
  source 1..1614: mol_type = other DNA
atgagcaccgagaccgagctgcaggtggccgtgaagaccagcgccaagaaggacagcagaaagaagggccaggacagaagcgaggccaccctgatcaagagattcaagggcgagggcgtgagatacaaggccaagctgatcggcatcgacgaggtgagcgccgccagaggcgacaagctgtgccaggacagcatgatgaagctgaagggcgtggtggccggcgccagaagcaagggcgagcacaagcagaagatcttcctgaccatcagcttcggcggcatcaagatcttcgacgagaagaccggcgccctgcagcaccaccacgccgtgcacgagatcagctacatcgccaaggacatcaccgaccacagagccttcggctacgtgtgcggcaaggagggcaaccacagattcgtggccatcaagaccgcccaggccgccgagcccgtgatcctggacctgagagacctgttccagctgatctacgagctgaagcagagagaggagctggagaagaaggcccagaaggacaagcagtgcgagcaggccgtgtaccaggtgcccaccagccagaagaaggagggcgtgtacgacgtgcccaagagccagcccgtgagcaacggctacagcttcgaggacttcgaggagagattcgccgccgccacccccgccgtgacccagctggagctgttcggcgacatgagcaccccccccgacatcaccagcccccccacccccgccacccccggcgacgccttcatccccagcagcagccagaccctgcccgccagcgccgacgtgttcagcagcgtgcccttcggcaccgccgccgtgcccagcggctacgtggccatgggcgccgtgctgcccagcttctggggccagcagcccctggtgcagcagcagatggtgatgggcgcccagccccccgtggcccaggtgatgcccggcgcccagcccatcgcctggggccagcccggcctgttccccgccacccagcagccctggcccaccgtggccggccagttcccccccgccgccttcatgcccacccagaccgtgatgcccctgcccgccgccatgttccagggccccctgacccccctggccaccgtgcccggcaccagcgacagcaccagaagcagcccccagaccgacaagcccagacagaagatgggcaaggagaccttcaaggacttccagatggcccagcccccccccgtgcccagcagaaagcccgaccagcccagcctgacctgcaccagcgaggccttcagcagctacttcaacaaggtgggcgtggcccaggacaccgacgactgcgacgacttcgacatcagccagctgaacctgacccccgtgaccagcaccacccccagcaccaacagcccccccacccccgcccccagacagagcagccccagcaagagcagcgccagccacgccagcgaccccaccaccgacgacatcttcgaggagggcttcgagagccccagcaagagcgaggagcaggaggcccccgacggcagccaggccagcagcaacagcgaccccttcggcgagcccagcggcgagcccagcggcgacaacatcagcccccaggccggcagctag

SEQ ID NO: 79335 - DNA, 1662 bp, synthetic construct
  misc_feature 1..1662: note = Description of Artificial Sequence: Synthetic coding sequence
  source 1..1662: mol_type = other DNA
atgagcaccgagaccgagctgcaggtggccgtgaagaccagcgccaagaaggacagcagaaagaagggccaggacagaagcgaggccaccctgatcaagagattcaagggcgagggcgtgagatacaaggccaagctgatcggcatcgacgaggtgagcgccgccagaggcgacaagctgtgccaggacagcatgatgaagctgaagggcgtggtggccggcgccagaagcaagggcgagcacaagcagaagatcttcctgaccatcagcttcggcggcatcaagatcttcgacgagaagaccggcgccctgcagcaccaccacgccgtgcacgagatcagctacatcgccaaggacatcaccgaccacagagccttcggctacgtgtgcggcaaggagggcaaccacagattcgtggccatcaagaccgcccaggccgccgagcccgtgatcctggacctgagagacctgttccagctgatctacgagctgaagcagagagaggagctggagaagaaggcccagaaggacaagcagtgcgagcaggccgtgtaccaggtgcccaccagccagaagaaggagggcgtgtacgacgtgcccaagagccagcccgtgagcaacggctacagcttcgaggacttcgaggagagattcgccgccgccacccccaacagaaacctgcccaccgacttcgacgagatcttcgaggccaccaaggccgtgacccagctggagctgttcggcgacatgagcaccccccccgacatcaccagcccccccacccccgccacccccggcgacgccttcatccccagcagcagccagaccctgcccgccagcgccgacgtgttcagcagcgtgcccttcggcaccgccgccgtgcccagcggctacgtggccatgggcgccgtgctgcccagcttctggggccagcagcccctggtgcagcagcagatggtgatgggcgcccagccccccgtggcccaggtgatgcccggcgcccagcccatcgcctggggccagcccggcctgttccccgccacccagcagccctggcccaccgtggccggccagttcccccccgccgccttcatgcccacccagaccgtgatgcccctgcccgccgccatgttccagggccccctgacccccctggccaccgtgcccggcaccagcgacagcaccagaagcagcccccagaccgacaagcccagacagaagatgggcaaggagaccttcaaggacttccagatggcccagcccccccccgtgcccagcagaaagcccgaccagcccagcctgacctgcaccagcgaggccttcagcagctacttcaacaaggtgggcgtggcccaggacaccgacgactgcgacgacttcgacatcagccagctgaacctgacccccgtgaccagcaccacccccagcaccaacagcccccccacccccgcccccagacagagcagccccagcaagagcagcgccagccacgccagcgaccccaccaccgacgacatcttcgaggagggcttcgagagccccagcaagagcgaggagcaggaggcccccgacggcagccaggccagcagcaacagcgaccccttcggcgagcccagcggcgagcccagcggcgacaacatcagcccccaggccggcagctag

SEQ ID NO: 79336 - DNA, 1410 bp, synthetic construct
  misc_feature 1..1410: note = Description of Artificial Sequence: Synthetic coding sequence
  source 1..1410: mol_type = other DNA
atgagcaccgagaccgagctgcaggtggccgtgaagaccagcgccaagaaggacagcagaaagaagggccaggacagaagcgaggccaccctgatcaagagattcaagggcgagggcgtgagatacaaggccaagctgatcggcatcgacgaggtgagcgccgccagaggcgacaagctgtgccaggacagcatgatgaagctgaagggcgtggtggccggcgccagaagcaagggcgagcacaagcagaagatcttcctgaccatcagcttcggcggcatcaagatcttcgacgagaagaccggcgtgcccaccagccagaagaaggagggcgtgtacgacgtgcccaagagccagcccgtgagcaacggctacagcttcgaggacttcgaggagagattcgccgccgccacccccaacagaaacctgcccaccgacttcgacgagatcttcgaggccaccaaggccgtgacccagctggagctgttcggcgacatgagcaccccccccgacatcaccagcccccccacccccgccacccccggcgacgccttcatccccagcagcagccagaccctgcccgccagcgccgacgtgttcagcagcgtgcccttcggcaccgccgccgtgcccagcggctacgtggccatgggcgccgtgctgcccagcttctggggccagcagcccctggtgcagcagcagatggtgatgggcgcccagccccccgtggcccaggtgatgcccggcgcccagcccatcgcctggggccagcccggcctgttccccgccacccagcagccctggcccaccgtggccggccagttcccccccgccgccttcatgcccacccagaccgtgatgcccctgcccgccgccatgttccagggccccctgacccccctggccaccgtgcccggcaccagcgacagcaccagaagcagcccccagaccgacaagcccagacagaagatgggcaaggagaccttcaaggacttccagatggcccagcccccccccgtgcccagcagaaagcccgaccagcccagcctgacctgcaccagcgaggccttcagcagctacttcaacaaggtgggcgtggcccaggacaccgacgactgcgacgacttcgacatcagccagctgaacctgacccccgtgaccagcaccacccccagcaccaacagcccccccacccccgcccccagacagagcagccccagcaagagcagcgccagccacgccagcgaccccaccaccgacgacatcttcgaggagggcttcgagagccccagcaagagcgaggagcaggaggcccccgacggcagccaggccagcagcaacagcgaccccttcggcgagcccagcggcgagcccagcggcgacaacatcagcccccaggccggcagctag

SEQ ID NO: 79337 - DNA, 2313 bp, synthetic construct
  misc_feature 1..2313: note = Description of Artificial Sequence: Synthetic coding sequence
  source 1..2313: mol_type = other DNA
atgagcaacgaggtggagaccagcgccaccaacggccagcccgaccagcaggccgcccccaaggcccccagcaagaaggagaagaagaagggccccgagaagaccgacgagtacctgctggccagattcaagggcgacggcgtgaagtacaaggccaagctgatcggcatcgacgacgtgcccgacgccagaggcgacaagatgagccaggacagcatgatgaagctgaagggcatggccgccgccggcagaagccagggccagcacaagcagagaatctgggtgaacatcagcctgagcggcatcaagatcatcgacgagaagaccggcgtgatcgagcacgagcaccccgtgaacaagatcagcttcatcgccagagacgtgaccgacaacagagccttcggctacgtgtgcggcggcgagggccagcaccagttcttcgccatcaagaccggccagcaggccgagcccctggtggtggacctgaaggacctgttccaggtgatctacaacgtgaagaagaaggaggaggagaagaagaagatcgaggaggccagcaaggccgtggagaacggcagcgaggccctgatgatcctggacgaccagaccaacaagctgaagagcggcgtggaccagatggacctgttcggcgacatgagcaccccccccgacctgaacagccccaccgagagcaaggacatcctgctggtggacctgaacagcgagatcgacaccaaccagaacagcctgagagagaaccccttcctgaccaacggcatcaccagctgcagcctgcccagacccaccccccaggccagcttcctgcccgagaacgccttcagcgccaacctgaacttcttccccacccccaaccccgaccccttcagagacgaccccttcacccagcccgaccagagcacccccagcagcttcgacagcctgaagagccccgaccagaagaaggagaacagcagcagcagcagcacccccctgagcaacggccccctgaacggcgacgtggactacttcggccagcagttcgaccagatcagcaacagaaccggcaagcaggaggcccaggccggcccctggcccttcagcagcagccagacccagcccgccgtgagaacccagaacggcgtgagcgagagagagcagaacggcttcagcgtgaagagcagccccaaccccttcgtgggcagcccccccaagggcctgagcatccagaacggcgtgaagcaggacctggagagcagcgtgcagagcagcccccacgacagcatcgccatcatcccccccccccagagcaccaagcccggcagaggcagaagaaccgccaagagcagcgccaacgacctgctggccagcgacatcttcgccccccccgtgagcgagcccagcggccaggccagccccaccggccagcccaccgccctgcagcccaaccccctggacctgttcaagaccagcgcccccgcccccgtgggccccctggtgggcctgggcggcgtgaccgtgaccctgccccaggccggcccctggaacaccgccagcctggtgttcaaccagagccccagcatggcccccggcgccatgatgggcggccagcccagcggcttcagccagcccgtgatcttcggcaccagccccgccgtgagcggctggaaccagcccagccccttcgccgccagcacccccccccccgtgcccgtggtgtggggccccagcgccagcgtggcccccaacgcctggagcaccaccagccccctgggcaaccccttccagagcaacatcttccccgcccccgccgtgagcacccagccccccagcatgcacagcagcctgctggtgacccccccccagcccccccccagagccggcccccccaaggacatcagcagcgacgccttcaccgccctggaccccctgggcgacaaggagatcaaggacgtgaaggagatgttcaaggacttccagctgagacagccccccgccgtgcccgccagaaagggcgagcagaccagcagcggcaccctgagcgccttcgccagctacttcaacagcaaggtgggcatcccccaggagaacgccgaccacgacgacttcgacgccaaccagctgctgaacaagatcaacgagccccccaagcccgcccccagacaggtgagcctgcccgtgaccaagagcaccgacaacgccttcgagaaccccttcttcaaggacagcttcggcagcagccaggccagcgtggccagcagccagcccgtgagcagcgagatgtacagagaccccttcggcaaccccttcgcctag

SEQ ID NO: 79338 - DNA, 1659 bp, synthetic construct
  misc_feature 1..1659: note = Description of Artificial Sequence: Synthetic coding sequence
  source 1..1659: mol_type = other DNA
atgagcaacgaggtggagaccagcgccaccaacggccagcccgaccagcaggccgcccccaaggcccccagcaagaaggagaagaagaagggccccgagaagaccgacgagtacctgctggccagattcaagggcgacggcgtgaagtacaaggccaagctgatcggcatcgacgacgtgcccgacgccagaggcgacaagatgagccaggacagcatgatgaagctgaagggcatggccgccgccggcagaagccagggccagcacaagcagagaatctgggtgaacatcagcctgagcggcatcaagatcatcgacgagaagaccggcgtgatcgagcacgagcaccccgtgaacaagatcagcttcatcgccagagacgtgaccgacaacagagccttcggctacgtgtgcggcggcgagggccagcaccagttcttcgccatcaagaccggccagcaggccgagcccctggtggtggacctgaaggacctgttccaggtgatctacaacgtgaagaagaaggaggaggagaagaagaagatcgaggaggccagcaaggccgtggagaacggcagcgaggccctgatgatcctggacgaccagaccaacaagctgaagagcggcgtggaccagatggacctgttcggcgacatgagcaccccccccgacctgaacagccccaccagcagcgccaacgacctgctggccagcgacatcttcgccccccccgtgagcgagcccagcggccaggccagccccaccggccagcccaccgccctgcagcccaaccccctggacctgttcaagaccagcgcccccgcccccgtgggccccctggtgggcctgggcggcgtgaccgtgaccctgccccaggccggcccctggaacaccgccagcctggtgttcaaccagagccccagcatggcccccggcgccatgatgggcggccagcccagcggcttcagccagcccgtgatcttcggcaccagccccgccgtgagcggctggaaccagcccagccccttcgccgccagcacccccccccccgtgcccgtggtgtggggccccagcgccagcgtggcccccaacgcctggagcaccaccagccccctgggcaaccccttccagagcaacatcttccccgcccccgccgtgagcacccagccccccagcatgcacagcagcctgctggtgacccccccccagcccccccccagagccggcccccccaaggacatcagcagcgacgccttcaccgccctggaccccctgggcgacaaggagatcaaggacgtgaaggagatgttcaaggacttccagctgagacagccccccgccgtgcccgccagaaagggcgagcagaccagcagcggcaccctgagcgccttcgccagctacttcaacagcaaggtgggcatcccccaggagaacgccgaccacgacgacttcgacgccaaccagctgctgaacaagatcaacgagccccccaagcccgcccccagacaggtgagcctgcccgtgaccaagagcaccgacaacgccttcgagaaccccttcttcaaggacagcttcggcagcagccaggccagcgtggccagcagccagcccgtgagcagcgagatgtacagagaccccttcggcaaccccttcgcctag

SEQ ID NO: 79339 - DNA, 204 bp, synthetic construct
  misc_feature 1..204: note = Description of Artificial Sequence: Synthetic coding sequence
  source 1..204: mol_type = other DNA
atgagcaacgaggtggagaccagcgccaccaacggccagcccgaccagcaggccgcccccaaggcccccagcaagaaggagaagaagaagggccccgagaagaccgacgagtacctgctggccagattcaagggcgacggcgtgaagtacaaggccaagctgatcggcatcgacgacgtgcccgacgccagaggcgacaagtag

SEQ ID NO: 79340 - DNA, 231 bp, synthetic construct
  misc_feature 1..231: note = Description of Artificial Sequence: Synthetic coding sequence
  source 1..231: mol_type = other DNA
atgagcaacgaggtggagaccagcgccaccaacggccagcccgaccagcaggccgcccccaaggcccccagcaagaaggagaagaagaagggccccgagaagaccgacgagtacctgctggccagattcaagggcgacggcgtgaagtacaaggccaagctgatcggcatcgacgacgtgcccgacgccagaggcgacaagatgagccaggacagcatgatgaagctgtag

SEQ ID NO: 79341 - DNA, 120 bp, synthetic construct
  misc_feature 1..120: note = Description of Artificial Sequence: Synthetic coding sequence
  source 1..120: mol_type = other DNA
atgagcaacgaggtggagaccagcgccaccaacggccagcccgaccagcaggccgcccccaaggcccccagcaagaaggagaagaagaagggccccgagaagaccgacgagtacctgtag

SEQ ID NO: 79342 - DNA, 2250 bp, synthetic construct
  misc_feature 1..2250: note = Description of Artificial Sequence: Synthetic coding sequence
  source 1..2250: mol_type = other DNA
atgagcaacgaggtggagaccagcgccaccaacggccagcccgaccagcaggccgcccccaaggcccccagcaagaaggagaagaagaagggccccgagaagaccgacgagtacctgctggccagattcaagggcgacggcgtgaagtacaaggccaagctgatcggcatcgacgacgtgcccgacgccagaggcgacaagatgagccaggacagcatgatgaagctgaagggcatggccgccgccggcagaagccagggccagcacaagcagagaatctgggtgaacatcagcctgagcggcatcaagatcatcgacgagaagaccggcgtgatcgagcacgagcaccccgtgaacaagatcagcttcatcgccagagacgtgaccgacaacagagccttcggctacgtgtgcggcggcgagggccagcaccagttcttcgccatcaagaccggccagcaggccgagcccctggtggtggacctgaaggacctgttccaggtgatctacaacgtgaagaagaaggaggaggagaagaagaagatcgaggaggccagcaaggccgtggagaacggcagcgaggccctgatgatcctggacgaccagaccaacaagctgaagagcgagagcaaggacatcctgctggtggacctgaacagcgagatcgacaccaaccagaacagcctgagagagaaccccttcctgaccaacggcatcaccagctgcagcctgcccagacccaccccccaggccagcttcctgcccgagaacgccttcagcgccaacctgaacttcttccccacccccaaccccgaccccttcagagacgaccccttcacccagcccgaccagagcacccccagcagcttcgacagcctgaagagccccgaccagaagaaggagaacagcagcagcagcagcacccccctgagcaacggccccctgaacggcgacgtggactacttcggccagcagttcgaccagatcagcaacagaaccggcaagcaggaggcccaggccggcccctggcccttcagcagcagccagacccagcccgccgtgagaacccagaacggcgtgagcgagagagagcagaacggcttcagcgtgaagagcagccccaaccccttcgtgggcagcccccccaagggcctgagcatccagaacggcgtgaagcaggacctggagagcagcgtgcagagcagcccccacgacagcatcgccatcatcccccccccccagagcaccaagcccggcagaggcagaagaaccgccaagagcagcgccaacgacctgctggccagcgacatcttcgccccccccgtgagcgagcccagcggccaggccagccccaccggccagcccaccgccctgcagcccaaccccctggacctgttcaagaccagcgcccccgcccccgtgggccccctggtgggcctgggcggcgtgaccgtgaccctgccccaggccggcccctggaacaccgccagcctggtgttcaaccagagccccagcatggcccccggcgccatgatgggcggccagcccagcggcttcagccagcccgtgatcttcggcaccagccccgccgtgagcggctggaaccagcccagccccttcgccgccagcacccccccccccgtgcccgtggtgtggggccccagcgccagcgtggcccccaacgcctggagcaccaccagccccctgggcaaccccttccagagcaacatcttccccgcccccgccgtgagcacccagccccccagcatgcacagcagcctgctggtgacccccccccagcccccccccagagccggcccccccaaggacatcagcagcgacgccttcaccgccctggaccccctgggcgacaaggagatcaaggacgtgaaggagatgttcaaggacttccagctgagacagccccccgccgtgcccgccagaaagggcgagcagaccagcagcggcaccctgagcgccttcgccagctacttcaacagcaaggtgggcatcccccaggagaacgccgaccacgacgacttcgacgccaaccagctgctgaacaagatcaacgagccccccaagcccgcccccagacaggtgagcctgcccgtgaccaagagcaccgacaacgccttcgagaaccccttcttcaaggacagcttcggcagcagccaggccagcgtggccagcagccagcccgtgagcagcgagatgtacagagaccccttcggcaaccccttcgcctag

SEQ ID NO: 79343 - DNA, 2568 bp, synthetic construct
  misc_feature 1..2568: note = Description of Artificial Sequence: Synthetic coding sequence
  source 1..2568: mol_type = other DNA
atgatcctgatccccagaatgctgctggtgctgttcctgctgctgcccatcctgagcagcgccaaggcccaggtgaaccccgccatctgcagataccccctgggcatgagcggcggccagatccccgacgaggacatcaccgccagcagccagtggagcgagagcaccgccgccaagtacggcagactggacagcgaggagggcgacggcgcctggtgccccgagatccccgtggagcccgacgacctgaaggagttcctgcagatcgacctgcacaccctgcacttcatcaccctggtgggcacccagggcagacacgccggcggccacggcatcgagttcgcccccatgtacaagatcaactacagcagagacggcaccagatggatcagctggagaaacagacacggcaagcaggtgctggacggcaacagcaacccctacgacatcttcctgaaggacctggagccccccatcgtggccagattcgtgagattcatccccgtgaccgaccacagcatgaacgtgtgcatgagagtggagctgtacggctgcgtgtggctggacggcctggtgagctacaacgcccccgccggccagcagttcgtgctgcccggcggcagcatcatctacctgaacgacagcgtgtacgacggcgccgtgggctacagcatgaccgagggcctgggccagctgaccgacggcgtgagcggcctggacgacttcacccagacccacgagtaccacgtgtggcccggctacgactacgtgggctggagaaacgagagcgccaccaacggctacatcgagatcatgttcgagttcgacagaatcagaaacttcaccaccatgaaggtgcactgcaacaacatgttcgccaagggcgtgaagatcttcaaggaggtgcagtgctacttcagaagcgaggccagcgagtgggagcccaacgccatcagcttccccctggtgctggacgacgtgaaccccagcgccagattcgtgaccgtgcccctgcaccacagaatggccagcgccatcaagtgccagtaccacttcgccgacacctggatgatgttcagcgagatcaccttccagagcgacgccgccatgtacaacaacagcgaggccctgcccaccagccccatggcccccaccacctacgaccccatgctgaaggtggacgacagcaacaccagaatcctgatcggctgcctggtggccatcatcttcatcctgctggccatcatcgtgatcatcctgtggagacagttctggcagaagatgctggagaaggccagcagaagaatgctggacgacgagatgaccgtgagcctgagcctgcccagcgacagcagcatgttcaacaacaacagaagcagcagccccagcgagcagggcagcaacagcacctacgacagaatcttccccctgagacccgactaccaggagcccagcagactgatcagaaagctgcccgagttcgcccccggcgaggaggagagcggctgcagcggcgtggtgaagcccgtgcagcccagcggccccgagggcgtgccccactacgccgaggccgacatcgtgaacctgcagggcgtgaccggcggcaacacctacagcgtgcccgccgtgaccatggacctgctgagcggcaaggacgtggccgtggaggagttccccagaaagctgctgaccttcaaggagaagctgggcgagggccagttcggcgaggtgcacctgtgcgaggtggagggcatggagaagttcaaggacaaggacttcgccctggacgtgagcgccaaccagcccgtgctggtggccgtgaagatgctgagagccgacgccaacaagaacgccagaaacgacttcctgaaggagatcaagatcatgagcagactgaaggaccccaacatcatccacctgctggccgtgtgcatcaccgacgaccccctgtgcatgatcaccgagtacatggagaacggcgacctgaaccagttcctgagcagacacgagccccccaacagcagcagcagcgacgtgagaaccgtgagctacaccaacctgaagttcatggccacccagatcgccagcggcatgaagtacctgagcagcctgaacttcgtgcacagagacctggccaccagaaactgcctggtgggcaagaactacaccatcaagatcgccgacttcggcatgagcagaaacctgtacagcggcgactactacagaatccagggcagagccgtgctgcccatcagatggatgagctgggagagcatcctgctgggcaagttcaccaccgccagcgacgtgtgggccttcggcgtgaccctgtgggagaccttcaccttctgccaggagcagccctacagccagctgagcgacgagcaggtgatcgagaacaccggcgagttcttcagagaccagggcagacagacctacctgccccagcccgccatctgccccgacagcgtgtacaagctgatgctgagctgctggagaagagacaccaagaacagacccagcttccaggagatccacctgctgctgctgcagcagggcgacgagtag

SEQ ID NO: 79344 - DNA, 2568 bp, synthetic construct; identical to SEQ ID NO: 79343
  misc_feature 1..2568: note = Description of Artificial Sequence: Synthetic coding sequence
  source 1..2568: mol_type = other DNA

SEQ ID NO: 79345 - DNA, 447 bp, synthetic construct
  misc_feature 1..447: note = Description of Artificial Sequence: Synthetic coding sequence
  source 1..447: mol_type = other DNA
atgatcctgatccccagaatgctgctggtgctgttcctgctgctgcccatcctgagcagcgccaaggcccaggtgaaccccgccatctgcagataccccctgggcatgagcggcggccagatccccgacgaggacatcaccgccagcagccagtggagcgagagcaccgccgccaagtacggcagactggacagcgaggagggcgacggcgcctggtgccccgagatccccgtggagcccgacgacctgaaggagttcctgcagatcgacctgcacaccctgcacttcatcaccctggtgggcacccagggcagacacgccggcggccacggcatcgagttcgcccccatgtacaagatcaactacagcagagacggcaccagatggatcagctggagaaacagacacggcaagcaggtgctggacggcaacagcaacccctactag

SEQ ID NO: 79346 - DNA, 516 bp, synthetic construct
  misc_feature 1..516: note = Description of Artificial Sequence: Synthetic coding sequence
  source 1..516: mol_type = other DNA
tgaatcttcatcctgctggccatcatcgtgatcatcctgtggagacagttctggcagaagatgctggagaaggccagcagaagaatgctggacgacgagatgaccgtgagcctgagcctgcccagcgacagcagcatgttcaacaacaacagaagcagcagccccagcgagcagggcagcaacagcacctacgacagaatcttccccctgagacccgactaccaggagcccagcagactgatcagaaagctgcccgagttcgcccccggcgaggaggagagcggctgcagcggcgtggtgaagcccgtgcagcccagcggccccgagggcgtgccccactacgccgaggccgacatcgtgaacctgcagggcgtgaccggcggcaacacctacagcgtgcccgccgtgaccatggacctgctgagcggcaaggacgtggccgtggaggagttccccagaaagctgctgaccttcaaggagaagctgggcgagggccagttcggcgaggtgagctag

SEQ ID NO: 79347 - DNA, 393 bp, synthetic construct
  misc_feature 1..393: note = Description of Artificial Sequence: Synthetic coding sequence
  source 1..393: mol_type = other DNA
atgatcctgatccccagaatgctgctggtgctgttcctgctgctgcccatcctgagcagcgccaaggcccaggtgaaccccgccatctgcagataccccctgggcatgagcggcggccagatccccgacgaggacatcaccgccagcagccagtggagcgagagcaccgccgccaagtacggcagactggacagcgaggagggcgacggcgcctggtgccccgagatccccgtggagcccgacgacctgaaggagttcctgcagatcgacctgcacaccctgcacttcatcaccctggtgggcacccagggcagacacgccggcggccacggcatcgagttcgcccccatgtacaagatcaactacagcagagacggcaccagatggatctag

SEQ ID NO: 79348 - DNA, 501 bp, synthetic construct
  misc_feature 1..501: note = Description of Artificial Sequence: Synthetic coding sequence
  source 1..501: mol_type = other DNA
ctgaaggtggacgacagcaacaccagaatcctgatcggctgcctggtggccatcatcttcatcctgctggccatcatcgtgatcatcctgtggagacagttctggcagaagatgctggagaaggccagcagaagaatgctggacgacgagatgaccgtgagcctgagcctgcccagcgacagcagcatgttcaacaacaacagaagcagcagccccagcgagcagggcagcaacagcacctacgacagaatcttccccctgagacccgactaccaggagcccagcagactgatcagaaagctgcccgagttcgcccccggcgaggaggagagcggcgaggacgacgtggtgggcagagtgagcagagagaagccccagcaggccagcggcagatacgacacccccgcccccagcagcctgcacctgttcctggtgagcgccaacctgctgagaagcccccacagcctgagcagattcggcctgcccctgctgctggcctag

SEQ ID NO: 79349 - DNA, 447 bp, synthetic construct; identical to SEQ ID NO: 79345
  misc_feature 1..447: note = Description of Artificial Sequence: Synthetic coding sequence
  source 1..447: mol_type = other DNA

SEQ ID NO: 79350 - DNA, 2403 bp, synthetic construct
  misc_feature 1..2403: note = Description of Artificial Sequence: Synthetic coding sequence
  source 1..2403: mol_type = other DNA
atgaactacatcttcggcaacaacaccctgctgtacagcagaggcagcagaggcggcaacaccagcagcagccacggcagcgccggccccaagcagaagcactgggccaagaagggcagcagcgacgagctgcaggccgagcccgagcccagcagatggcagcagatcgtggccttcttcaccagaagacacagcttcatcgactgcatcagcgtggccaccagcagcacccaggccaaccccccccccgtgctggtgaacaccgacagcctggagacccccacctacgtgaacggcaccgacgccgactacgagtacgaggagatcaccctggagagaggcaacagcggcctgggcttcagcatcgccggcggcaccgacaacccccacatcggcgacgacagcagcatcttcatcaccaagatcatcaccggcggcgccgccgcccaggacggcagactgagagtgaacgactgcatcctgagagtgaacgaggtggacgtgagagacgtgacccacagcaaggccgtggaggccctgaaggaggccggcagcatcgtgagactgtacgtgaagagaagaaagcccgtgagcgagaagatcatggagatcaagctgatcaagggccccaagggcctgggcttcagcatcgccggcggcgtgggcaaccagcacatccccggcgacaacagcatctacgtgaccaagatcatcgagggcggcgccgcccacaaggacggcaagctgcagatcggcgacaagctgctggccgtgaacaacgtgtgcctggaggaggtgacccacgaggaggccgtgaccgccctgaagaacaccagcgacttcgtgtacctgaaggtggccaagcccaccagcatgtacatgaacgacggctacgccccccccgacatcaccaacagcagcagccagcccgtggacaaccacgtgagccccagcagcttcctgggccagacccccgccagccccgccagatacagccccgtgagcaaggccgtgctgggcgacgacgagatcaccagagagcccagaaaggtggtgctgcacagaggcagcaccggcctgggcttcaacatcgtgggcggcgaggacggcgagggcatcttcatcagcttcatcctggccggcggccccgccgacctgagcggcgagctgagaaagggcgacagaatcatcagcgtgaacagcgtggacctgagagccgccagccacgagcaggccgccgccgccctgaagaacgccggccaggccgtgaccatcgtggcccagtacagacccgaggagtacagcagattcgaggccaagatccacgacctgagagagcagatgatgaacagcagcatcagcagcggcagcggcagcctgagaaccagccagaagagaagcctgtacgtgagagccctgttcgactacgacaagaccaaggacagcggcctgcccagccagggcctgaacttcaagttcggcgacatcctgcacgtgatcaacgccagcgacgacgagtggtggcaggccagacaggtgacccccgacggcgagagcgacgaggtgggcgtgatccccagcaagagaagagtggagaagaaggagagagccagactgaagaccgtgaagttcaacagcaagaccagagacaagggcgagatccccgacgacatgggcagcaagggcctgaagcacgtgaccagcaacgccagcgacagcgagagcagctacctgatcctgatcaccgacgagtacggctgcagcaagggcggccaggaggagtacgtgctgagctacgagcccgtgaaccagcaggaggtgaactacaccagacccgtgatcatcctgggccccatgaaggacagaatcaacgacgacctgatcagcgagttccccgacaagttcggcagctgcgtgccccacaccaccagacccaagagagactacgaggtggacggcagagactaccacttcgtgaccagcagagagcagatggagaaggacatccaggagcacaagttcatcgaggccggccagtacaacaaccacctgtacggcaccagcgtgcagagcgtgagagaggtggccgagaagggcaagcactgcatcctggacgtgagcggcaacgccatcaagagactgcagatcgcccagctgtaccccatcagcatcttcatcaagcccaagagcatggagaacatcatggagatgaacaagagactgaccgaggagcaggccagaaagaccttcgagagagccatgaagctggagcaggagttcaccgagcacttcaccgccatcgtgcagggcgacaccctggaggacatctacaaccaggtgaagcagatcatcgaggagcagagcggcagctacatctgggtgcccgccaaggagaagctgtag

SEQ ID NO: 79351 - DNA, 2367 bp, synthetic construct
  misc_feature 1..2367: note = Description of Artificial Sequence: Synthetic coding sequence
  source 1..2367: mol_type = other DNA
atgaactacatcttcggcaacaacaccctgctgtacagcagaggcagcagaggcggcaacaccagcagcagccacggcagcgccggccccaagcagaagcactgggccaagaagggcagcagcgacgagctgcaggccgagcccgagcccagcagatggcagcagatcgtggccttcttcaccagaagacacagcttcatcgactgcatcagcgtggccaccagcagcacccaggccaaccccccccccgtgctggtgaacaccgacagcctggagacccccacctacgtgaacggcaccgacgccgactacgagtacgaggagatcaccctggagagaggcaacagcggcctgggcttcagcatcgccggcggcaccgacaacccccacatcggcgacgacagcagcatcttcatcaccaagatcatcaccggcggcgccgccgcccaggacggcagactgagagtgaacgactgcatcctgagagtgaacgaggtggacgtgagagacgtgacccacagcaaggccgtggaggccctgaaggaggccggcagcatcgtgagactgtacgtgaagagaagaaagcccgtgagcgagaagatcatggagatcaagctgatcaagggccccaagggcctgggcttcagcatcgccggcggcgtgggcaaccagcacatccccggcgacaacagcatctacgtgaccaagatcatcgagggcggcgccgcccacaaggacggcaagctgcagatcggcgacaagctgctggccgtgaacaacgtgtgcctggaggaggtgacccacgaggaggccgtgaccgccctgaagaacaccagcgacttcgtgtacctgaaggtggccaagcccaccagcatgtacatgaacgacggctacgccccccccgacatcaccaacagcagcagccagcccgtggacaaccacgtgagccccagcagcttcctgggccagacccccgccagccccgccagatacagccccgtgagcaaggccgtgctgggcgacgacgagatcaccagagagcccagaaaggtggtgctgcacagaggcagcaccggcctgggcttcaacatcgtgggcggcgaggacggcgagggcatcttcatcagcttcatcctggccggcggccccgccgacctgagcggcgagctgagaaagggcgacagaatcatcagcgtgaacagcgtggacctgagagccgccagccacgagcaggccgccgccgccctgaagaacgccggccaggccgtgaccatcgtggcccagtacagacccgaggagtacagcagattcgaggccaagatccacgacctgagagagcagatgatgaacagcagcatcagcagcggcagcggcagcctgagaaccagccagaagagaagcctgtacgtgagagccctgttcgactacgacaagaccaaggacagcggcctgcccagccagggcctgaacttcaagttcggcgacatcctgcacgtgatcaacgccagcgacgacgagtggtggcaggccagacaggtgacccccgacggcgagagcgacgaggtgggcgtgatccccagcaagagaagagtggagaagaaggagagagccagactgaagaccgtgaagttcaacagcaagaccagagacaagggcgagatccccgacgacatgggcagcaagggcctgaagcacgtgaccagcaacgccagcgacagcgagagcagctacagaggccaggaggagtacgtgctgagctacgagcccgtgaaccagcaggaggtgaactacaccagacccgtgatcatcctgggccccatgaaggacagaatcaacgacgacctgatcagcgagttccccgacaagttcggcagctgcgtgccccacaccaccagacccaagagagactacgaggtggacggcagagactaccacttcgtgaccagcagagagcagatggagaaggacatccaggagcacaagttcatcgaggccggccagtacaacaaccacctgtacggcaccagcgtgcagagcgtgagagaggtggccgagaagggcaagcactgcatcctggacgtgagcggcaacgccatcaagagactgcagatcgcccagctgtaccccatcagcatcttcatcaagcccaagagcatggagaacatcatggagatgaacaagagactgaccgaggagcaggccagaaagaccttcgagagagccatgaagctggagcaggagttcaccgagcacttcaccgccatcgtgcagggcgacaccctggaggacatctacaaccaggtgaagcagatcatcgaggagcagagcggcagctacatctgggtgcccgccaaggagaagctgtag

SEQ ID NO: 79352 - DNA, 1539 bp, synthetic construct
  misc_feature 1..1539: note = Description of Artificial Sequence: Synthetic coding sequence
  source 1..1539: mol_type = other DNA
atggagagagccagaaagttcagcggcagcggcctggccatgggcctgggcagcgccagcgccagcgcctggagaagagccagccagagatgggcctggcccctgagaagcctgagacccggcggcgacgccagagagcccagaaagatcatcctgcacaagggcagcaccggcctgggcttcaacatcgtgggcggcgaggacggcgagggcatcttcgtgagcttcatcctggccggcggccccgccgacctgagcggcgagctgagaagaggcgacagaatcctgagcgtgaacggcgtgaacctgagaaacgccacccacgagcaggccgccgccgccctgaagagagccggccagagcgtgaccatcgtggcccagtacagacccgaggagtacagcagattcgagagcaagatccacgacctgagagagcagatgatgaacagcagcatgagcagcggcagcggcagcctgagaaccagcgagaagagaagcctgtacgtgagagccctgttcgactacgacagaaccagagacagctgcctgcccagccagggcctgagcttcagctacggcgacatcctgcacgtgatcaacgccagcgacgacgagtggtggcaggccagactggtgaccccccacggcgagagcgagcagatcggcgtgatccccagcaagaagagagtggagaagaaggagagagccagactgaagaccgtgaagttccacgccagaaccggcatgatcgagagcaacagaagcatcaagaccaagagaaagaagagcttcagactgagcagaaagttccccttctacaagagcaaggagaacatggcccaggagagcagcatccaggagcagggcgtgaccagcaacaccagcgacagcgagagcagcagcaagggccaggaggacgccatcctgagctacgagcccgtgaccagacaggagatccactacgccagacccgtgatcatcctgggccccatgaaggacagagtgaacgacgacctgatcagcgagttcccccacaagttcggcagctgcgtgccccacaccaccagacccagaagagacaacgaggtggacggccaggactaccacttcgtggtgagcagagagcagatggagaaggacatccaggacaacaagttcatcgaggccggccagttcaacgacaacctgtacggcaccagcatccagagcgtgagagccgtggccgagagaggcaagcactgcatcctggacgtgagcggcaacgccatcaagagactgcagcaggcccagctgtaccccatcgccatcttcatcaagcccaagagcatcgaggccctgatggagatgaacagaagacagacctacgagcaggccaacaagatctacgacaaggccatgaagctggagcaggagttcggcgagtacttcaccgccatcgtgcagggcgacagcctggaggagatctacaacaagatcaagcagatcatcgaggaccagagcggccactacatctgggtgcccagccccgagaagctgtag

SEQ ID NO: 79353 - DNA, 3021 bp, synthetic construct
  misc_feature 1..3021: note = Description of Artificial Sequence: Synthetic coding sequence
  source 1..3021: mol_type = other DNA
gaggaggaggccggcgacctggtgcagcccggcatcagcttccccggccccgccgaggaggacctggacccccagtacagctggagccccacccagcacttcaacgaggagagatacagccccgcccccagaagcatgaagggcctgagcggcagcagaacccagccccccctgtgcagcggccacacctgcggcctggccccccccgaggactgcgagcacctgcaccacggccccgacgccagacccccctacctgctgagccccgccgacagctgccccggcggcagacacagatgcagccccagaagcagcgtgcacagcgagtgcgtgatgatgcccgtggtgctgggcgaccacgtgagcagcagcaccttccccagaatgcactacagcagccactacgacaccagagacgactgcgccgtggcccacgccggcgccaagatcaacagaatccccgccaacctgctggaccagttcgagaagcagctgcccctgcacagagacggcttccacaccctgcagtaccagagaaccagcgccgccgccgagcagagaagcgagagccccggcagaatcagacacctggtgcacagcgtgcagaagctgttcaccaagagccacagcctggagggcagcagcaagagcaacgccaacggcaccaaggccgacggcagagccgacgaccaccaccacgcccaccacgccaagcacagcaagagaagcaagagcaaggagagaaagcccgagggcaagcccagacccggcatgagcagctggtggagcagcgacgacaacctggacagcgacagcacctacagaacccccagcgtgctgaacagacaccacctgggccccgtggcccactgctaccccgacgccctgcagagccccttcggcgacctgagcctgaagaccagcaagagcaacaacgacgtgaagtgcagcgcctgcgagggcctggccctgacccccgacgccaagtacctgaagagaagcagctggagcaccctgaccgtgagccaggccaaggaggcctacagaaagagcagcctgaacctggacaagcccctgctgcaccaggacgccaagcccgccctgagaccctgccactacctgcaggtgccccaggacgagtggggcggctaccccaccggcggcaaggacgaggagatcccctgcagaagaatgagaagcggcagctacatcaaggccatgggcgacgaggagagcggcgagagcgacagcagccccaagaccagccccaagagcgccatcctgcccgagcccctgctgaagagcatcggccagagacccctgggcgagcaccagacccagacctacctgcaggccgccagcgacgtgcccgtgggccacagcctggaccccgccgccaactacaacagccccaagttcagaagcagaaaccagagctacatgagagccgtgagcaccctgagccaggccagctgcgtgagccaggtgagcgaggccgagatcaacggccagttcgagagcgtgtgcgagagcgtgttcagcgaggtggagagccaggccatggacgccctggacctgcccggctgcttcagaaccagaagccacagctacctgagagccatccaggccggctacagccaggacgacgagtgcatccccatgatgacccccagcgacatcaccagcaccatcagaagcaccgccgccgtgagctacaccaactacaagaagacccccccccccgtgccccccagaaccaccagcaagcccctgatcagcgtgaccgcccagagcagcaccgagagcacccaggacgcctaccaggacagcagagcccagagaatgagcccctggccccaggacagcagaggcctgtacaacagcaccgacagcctggacagcaacaaggccatgaacctggccctggagaccgccgccgcccagagacacctgcccgagagccagagcagcagcgtgagaaccagcgacaaggccatcctggtgagcaaggccgaggagctgctgaagagcagatgcagcagcatcggcatccaggtggagaccgccaccgacagcgacaccgagagcagaggcctgagagagtaccacagcgtgggcgtgcaggtggaggacgagaagagacacggcagattcaagagaagcaacagcgtgaccgccgccgtgcaggccgacctggagctggagggcttccccggccacatcaccaccgaggacaagggcctgcagttcggcagcagcttccagagacacagcgagcccagcacccccacccagtacagcgccgtgagaaccgtgagaacccagggcctgttcagctacagagaggactacagaacccaggtggacaccagcaccctgcccccccccgacccctggctggagcccgccatcgacaccgtggagaccggcagaatgagcccctgcagaagagacggcagctggttcctgaagctgctgcacgccgagaccaagagaatggagggctggtgcaaggagatggagagagaggccgaggagaacgacctgagcgaggagatcctgggcaagatcagaagcgccgtgggcagcgcccagctgctgatgagccagaagttccagcagttctactggctgtgccagcagaacatggaccccagcgccatgcccagacccaccagccaggacctggccggctactgggacatgctgcagctgagcatcgaggacgtgagcatgaagttcgacgagctgcagagactgagactgaacgactggaagatgatggagagccccgagagaaaggaggagagaaaggtgcccccccccatccccaagaagccccccaagggcaagttccccatcaccagagagaagagcctggacctgcccgacagacagagacaggaggccagaagaagactgatggccgccaagagagccgccagcttcagacagaacagcgccagcgagagagccgacagcatcgagatctacatccccgaggcccagaccagactgtag

SEQ ID NO: 79354 - DNA, 2928 bp, synthetic construct
  misc_feature 1..2928: note = Description of Artificial Sequence: Synthetic coding sequence
  source 1..2928: mol_type = other DNA
atgaagggcctgagcggcagcagaacccagccccccctgtgcagcggccacacctgcggcctggccccccccgaggactgcgagcacctgcaccacggccccgacgccagacccccctacctgctgagccccgccgacagctgccccggcggcagacacagatgcagccccagaagcagcgtgcacagcgagtgcgtgatgatgcccgtggtgctgggcgaccacgtgagcagcagcaccttccccagaatgcactacagcagccactacgacaccagagacgactgcgccgtggcccacgccggcgccaagatcaacagaatccccgccaacctgctggaccagttcgagaagcagctgcccctgcacagagacggcttccacaccctgcagtaccagagaaccagcgccgccgccgagcagagaagcgagagccccggcagaatcagacacctggtgcacagcgtgcagaagctgttcaccaagagccacagcctggagggcagcagcaagagcaacgccaacggcaccaaggccgacggcagagccgacgaccaccaccacgcccaccacgccaagcacagcaagagaagcaagagcaaggagagaaagcccgagggcaagcccagacccggcatgagcagctggtggagcagcgacgacaacctggacagcgacagcacctacagaacccccagcgtgctgaacagacaccacctgggccccgtggcccactgctaccccgacgccctgcagagccccttcggcgacctgagcctgaagaccagcaagagcaacaacgacgtgaagtgcagcgcctgcgagggcctggccctgacccccgacgccaagtacctgaagagaagcagctggagcaccctgaccgtgagccaggccaaggaggcctacagaaagagcagcctgaacctggacaagcccctgctgcaccaggacgccaagcccgccctgagaccctgccactacctgcaggtgccccaggacgagtggggcggctaccccaccggcggcaaggacgaggagatcccctgcagaagaatgagaagcggcagctacatcaaggccatgggcgacgaggagagcggcgagagcgacagcagccccaagaccagccccaagagcgccatcctgcccgagcccctgctgaagagcatcggccagagacccctgggcgagcaccagacccagacctacctgcaggccgccagcgacgtgcccgtgggccacagcctggaccccgccgccaactacaacagccccaagttcagaagcagaaaccagagctacatgagagccgtgagcaccctgagccaggccagctgcgtgagccaggtgagcgaggccgagatcaacggccagttcgagagcgtgtgcgagagcgtgttcagcgaggtggagagccaggccatggacgccctggacctgcccggctgcttcagaaccagaagccacagctacctgagagccatccaggccggctacagccaggacgacgagtgcatccccatgatgacccccagcgacatcaccagcaccatcagaagcaccgccgccgtgagctacaccaactacaagaagacccccccccccgtgccccccagaaccaccagcaagcccctgatcagcgtgaccgcccagagcagcaccgagagcacccaggacgcctaccaggacagcagagcccagagaatgagcccctggccccaggacagcagaggcctgtacaacagcaccgacagcctggacagcaacaaggccatgaacctggccctggagaccgccgccgcccagagacacctgcccgagagccagagcagcagcgtgagaaccagcgacaaggccatcctggtgagcaaggccgaggagctgctgaagagcagatgcagcagcatcggcatccaggacagcgagttccccgagcaccagccctaccccagaagcgacgtggagaccgccaccgacagcgacaccgagagcagaggcctgagagagtaccacagcgtgggcgtgcaggtggaggacgagaagagacacggcagattcaagagaagcaacagcgtgaccgccgccgtgcaggccgacctggagctggagggcttccccggccacatcaccaccgaggacaagggcctgcagttcggcagcagcttccagagacacagcgagcccagcacccccacccagtacagcgccgtgagaaccgtgagaacccagggcctgttcagctacagagaggactacagaacccaggtggacaccagcaccctgcccccccccgacccctggctggagcccgccatcgacaccgtggagaccggcagaatgagcccctgcagaagagacggcagctggttcctgaagctgctgcacgccgagaccaagagaatggagggctggtgcaaggagatggagagagaggccgaggagaacgacctgagcgaggagatcctgggcaagatcagaagcgccgtgggcagcgcccagctgctgatgagccagaagttccagcagttctactggctgtgccagcagaacatggaccccagcgccatgcccagacccaccagccaggacctggccggctactgggacatgctgcagctgagcatcgaggacgtgagcatgaagttcgacgagctgcagagactgagactgaacgactggaagatgatggagagccccgagagaaaggaggagagaaaggtgcccccccccatccccaagaagccccccaagggcaagttccccatcaccagagagaagagcctggacctgcccgacagacagagacaggaggccagaagaagactgatggccgccaagagagccgccagcttcagacagaacagcgccagcgagagagccgacagcatcgagatctacatccccgaggcccagaccagactgtag

SEQ ID NO: 79355 - DNA, 2937 bp, synthetic construct
  misc_feature 1..2937: note = Description of Artificial Sequence: Synthetic coding sequence
  source 1..2937: mol_type = other DNA
tgacccacccagcacttcaacgaggagagatacagccccgcccccagaagcatgaagggcctgagcggcagcagaacccagccccccctgtgcagcggccacacctgcggcctggccccccccgaggactgcgagcacctgcaccacggccccgacgccagacccccctacctgctgagccccgccgacagctgccccggcggcagacacagatgcagccccagaagcagcgtgcacagcgagtgcgtgatgatgcccgtggtgctgggcgaccacgtgagcagcagcaccttccccagaatgcactacagcagccactacgacaccagagacgactgcgccgtggcccacgccggcgccaagatcaacagaatccccgccaacctgctggaccagttcgagaagcagctgcccctgcacagagacggcttccacaccctgcagtaccagagaaccagcgccgccgccgagcagagaagcgagagccccggcagaatcagacacctggtgcacagcgtgcagaagctgttcaccaagagccacagcctggagggcagcagcaagagcaacgccaacggcaccaaggccgacggcagagccgacgaccaccaccacgcccaccacgccaagcacagcaagagaagcaagagcaaggagagaaagcccgagggcaagcccagacccggcatgagcagctggtggagcagcgacgacaacctggacagcgacagcacctacagaacccccagcgtgctgaacagacaccacctgggccccgtggcccactgctaccccgacgccctgcagagccccttcggcgacctgagcctgaagaccagcaagagcaacaacgacgtgaagtgcagcgcctgcgagggcctggccctgacccccgacgccaagtacctgaagagaagcagctggagcaccctgaccgtgagccaggccaaggaggcctacagaaagagcagcctgaacctggacaagcccctgctgcaccaggacgccaagcccgccctgagaccctgccactacctgcaggtgccccaggacgagtggggcggctaccccaccggcggcaaggacgaggagatcccctgcagaagaatgagaagcggcagctacatcaaggccatgggcgacgaggagagcggcgagagcgacagcagccccaagaccagccccaagagcgccatcctgcccgagcccctgctgaagagcatcggccagagacccctgggcgagcaccagacccagacctacctgcaggccgccagcgacgtgcccgtgggccacagcctggaccccgccgccaactacaacagccccaagttcagaagcagaaaccagagctacatgagagccgtgagcaccctgagccaggccagctgcgtgagccaggtgagcgaggccgagatcaacggccagttcgagagcgtgtgcgagagcgtgttcagcgaggtggagagccaggccatggacgccctggacctgcccggctgcttcagaaccagaagccacagctacctgagagccatccaggccggctacagccaggacgacgagtgcatccccatgatgacccccagcgacatcaccagcaccatcagaagcaccgccgccgtgagctacaccaactacaagaagacccccccccccgtgccccccagaaccaccagcaagcccctgatcagcgtgaccgcccagagcagcaccgagagcacccaggacgcctaccaggacagcagagcccagagaatgagcccctggccccaggacagcagaggcctgtacaacagcaccgacagcctggacagcaacaaggccatgaacctggccctggagaccgccgccgcccagagacacctgcccgagagccagagcagcagcgtgagaaccagcgacaaggccatcctggtgagcaaggccgaggagctgctgaagagcagatgcagcagcatcggcatccaggtggagaccgccaccgacagcgacaccgagagcagaggcctgagagagtaccacagcgtgggcgtgcaggtggaggacgagaagagacacggcagattcaagagaagcaacagcgtgaccgccgccgtgcaggccgacctggagctggagggcttccccggccacatcaccaccgaggacaagggcctgcagttcggcagcagcttccagagacacagcgagcccagcacccccacccagtacagcgccgtgagaaccgtgagaacccagggcctgttcagctacagagaggactacagaacccaggtggacaccagcaccctgcccccccccgacccctggctggagcccgccatcgacaccgtggagaccggcagaatgagcccctgcagaagagacggcagctggttcctgaagctgctgcacgccgagaccaagagaatggagggctggtgcaaggagatggagagagaggccgaggagaacgacctgagcgaggagatcctgggcaagatcagaagcgccgtgggcagcgcccagctgctgatgagccagaagttccagcagttctactggctgtgccagcagaacatggaccccagcgccatgcccagacccaccagccaggacctggccggctactgggacatgctgcagctgagcatcgaggacgtgagcatgaagttcgacgagctgcagagactgagactgaacgactggaagatgatggagagccccgagagaaaggaggagagaaaggtgcccccccccatccccaagaagccccccaagggcaagttccccatcaccagagagaagagcctggacctgcccgacagacagagacaggaggccagaagaagactgatggccgccaagagagccgccagcttcagacagaacagcgccagcgagagagccgacagcatcgagatctacatccccgaggcccagaccagactgtag

SEQ ID NO: 79356 - DNA, 2562 bp, synthetic construct
  misc_feature 1..2562: note = Description of Artificial Sequence: Synthetic coding sequence
  source 1..2562: mol_type = other DNA
atgcccgtgagaaagcaggacacccagagagccctgcacctgctggaggagtacagaagcaagctgagccagaccgaggacagacagctgagaagcagcatcgagagagtgatcaacatcttccagagcaacctgttccaggccctgatcgacatccaggagttctacgaggtgaccctgctggacaaccccaagtgcatcgacagaagcaagcccagcgagcccatccagcccgtgaacacctgggagatcagcagcctgcccagcagcaccgtgaccagcgagaccctgcccagcagcctgagccccagcgtggagaagtacagataccaggacgaggacacccccccccaggagcacatcagcccccagatcaccaacgaggtgatcggccccgagctggtgcacgtgagcgagaagaacctgagcgagatcgagaacgtgcacggcttcgtgagccacagccacatcagccccatcaaggtgaacggcaccgacgccgactacgagtacgaggagatcaccctggagagaggcaacagcggcctgggcttcagcatcgccggcggcaccgacaacccccacatcggcgacgacagcagcatcttcatcaccaagatcatcaccggcggcgccgccgcccaggacggcagactgagagtgaacgactgcatcctgagagtgaacgaggtggacgtgagagacgtgacccacagcaaggccgtggaggccctgaaggaggccggcagcatcgtgagactgtacgtgaagagaagaaagcccgtgagcgagaagatcatggagatcaagctgatcaagggccccaagggcctgggcttcagcatcgccggcggcgtgggcaaccagcacatccccggcgacaacagcatctacgtgaccaagatcatcgagggcggcgccgcccacaaggacggcaagctgcagatcggcgacaagctgctggccgtgaacaacgtgtgcctggaggaggtgacccacgaggaggccgtgaccgccctgaagaacaccagcgacttcgtgtacctgaaggtggccaagcccaccagcatgtacatgaacgacggctacgccccccccgacatcaccaacagcagcagccagcccgtggacaaccacgtgagccccagcagcttcctgggccagacccccgccagccccgccagatacagccccgtgagcaaggccgtgctgggcgacgacgagatcaccagagagcccagaaaggtggtgctgcacagaggcagcaccggcctgggcttcaacatcgtgggcggcgaggacggcgagggcatcttcatcagcttcatcctggccggcggccccgccgacctgagcggcgagctgagaaagggcgacagaatcatcagcgtgaacagcgtggacctgagagccgccagccacgagcaggccgccgccgccctgaagaacgccggccaggccgtgaccatcgtggcccagtacagacccgaggagtacagcagattcgaggccaagatccacgacctgagagagcagatgatgaacagcagcatcagcagcggcagcggcagcctgagaaccagccagaagagaagcctgtacgtgagagccctgttcgactacgacaagaccaaggacagcggcctgcccagccagggcctgaacttcaagttcggcgacatcctgcacgtgatcaacgccagcgacgacgagtggtggcaggccagacaggtgacccccgacggcgagagcgacgaggtgggcgtgatccccagcaagagaagagtggagaagaaggagagagccagactgaagaccgtgaagttcaacagcaagaccagagacaagggcgagatccccgacgacatgggcagcaagggcctgaagcacgtgaccagcaacgccagcgacagcgagagcagctacagaggccaggaggagtacgtgctgagctacgagcccgtgaaccagcaggaggtgaactacaccagacccgtgatcatcctgggccccatgaaggacagaatcaacgacgacctgatcagcgagttccccgacaagttcggcagctgcgtgccccacaccaccagacccaagagagactacgaggtggacggcagagactaccacttcgtgaccagcagagagcagatggagaaggacatccaggagcacaagttcatcgaggccggccagtacaacaaccacctgtacggcaccagcgtgcagagcgtgagagaggtggccgagaagggcaagcactgcatcctggacgtgagcggcaacgccatcaagagactgcagatcgcccagctgtaccccatcagcatcttcatcaagcccaagagcatggagaacatcatggagatgaacaagagactgaccgaggagcaggccagaaagaccttcgagagagccatgaagctggagcaggagttcaccgagcacttcaccgccatcgtgcagggcgacaccctggaggacatctacaaccaggtgaagcagatcatcgaggagcagagcggcagctacatctgggtgcccgccaaggagaagctgtag

SEQ ID NO: 79357 - DNA, 2781 bp, synthetic construct
  misc_feature 1..2781: note = Description of Artificial Sequence: Synthetic coding sequence
  source 1..2781: mol_type = other DNA
atgcccgtgagaaagcaggacacccagagagccctgcacctgctggaggagtacagaagcaagctgagccagaccgaggacagacagctgagaagcagcatcgagagagtgatcaacatcttccagagcaacctgttccaggccctgatcgacatccaggagttctacgaggtgaccctgctggacaaccccaagtgcatcgacagaagcaagcccagcgagcccatccagcccgtgaacacctgggagatcagcagcctgcccagcagcaccgtgaccagcgagaccctgcccagcagcctgagccccagcgtggagaagtacagataccaggacgaggacacccccccccaggagcacatcagcccccagatcaccaacgaggtgatcggccccgagctggtgcacgtgagcgagaagaacctgagcgagatcgagaacgtgcacggcttcgtgagccacagccacatcagccccatcaagcccaccgaggccgtgctgcccagcccccccaccgtgcccgtgatccccgtgctgcccgtgcccgccgagaacaccgtgatcctgcccaccatcccccaggccaaccccccccccgtgctggtgaacaccgacagcctggagacccccacctacgtgaacggcaccgacgccgactacgagtacgaggagatcaccctggagagaggcaacagcggcctgggcttcagcatcgccggcggcaccgacaacccccacatcggcgacgacagcagcatcttcatcaccaagatcatcaccggcggcgccgccgcccaggacggcagactgagagtgaacgactgcatcctgagagtgaacgaggtggacgtgagagacgtgacccacagcaaggccgtggaggccctgaaggaggccggcagcatcgtgagactgtacgtgaagagaagaaagcccgtgagcgagaagatcatggagatcaagctgatcaagggccccaagggcctgggcttcagcatcgccggcggcgtgggcaaccagcacatccccggcgacaacagcatctacgtgaccaagatcatcgagggcggcgccgcccacaaggacggcaagctgcagatcggcgacaagctgctggccgtgaacaacgtgtgcctggaggaggtgacccacgaggaggccgtgaccgccctgaagaacaccagcgacttcgtgtacctgaaggtggccaagcccaccagcatgtacatgaacgacggctacgccccccccgacatcaccaacagcagcagccagcccgtggacaaccacgtgagccccagcagcttcctgggccagacccccgccagccccgccagatacagccccgtgagcaaggccgtgctgggcgacgacgagatcaccagagagcccagaaaggtggtgctgcacagaggcagcaccggcctgggcttcaacatcgtgggcggcgaggacggcgagggcatcttcatcagcttcatcctggccggcggccccgccgacctgagcggcgagctgagaaagggcgacagaatcatcagcgtgaacagcgtggacctgagagccgccagccacgagcaggccgccgccgccctgaagaacgccggccaggccgtgaccatcgtggcccagtacagacccgaggagtacagcagattcgaggccaagatccacgacctgagagagcagatgatgaacagcagcatcagcagcggcagcggcagcctgagaaccagccagaagagaagcctgtacgtgagagccctgttcgactacgacaagaccaaggacagcggcctgcccagccagggcctgaacttcaagttcggcgacatcctgcacgtgatcaacgccagcgacgacgagtggtggcaggccagacaggtgacccccgacggcgagagcgacgaggtgggcgtgatccccagcaagagaagagtggagaagaaggagagagccagactgaagaccgtgaagttcaacagcaagaccagagacaagggccagagcttcaacgacaagagaaagaagaacctgttcagcagaaagttccccttctacaagaacaaggaccagagcgagcaggagaccagcgacgccgaccagcacgtgaccagcaacgccagcgacagcgagagcagctacagaggccaggaggagtacgtgctgagctacgagcccgtgaaccagcaggaggtgaactacaccagacccgtgatcatcctgggccccatgaaggacagaatcaacgacgacctgatcagcgagttccccgacaagttcggcagctgcgtgccccacaccaccagacccaagagagactacgaggtggacggcagagactaccacttcgtgaccagcagagagcagatggagaaggacatccaggagcacaagttcatcgaggccggccagtacaacaaccacctgtacggcaccagcgtgcagagcgtgagagaggtggccgagaagggcaagcactgcatcctggacgtgagcggcaacgccatcaagagactgcagatcgcccagctgtaccccatcagcatcttcatcaagcccaagagcatggagaacatcatggagatgaacaagagactgaccgaggagcaggccagaaagaccttcgagagagccatgaagctggagcaggagttcaccgagcacttcaccgccatcgtgcagggcgacaccctggaggacatctacaaccaggtgaagcagatcatcgaggagcagagcggcagctacatctgggtgcccgccaaggagaagctgtag

SEQ ID NO: 79358 - DNA, 2682 bp, synthetic construct
  misc_feature 1..2682: note = Description of Artificial Sequence: Synthetic coding sequence
  source 1..2682: mol_type = other DNA
atgcccgtgagaaagcaggacacccagagagccctgcacctgctggaggagtacagaagcaagctgagccagaccgaggacagacagctgagaagcagcatcgagagagtgatcaacatcttccagagcaacctgttccaggccctgatcgacatccaggagttctacgaggtgaccctgctggacaaccccaagtgcatcgacagaagcaagcccagcgagcccatccagcccgtgaacacctgggagatcagcagcctgcccagcagcaccgtgaccagcgagaccctgcccagcagcctgagccccagcgtggagaagtacagataccaggacgaggacacccccccccaggagcacatcagcccccagatcaccaacgaggtgatcggccccgagctggtgcacgtgagcgagaagaacctgagcgagatcgagaacgtgcacggcttcgtgagccacagccacatcagccccatcaaggccaaccccccccccgtgctggtgaacaccgacagcctggagacccccacctacgtgaacggcaccgacgccgactacgagtacgaggagatcaccctggagagaggcaacagcggcctgggcttcagcatcgccggcggcaccgacaacccccacatcggcgacgacagcagcatcttcatcaccaagatcatcaccggcggcgccgccgcccaggacggcagactgagagtgaacgactgcatcctgagagtgaacgaggtggacgtgagagacgtgacccacagcaaggccgtggaggccctgaaggaggccggcagcatcgtgagactgtacgtgaagagaagaaagcccgtgagcgagaagatcatggagatcaagctgatcaagggccccaagggcctgggcttcagcatcgccggcggcgtgggcaaccagcacatccccggcgacaacagcatctacgtgaccaagatcatcgagggcggcgccgcccacaaggacggcaagctgcagatcggcgacaagctgctggccgtgaacaacgtgtgcctggaggaggtgacccacgaggaggccgtgaccgccctgaagaacaccagcgacttcgtgtacctgaaggtggccaagcccaccagcatgtacatgaacgacggctacgccccccccgacatcaccaacagcagcagccagcccgtggacaaccacgtgagccccagcagcttcctgggccagacccccgccagccccgccagatacagccccgtgagcaaggccgtgctgggcgacgacgagatcaccagagagcccagaaaggtggtgctgcacagaggcagcaccggcctgggcttcaacatcgtgggcggcgaggacggcgagggcatcttcatcagcttcatcctggccggcggccccgccgacctgagcggcgagctgagaaagggcgacagaatcatcagcgtgaacagcgtggacctgagagccgccagccacgagcaggccgccgccgccctgaagaacgccggccaggccgtgaccatcgtggcccagtacagacccgaggagtacagcagattcgaggccaagatccacgacctgagagagcagatgatgaacagcagcatcagcagcggcagcggcagcctgagaaccagccagaagagaagcctgtacgtgagagccctgttcgactacgacaagaccaaggacagcggcctgcccagccagggcctgaacttcaagttcggcgacatcctgcacgtgatcaacgccagcgacgacgagtggtggcaggccagacaggtgacccccgacggcgagagcgacgaggtgggcgtgatccccagcaagagaagagtggagaagaaggagagagccagactgaagaccgtgaagttcaacagcaagaccagagacaagggccagagcttcaacgacaagagaaagaagaacctgttcagcagaaagttccccttctacaagaacaaggaccagagcgagcaggagaccagcgacgccgaccagcacgtgaccagcaacgccagcgacagcgagagcagctacagaggccaggaggagtacgtgctgagctacgagcccgtgaaccagcaggaggtgaactacaccagacccgtgatcatcctgggccccatgaaggacagaatcaacgacgacctgatcagcgagttccccgacaagttcggcagctgcgtgccccacaccaccagacccaagagagactacgaggtggacggcagagactaccacttcgtgaccagcagagagcagatggagaaggacatccaggagcacaagttcatcgaggccggccagtacaacaaccacctgtacggcaccagcgtgcagagcgtgagagaggtggccgagaagggcaagcactgcatcctggacgtgagcggcaacgccatcaagagactgcagatcgcccagctgtaccccatcagcatcttcatcaagcccaagagcatggagaacatcatggagatgaacaagagactgaccgaggagcaggccagaaagaccttcgagagagccatgaagctggagcaggagttcaccgagcacttcaccgccatcgtgcagggcgacaccctggaggacatctacaaccaggtgaagcagatcatcgaggagcagagcggcagctacatctgggtgcccgccaaggagaagctgtag

SEQ ID NO: 79359 - DNA, 2754 bp, synthetic construct
  misc_feature 1..2754: note = Description of Artificial Sequence: Synthetic coding sequence
  source 1..2754: mol_type = other DNA
atgcccgtgagaaagcaggacacccagagagccctgcacctgctggaggagtacagaagcaagctgagccagaccgaggacagacagctgagaagcagcatcgagagagtgatcaacatcttccagagcaacctgttccaggccctgatcgacatccaggagttctacgaggtgaccctgctggacaaccccaagtgcatcgacagaagcaagcccagcgagcccatccagcccgtgaacacctgggagatcagcagcctgcccagcagcaccgtgaccagcgagaccctgcccagcagcctgagccccagcgtggagaagtacagataccaggacgaggacacccccccccaggagcacatcagcccccagatcaccaacgaggtgatcggccccgagctggtgcacgtgagcgagaagaacctgagcgagatcgagaacgtgcacggcttcgtgagccacagccacatcagccccatcaagcccaccgaggccgtgctgcccagcccccccaccgtgcccgtgatccccgtgctgcccgtgcccgccgagaacaccgtgatcctgcccaccatcccccaggccaaccccccccccgtgctggtgaacaccgacagcctggagacccccacctacgtgaacggcaccgacgccgactacgagtacgaggagatcaccctggagagaggcaacagcggcctgggcttcagcatcgccggcggcaccgacaacccccacatcggcgacgacagcagcatcttcatcaccaagatcatcaccggcggcgccgccgcccaggacggcagactgagagtgaacgactgcatcctgagagtgaacgaggtggacgtgagagacgtgacccacagcaaggccgtggaggccctgaaggaggccggcagcatcgtgagactgtacgtgaagagaagaaagcccgtgagcgagaagatcatggagatcaagctgatcaagggccccaagggcctgggcttcagcatcgccggcggcgtgggcaaccagcacatccccggcgacaacagcatctacgtgaccaagatcatcgagggcggcgccgcccacaaggacggcaagctgcagatcggcgacaagctgctggccgtgaacaacgtgtgcctggaggaggtgacccacgaggaggccgtgaccgccctgaagaacaccagcgacttcgtgtacctgaaggtggccaagcccaccagcatgtacatgaacgacggctacgccccccccgacatcaccaacagcagcagccagcccgtggacaaccacgtgagccccagcagcttcctgggccagacccccgccagccccgccagatacagccccgtgagcaaggccgtgctgggcgacgacgagatcaccagagagcccagaaaggtggtgctgcacagaggcagcaccggcctgggcttcaacatcgtgggcggcgaggacggcgagggcatcttcatcagcttcatcctggccggcggccccgccgacctgagcggcgagctgagaaagggcgacagaatcatcagcgtgaacagcgtggacctgagagccgccagccacgagcaggccgccgccgccctgaagaacgccggccaggccgtgaccatcgtggcccagtacagacccgaggagtacagcagattcgaggccaagatccacgacctgagagagcagatgatgaacagcagcatcagcagcggcagcggcagcctgagaaccagccagaagagaagcctgtacgtgagagccctgttcgactacgacaagaccaaggacagcggcctgcccagccagggcctgaacttcaagttcggcgacatcctgcacgtgatcaacgccagcgacgacgagtggtggcaggccagacaggtgacccccgacggcgagagcgacgaggtgggcgtgatccccagcaagagaagagtggagaagaaggagagagccagactgaagaccgtgaagttcaacagcaagaccagagacaagggcgagatccccgacgacatgggcagcaagggcctgaagcacgtgaccagcaacgccagcgacagcgagagcagctacctgatcctgatcaccgacgagtacggctgcagcaagggcagaggccaggaggagtacgtgctgagctacgagcccgtgaaccagcaggaggtgaactacaccagacccgtgatcatcctgggccccatgaaggacagaatcaacgacgacctgatcagcgagttccccgacaagttcggcagctgcgtgccccacaccaccagacccaagagagactacgaggtggacggcagagactaccacttcgtgaccagcagagagcagatggagaaggacatccaggagcacaagttcatcgaggccggccagtacaacaaccacctgtacggcaccagcgtgcagagcgtgagagaggtggccgagaagggcaagcactgcatcctggacgtgagcggcaacgccatcaagagactgcagatcgcccagctgtaccccatcagcatcttcatcaagcccaagagcatggagaacatcatggagatgaacaagagactgaccgaggagcaggccagaaagaccttcgagagagccatgaagctggagcaggagttcaccgagcacttcaccgccatcgtgcagggcgacaccctggaggacatctacaaccaggtgaagcagatcatcgaggagcagagcggcagctacatctgggtgcccgccaaggagaagctgtag

SEQ ID NO: 79360 - DNA, 2676 bp, synthetic construct
  misc_feature 1..2676: note = Description of Artificial Sequence: Synthetic coding sequence
  source 1..2676: mol_type = other DNA
atgcccgtgagaaagcaggacacccagagagccctgcacctgctggaggagtacagaagcaagctgagccagaccgaggacagacagctgagaagcagcatcgagagagtgatcaacatcttccagagcaacctgttccaggccctgatcgacatccaggagttctacgaggtgaccctgctggacaaccccaagtgcatcgacagaagcaagcccagcgagcccatccagcccgtgaacacctgggagatcagcagcctgcccagcagcaccgtgaccagcgagaccctgcccagcagcctgagccccagcgtggagaagtacagataccaggacgaggacacccccccccaggagcacatcagcccccagatcaccaacgaggtgatcggccccgagctggtgcacgtgagcgagaagaacctgagcgagatcgagaacgtgcacggcttcgtgagccacagccacatcagccccatcaagcccaccgaggccgtgctgcccagcccccccaccgtgcccgtgatccccgtgctgcccgtgcccgccgagaacaccgtgatcctgcccaccatcccccaggccaaccccccccccgtgctggtgaacaccgacagcctggagacccccacctacgtgaacggcaccgacgccgactacgagtacgaggagatcaccctggagagaggcaacagcggcctgggcttcagcatcgccggcggcaccgacaacccccacatcggcgacgacagcagcatcttcatcaccaagatcatcaccggcggcgccgccgcccaggacggcagactgagagtgaacgactgcatcctgagagtgaacgaggtggacgtgagagacgtgacccacagcaaggccgtggaggccctgaaggaggccggcagcatcgtgagactgtacgtgaagagaagaaagcccgtgagcgagaagatcatggagatcaagctgatcaagggccccaagggcctgggcttcagcatcgccggcggcgtgggcaaccagcacatccccggcgacaacagcatctacgtgaccaagatcatcgagggcggcgccgcccacaaggacggcaagctgcagatcggcgacaagctgctggccgtgaacaacgtgtgcctggaggaggtgacccacgaggaggccgtgaccgccctgaagaacaccagcgacttcgtgtacctgaaggtggccaagcccaccagcatgtacatgaacgacggctacgccccccccgacatcaccaacagcagcagccagcccgtggacaaccacgtgagccccagcagcttcctgggccagacccccgccagccccgccagatacagccccgtgagcaaggccgtgctgggcgacgacgagatcaccagagagcccagaaaggtggtgctgcacagaggcagcaccggcctgggcttcaacatcgtgggcggcgaggacggcgagggcatcttcatcagcttcatcctggccggcggccccgccgacctgagcggcgagctgagaaagggcgacagaatcatcagcgtgaacagcgtggacctgagagccgccagccacgagcaggccgccgccgccctgaagaacgccggccaggccgtgaccatcgtggcccagtacagacccgaggagtacagcagattcgaggccaagatccacgacctgagagagcagatgatgaacagcagcatcagcagcggcagcggcagcctgagaaccagccagaagagaagcctgtacgtgagagccctgttcgactacgacaagaccaaggacagcggcctgcccagccagggcctgaacttcaagttcggcgacatcctgcacgtgatcaacgccagcgacgacgagtggtggcaggccagacaggtgacccccgacggcgagagcgacgaggtgggcgtgatccccagcaagagaagagtggagaagaaggagagagccagactgaagaccgtgaagttcaacagcaagaccagagacaagggcgagatccccgacgacatgggcagcaagggcctgatcggcggccaggaggagtacgtgctgagctacgagcccgtgaaccagcaggaggtgaactacaccagacccgtgatcatcctgggccccatgaaggacagaatcaacgacgacctgatcagcgagttccccgacaagttcggcagctgcgtgccccacaccaccagacccaagagagactacgaggtggacggcagagactaccacttcgtgaccagcagagagcagatggagaaggacatccaggagcacaagttcatcgaggccggccagtacaacaaccacctgtacggcaccagcgtgcagagcgtgagagaggtggccgagaagggcaagcactgcatcctggacgtgagcggcaacgccatcaagagactgcagatcgcccagctgtaccccatcagcatcttcatcaagcccaagagcatggagaacatcatggagatgaacaagagactgaccgaggagcaggccagaaagaccttcgagagagccatgaagctggagcaggagttcaccgagcacttcaccgccatcgtgcagggcgacaccctggaggacatctacaaccaggtgaagcagatcatcgaggagcagagcggcagctacatctgggtgcccgccaaggagaagctgtag

SEQ ID NO: 79361 - DNA, 627 bp, synthetic construct
  misc_feature 1..627: note = Description of Artificial Sequence: Synthetic coding sequence
  source 1..627: mol_type = other DNA
atgcccgtgagaaagcaggacacccagagagccctgcacctgctggaggagtacagaagcaagctgagccagaccgaggacagacagctgagaagcagcatcgagagagtgatcaacatcttccagagcaacctgttccaggccctgatcgacatccaggagttctacgaggtgaccctgctggacaaccccaagtgcatcgacagaagcaagcccagcgagcccatccagcccgtgaacacctgggagatcagcagcctgcccagcagcaccgtgaccagcgagaccctgcccagcagcctgagccccagcgtggagaagtacagataccaggacgaggacacccccccccaggagcacatcagcccccagatcaccaacgaggtgatcggccccgagctggtgcacgtgagcgagaagaacctgagcgagatcgagaacgtgcacggcttcgtgagccacagccacatcagccccatcaagcccaccgaggccgtgctgcccagcccccccaccgtgcccgtgatccccgtgctgcccgtgcccgccgagaacaccgtgatcctgcccaccatcccccaggccaaccccccccccgtgctggtgaacaccgacagcctggagtag

SEQ ID NO: 79362 - DNA, 2616 bp, synthetic construct
  misc_feature 1..2616: note = Description of Artificial Sequence: Synthetic coding sequence
  source 1..2616: mol_type = other DNA
atgcccgtgagaaagcaggacacccagagagccctgcacctgctggaggagtacagaagcaagctgagccagaccgaggacagacagctgagaagcagcatcgagagagtgatcaacatcttccagagcaacctgttccaggccctgatcgacatccaggagttctacgaggtgaccctgctggacaaccccaagtgcatcgacagaagcaagcccagcgagcccatccagcccgtgaacacctgggagatcagcagcctgcccagcagcaccgtgaccagcgagaccctgcccagcagcctgagccccagcgtggagaagtacagataccaggacgaggacacccccccccaggagcacatcagcccccagatcaccaacgaggtgatcggccccgagctggtgcacgtgagcgagaagaacctgagcgagatcgagaacgtgcacggcttcgtgagccacagccacatcagccccatcaaggccaaccccccccccgtgctggtgaacaccgacagcctggagacccccacctacgtgaacggcaccgacgccgactacgagtacgaggagatcaccctggagagaggcaacagcggcctgggcttcagcatcgccggcggcaccgacaacccccacatcggcgacgacagcagcatcttcatcaccaagatcatcaccggcggcgccgccgcccaggacggcagactgagagtgaacgactgcatcctgagagtgaacgaggtggacgtgagagacgtgacccacagcaaggccgtggaggccctgaaggaggccggcagcatcgtgagactgtacgtgaagagaagaaagcccgtgagcgagaagatcatggagatcaagctgatcaagggccccaagggcctgggcttcagcatcgccggcggcgtgggcaaccagcacatccccggcgacaacagcatctacgtgaccaagatcatcgagggcggcgccgcccacaaggacggcaagctgcagatcggcgacaagctgctggccgtgaacaacgtgtgcctggaggaggtgacccacgaggaggccgtgaccgccctgaagaacaccagcgacttcgtgtacctgaaggtggccaagcccaccagcatgtacatgaacgacggctacgccccccccgacatcaccaacagcagcagccagcccgtggacaaccacgtgagccccagcagcttcctgggccagacccccgccagccccgccagatacagccccgtgagcaaggccgtgctgggcgacgacgagatcaccagagagcccagaaaggtggtgctgcacagaggcagcaccggcctgggcttcaacatcgtgggcggcgaggacggcgagggcatcttcatcagcttcatcctggccggcggccccgccgacctgagcggcgagctgagaaagggcgacagaatcatcagcgtgaacagcgtggacctgagagccgccagccacgagcaggccgccgccgccctgaagaacgccggccaggccgtgaccatcgtggcccagtacagacccgaggagtacagcagattcgaggccaagatccacgacctgagagagcagatgatgaacagcagcatcagcagcggcagcggcagcctgagaaccagccagaagagaagcctgtacgtgagagccctgttcgactacgacaagaccaaggacagcggcctgcccagccagggcctgaacttcaagttcggcgacatcctgcacgtgatcaacgccagcgacgacgagtggtggcaggccagacaggtgacccccgacggcgagagcgacgaggtgggcgtgatccccagcaagagaagagtggagaagaaggagagagccagactgaagaccgtgaagttcaacagcaagaccagagacaagggcgagatccccgacgacatgggcagcaagggcctgaagcacgtgaccagcaacgccagcgacagcgagagcagctacagaggccaggaggagtacgtgctgagctacgagcccgtgaaccagcaggaggtgaactacaccagacccgtgatcatcctgggccccatgaaggacagaatcaacgacgacctgatcagcgagttccccgacaagttcggcagctgcgtgccccacaccaccagacccaagagagactacgaggtggacggcagagactaccacttcgtgaccagcagagagcagatggagaaggacatccaggagcacaagttcatcgaggccggccagtacaacaaccacctgtacggcaccagcgtgcagagcgtgagagaggtggccgagaagggcaagcactgcatcctggacgtgagcggcaacgccatcaagagactgcagatcgcccagctgtaccccatcagcatcttcatcaagcccaagagcatggagaacatcatggagatgaacaagagactgaccgaggagcaggccagaaagaccttcgagagagccatgaagctggagcaggagttcaccgagcacttcaccgccatcgtgcagggcgacaccctggaggacatctacaaccaggtgaagcagatcatcgaggagcagagcggcagctacatctgggtgcccgccaaggagaagctgtag

SEQ ID NO: 79363 - DNA, 321 bp, synthetic construct
  misc_feature 1..321: note = Description of Artificial Sequence: Synthetic coding sequence
  source 1..321: mol_type = other DNA
atgcccgtgagaaagcaggacacccagagagccctgcacctgctggaggagtacagaagcaagctgagccagaccgaggacagacagctgagaagcagcatcgagagagtgatcaacatcttccagagcaacctgttccaggccctgatcgacatccaggagttctacgaggtgaccctgctggacaaccccaagtgcatcgacagaagcaagcccagcgagcccatccagcccgtgaacacctgggagatcagcagcctgcccagcagcaccgtgaccagcgagaccctgcccagcagcctgagccccagcgtggagtag

SEQ ID NO: 79364 - DNA, 1113 bp, synthetic construct
  misc_feature 1..1113: note = Description of Artificial Sequence: Synthetic coding sequence
  source 1..1113: mol_type = other DNA
atgcccgtgagaaagcaggacacccagagagccctgcacctgctggaggagtacagaagcaagctgagccagaccgaggacagacagctgagaagcagcatcgagagagtgatcaacatcttccagagcaacctgttccaggccctgatcgacatccaggagttctacgaggtgaccctgctggacaaccccaagtgcatcgacagaagcaagcccagcgagcccatccagcccgtgaacacctgggagatcagcagcctgcccagcagcaccgtgaccagcgagaccctgcccagcagcctgagccccagcgtggagaagtacagataccaggacgaggacacccccccccaggagcacatcagcccccagatcaccaacgaggtgatcggccccgagctggtgcacgtgagcgagaagaacctgagcgagatcgagaacgtgcacggcttcgtgagccacagccacatcagccccatcaaggtgaacggcaccgacgccgactacgagtacgaggagatcaccctggagagaggcaacagcggcctgggcttcagcatcgccggcggcaccgacaacccccacatcggcgacgacagcagcatcttcatcaccaagatcatcaccggcggcgccgccgcccaggacggcagactgagagtgaacgactgcatcctgagagtgaacgaggtggacgtgagagacgtgacccacagcaaggccgtggaggccctgaaggaggccggcagcatcgtgagactgtacgtgaagagaagaaagcccgtgagcgagaagatcatggagatcaagctgatcaagggccccaagggcctgggcttcagcatcgccggcggcgtgggcaaccagcacatccccggcgacaacagcatctacgtgaccaagatcatcgagggcggcgccgcccacaaggacggcaagctgcagatcggcgacaagctgctggccgtgaacaacgtgtgcctggaggaggtgacccacgaggaggccgtgaccgccctgaagaacaccagcgacttcgtgtacctgaaggtggccaagcccaccagcatgtacatgaacgacggctacgccccccccgacatcaccaactag

SEQ ID NO: 79365 - DNA, 2715 bp, synthetic construct
  misc_feature 1..2715: note = Description of Artificial Sequence: Synthetic coding sequence
  source 1..2715: mol_type = other DNA
atgcccgtgagaaagcaggacacccagagagccctgcacctgctggaggagtacagaagcaagctgagccagaccgaggacagacagctgagaagcagcatcgagagagtgatcaacatcttccagagcaacctgttccaggccctgatcgacatccaggagttctacgaggtgaccctgctggacaaccccaagtgcatcgacagaagcaagcccagcgagcccatccagcccgtgaacacctgggagatcagcagcctgcccagcagcaccgtgaccagcgagaccctgcccagcagcctgagccccagcgtggagaagtacagataccaggacgaggacacccccccccaggagcacatcagcccccagatcaccaacgaggtgatcggccccgagctggtgcacgtgagcgagaagaacctgagcgagatcgagaacgtgcacggcttcgtgagccacagccacatcagccccatcaagcccaccgaggccgtgctgcccagcccccccaccgtgcccgtgatccccgtgctgcccgtgcccgccgagaacaccgtgatcctgcccaccatcccccaggccaaccccccccccgtgctggtgaacaccgacagcctggagacccccacctacgtgaacggcaccgacgccgactacgagtacgaggagatcaccctggagagaggcaacagcggcctgggcttcagcatcgccggcggcaccgacaacccccacatcggcgacgacagcagcatcttcatcaccaagatcatcaccggcggcgccgccgcccaggacggcagactgagagtgaacgactgcatcctgagagtgaacgaggtggacgtgagagacgtgacccacagcaaggccgtggaggccctgaaggaggccggcagcatcgtgagactgtacgtgaagagaagaaagcccgtgagcgagaagatcatggagatcaagctgatcaagggccccaagggcctgggcttcagcatcgccggcggcgtgggcaaccagcacatccccggcgacaacagcatctacgtgaccaagatcatcgagggcggcgccgcccacaaggacggcaagctgcagatcggcgacaagctgctggccgtgaacaacgtgtgcctggaggaggtgacccacgaggaggccgtgaccgccctgaagaacaccagcgacttcgtgtacctgaaggtggccaagcccaccagcatgtacatgaacgacggctacgccccccccgacatcaccaacagcagcagccagcccgtggacaaccacgtgagccccagcagcttcctgggccagacccccgccagccccgccagatacagccccgtgagcaaggccgtgctgggcgacgacgagatcaccagagagcccagaaaggtggtgctgcacagaggcagcaccggcctgggcttcaacatcgtgggcggcgaggacggcgagggcatcttcatcagcttcatcctggccggcggccccgccgacctgagcggcgagctgagaaagggcgacagaatcatcagcgtgaacagcgtggacctgagagccgccagccacgagcaggccgccgccgccctgaagaacgccggccaggccgtgaccatcgtggcccagtacagacccgaggagtacagcagattcgaggccaagatccacgacctgagagagcagatgatgaacagcagcatcagcagcggcagcggcagcctgagaaccagccagaagagaagcctgtacgtgagagccctgttcgactacgacaagaccaaggacagcggcctgcccagccagggcctgaacttcaagttcggcgacatcctgcacgtgatcaacgccagcgacgacgagtggtggcaggccagacaggtgacccccgacggcgagagcgacgaggtgggcgtgatccccagcaagagaagagtggagaagaaggagagagccagactgaagaccgtgaagttcaacagcaagaccagagacaagggcgagatccccgacgacatgggcagcaagggcctgaagcacgtgaccagcaacgccagcgacagcgagagcagctacagaggccaggaggagtacgtgctgagctacgagcccgtgaaccagcaggaggtgaactacaccagacccgtgatcatcctgggccccatgaaggacagaatcaacgacgacctgatcagcgagttccccgacaagttcggcagctgcgtgccccacaccaccagacccaagagagactacgaggtggacggcagagactaccacttcgtgaccagcagagagcagatggagaaggacatccaggagcacaagttcatcgaggccggccagtacaacaaccacctgtacggcaccagcgtgcagagcgtgagagaggtggccgagaagggcaagcactgcatcctggacgtgagcggcaacgccatcaagagactgcagatcgcccagctgtaccccatcagcatcttcatcaagcccaagagcatggagaacatcatggagatgaacaagagactgaccgaggagcaggccagaaagaccttcgagagagccatgaagctggagcaggagttcaccgagcacttcaccgccatcgtgcagggcgacaccctggaggacatctacaaccaggtgaagcagatcatcgaggagcagagcggcagctacatctgggtgcccgccaaggagaagctgtag

SEQ ID NO: 79366 - DNA, 465 bp, synthetic construct
  misc_feature 1..465: note = Description of Artificial Sequence: Synthetic coding sequence
  source 1..465: mol_type = other DNA
atgcccgtgagaaagcaggacacccagagagccctgcacctgctggaggagtacagaagcaagctgagccagaccgaggacagacagctgagaagcagcatcgagagagtgatcaacatcttccagagcaacctgttccaggccctgatcgacatccaggagttctacgaggtgaccctgctggacaaccccaagtgcatcgacagaagcaagcccagcgagcccatccagcccgtgaacacctgggagatcagcagcctgcccagcagcaccgtgaccagcgagaccctgcccagcagcctgagccccagcgtggagaagtacagataccaggacgaggacacccccccccaggagcacatcagcccccagatcaccaacgaggtgatcggccccgagctggtgcacgtgagcgagaagaacctgagcgagatcgagaacgtgcacggcttcgtgagccactag

SEQ ID NO: 79367 - DNA, 2562 bp, synthetic construct; identical to SEQ ID NO: 79356
  misc_feature 1..2562: note = Description of Artificial Sequence: Synthetic coding sequence
  source 1..2562: mol_type = other DNA

SEQ ID NO: 79368 - DNA, 111 bp, synthetic construct
  misc_feature 1..111: note = Description of Artificial Sequence: Synthetic coding sequence
  source 1..111: mol_type = other DNA
atgcccgtgagaaagcaggacacccagagagccctgcacctgctggaggagtacagaagcaagctgagccagaccgaggacagacagctgagaagcagcatcgagagatag

SEQ ID NO: 79369 - DNA, 372 bp, synthetic construct
  misc_feature 1..372: note = Description of Artificial Sequence: Synthetic coding sequence
  source 1..372: mol_type = other DNA
atgcccgtgagaaagcaggacacccagagagccctgcacctgctggaggagtacagaagcaagctgagccagaccgaggacagacagctgagaagcagcatcgagagagtgatcaacatcttccagagcaacctgttccaggccctgatcgacatccaggagttctacgaggtgaccctgctggacaaccccaagtgcatcgacagaagcaagcccagcgagcccatccagcccgtgaacacctgggagatcagcagcctgcccagcagcaccgtgaccagcgagaccctgcccagcagcctgagccccagcgtggagaagtacagataccaggacgaggacacccccccccaggagcacatcagcccctag

SEQ ID NO: 79370 - DNA, 2715 bp, synthetic construct; identical to SEQ ID NO: 79365
  misc_feature 1..2715: note = Description of Artificial Sequence: Synthetic coding sequence
  source 1..2715: mol_type = other DNA

SEQ ID NO: 79371 - DNA, 2682 bp, synthetic construct; identical to SEQ ID NO: 79358
  misc_feature 1..2682: note = Description of Artificial Sequence: Synthetic coding sequence
  source 1..2682: mol_type = other DNA

SEQ ID NO: 79372 - DNA, 2730 bp, synthetic construct
  misc_feature 1..2730: note = Description of Artificial Sequence: Synthetic coding sequence
  source 1..2730: mol_type = other DNA
atgaacgcctacctgaccaagcagcacagctgcagcagaggcagcgacggcatggacgccgtgagaagcgcccccaccctgatcagagacgcccactgcgcctgcggctggcagagaaactgccagggcctgggctacagcagccagaccatgcccagcagcggccccggcggccccgccagcaacagaaccggcggcagcagcttcaacagaaccctgtgggacagcgtgagaaagagcccccacaagaccagcaccaagggcaagggcacctgcggcgagcactgcacctgcccccacggctggttcagccccgcccaggccagccccgcccccatcatcgtgaacaccgacaccctggacaccatcccctacgtgaacggcaccgagatcgagtacgagttcgaggagatcaccctggagagaggcaacagcggcctgggcttcagcatcgccggcggcaccgacaacccccacatcggcgacgaccccggcatcttcatcaccaagatcatccccggcggcgccgccgccgaggacggcagactgagagtgaacgactgcatcctgagagtgaacgaggtggacgtgagcgaggtgagccacagcaaggccgtggaggccctgaaggaggccggcagcatcgtgagactgtacgtgagaagaagaagacccatcctggagaccgtggtggagatcaagctgttcaagggccccaagggcctgggcttcagcatcgccggcggcgtgggcaaccagcacatccccggcgacaacagcatctacgtgaccaagatcatcgacggcggcgccgcccagaaggacggcagactgcaggtgggcgacagactgctgatggtgaacaactacagcctggaggaggtgacccacgaggaggccgtggccatcctgaagaacaccagcgaggtggtgtacctgaaggtgggcaagcccaccaccatctacatgaccgacccctacggcccccccgacatcacccacagctacagcccccccatggagaaccacctgctgagcggcaacaacggcaccctggagtacaagaccagcctgccccccatcagccccggcagatacagccccatccccaagcacatgctggtggacgacgactacaccagaccccccgagcccgtgtacagcaccgtgaacaagctgtgcgacaagcccgccagccccagacactacagccccgtggagtgcgacaagagcttcctgctgagcgccccctacagccactaccacctgggcctgctgcccgacagcgagatgaccagccacagccagcacagcaccgccaccagacagcccagcatgaccctgcagagagccgtgagcctggagggcgagcccagaaaggtggtgctgcacaagggcagcaccggcctgggcttcaacatcgtgggcggcgaggacggcgagggcatcttcgtgagcttcatcctggccggcggccccgccgacctgagcggcgagctgcagagaggcgaccagatcctgagcgtgaacggcatcgacctgagaggcgccagccacgagcaggccgccgccgccctgaagggcgccggccagaccgtgaccatcatcgcccagtaccagcccgaggactacgccagattcgaggccaagatccacgacctgagagagcagatgatgaaccacagcatgagcagcggcagcggcagcctgagaaccaaccagaagagaagcctgtacgtgagagccatgttcgactacgacaagagcaaggacagcggcctgcccagccagggcctgagcttcaagtacggcgacatcctgcacgtgatcaacgccagcgacgacgagtggtggcaggccagaagagtgatgctggagggcgacagcgaggagatgggcgtgatccccagcaagagaagagtggagagaaaggagagagccagactgaagaccgtgaagttcaacgccaagcccggcgtgatcgacagcaagggcagcttcaacgacaagagaaagaagagcttcatcttcagcagaaagttccccttctacaagaacaaggagcagagcgagcaggagaccagcgaccccgagagaggccaggaggacctgatcctgagctacgagcccgtgaccagacaggagatcaactacaccagacccgtgatcatcctgggccccatgaaggacagaatcaacgacgacctgatcagcgagttccccgacaagttcggcagctgcgtgccccacaccaccagacccaagagagactacgaggtggacggcagagactaccacttcgtgatcagcagagagcagatggagaaggacatccaggagcacaagttcatcgaggccggccagtacaacgacaacctgtacggcaccagcgtgcagagcgtgagattcgtggccgagagaggcaagcactgcatcctggacgtgagcggcaacgccatcaagagactgcaggtggcccagctgtaccccatcgccatcttcatcaagcccagaagcctggagcccctgatggagatgaacaagagactgaccgaggagcaggccaagaagacctacgacagagccatcaagctggagcaggagttcggcgagtacttcaccgccatcgtgcagggcgacaccctggaggacatctacaaccagtgcaagctggtgatcgaggagcagagcggccccttcatctggatccccagcaaggagaagctgtag

SEQ ID NO: 79373 - DNA, 2376 bp, synthetic construct
  misc_feature 1..2376: note = Description of Artificial Sequence: Synthetic coding sequence
  source 1..2376: mol_type = other DNA
atgcagcacgccttcatccccgccagccccgcccccatcatcgtgaacaccgacaccctggacaccatcccctacgtgaacggcaccgagatcgagtacgagttcgaggagatcaccctggagagaggcaacagcggcctgggcttcagcatcgccggcggcaccgacaacccccacatcggcgacgaccccggcatcttcatcaccaagatcatccccggcggcgccgccgccgaggacggcagactgagagtgaacgactgcatcctgagagtgaacgaggtggacgtgagcgaggtgagccacagcaaggccgtggaggccctgaaggaggccggcagcatcgtgagactgtacgtgagaagaagaagacccatcctggagaccgtggtggagatcaagctgttcaagggccccaagggcctgggcttcagcatcgccggcggcgtgggcaaccagcacatccccggcgacaacagcatctacgtgaccaagatcatcgacggcggcgccgcccagaaggacggcagactgcaggtgggcgacagactgctgatggtgaacaactacagcctggaggaggtgacccacgaggaggccgtggccatcctgaagaacaccagcgaggtggtgtacctgaaggtgggcaagcccaccaccatctacatgaccgacccctacggcccccccgacatcacccacagctacagcccccccatggagaaccacctgctgagcggcaacaacggcaccctggagtacaagaccagcctgccccccatcagccccggcagatacagccccatccccaagcacatgctggtggacgacgactacaccagaccccccgagcccgtgtacagcaccgtgaacaagctgtgcgacaagcccgccagccccagacactacagccccgtggagtgcgacaagagcttcctgctgagcgccccctacagccactaccacctgggcctgctgcccgacagcgagatgaccagccacagccagcacagcaccgccaccagacagcccagcatgaccctgcagagagccgtgagcctggagggcgagcccagaaaggtggtgctgcacaagggcagcaccggcctgggcttcaacatcgtgggcggcgaggacggcgagggcatcttcgtgagcttcatcctggccggcggccccgccgacctgagcggcgagctgcagagaggcgaccagatcctgagcgtgaacggcatcgacctgagaggcgccagccacgagcaggccgccgccgccctgaagggcgccggccagaccgtgaccatcatcgcccagtaccagcccgaggactacgccagattcgaggccaagatccacgacctgagagagcagatgatgaaccacagcatgagcagcggcagcggcagcctgagaaccaaccagaagagaagcctgtacgtgagagccatgttcgactacgacaagagcaaggacagcggcctgcccagccagggcctgagcttcaagtacggcgacatcctgcacgtgatcaacgccagcgacgacgagtggtggcaggccagaagagtgatgctggagggcgacagcgaggagatgggcgtgatccccagcaagagaagagtggagagaaaggagagagccagactgaagaccgtgaagttcaacgccaagcccggcgtgatcgacagcaagggcgacatccccggcctgggcgacgacggctacggcaccaagaccctgagaggccaggaggacctgatcctgagctacgagcccgtgaccagacaggagatcaactacaccagacccgtgatcatcctgggccccatgaaggacagaatcaacgacgacctgatcagcgagttccccgacaagttcggcagctgcgtgccccacaccaccagacccaagagagactacgaggtggacggcagagactaccacttcgtgatcagcagagagcagatggagaaggacatccaggagcacaagttcatcgaggccggccagtacaacgacaacctgtacggcaccagcgtgcagagcgtgagattcgtggccgagagaggcaagcactgcatcctggacgtgagcggcaacgccatcaagagactgcaggtggcccagctgtaccccatcgccatcttcatcaagcccagaagcctggagcccctgatggagatgaacaagagactgaccgaggagcaggccaagaagacctacgacagagccatcaagctggagcaggagttcggcgagtacttcaccgccatcgtgcagggcgacaccctggaggacatctacaaccagtgcaagctggtgatcgaggagcagagcggccccttcatctggatccccagcaaggagaagctgtag

SEQ ID NO: 79374 - DNA, 2928 bp, synthetic construct
  misc_feature 1..2928: note = Description of Artificial Sequence: Synthetic coding sequence
  source 1..2928: mol_type = other DNA
atgggcatcttcaagagcagcctgttccaggccctgctggacatccaggagttctacgaggtgaccctgctgaacagccagaagagctgcgagcagaagatcgaggaggccaaccaggtgctgcagaagtgggagaagaccagcctgctggccccctgccacgacagactgcagaagagcagcgagctgaccgactgcagcggcagcaaggagaacgccagctgcatcgagcagaacaaggagaaccagagcttcgagaacgagaccgacgagaccaccacccagaaccagggcagatgccccgcccagaactgcagcgtggaggcccccgcctggatgcccgtgcaccactgcaccaagtacagataccaggacgaggacgccccccacgaccacagcctgcccagactgacccacgaggtgagaggccccgagctggtgcacgtgagcgagaagaacctgagccagatcgagaacgtgcacggctacgtgctgcagagccacatcagccccctgaaggccagccccgcccccatcatcgtgaacaccgacaccctggacaccatcccctacgtgaacggcaccgagatcgagtacgagttcgaggagatcaccctggagagaggcaacagcggcctgggcttcagcatcgccggcggcaccgacaacccccacatcggcgacgaccccggcatcttcatcaccaagatcatccccggcggcgccgccgccgaggacggcagactgagagtgaacgactgcatcctgagagtgaacgaggtggacgtgagcgaggtgagccacagcaaggccgtggaggccctgaaggaggccggcagcatcgtgagactgtacgtgagaagaagaagacccatcctggagaccgtggtggagatcaagctgttcaagggccccaagggcctgggcttcagcatcgccggcggcgtgggcaaccagcacatccccggcgacaacagcatctacgtgaccaagatcatcgacggcggcgccgcccagaaggacggcagactgcaggtgggcgacagactgctgatggtgaacaactacagcctggaggaggtgacccacgaggaggccgtggccatcctgaagaacaccagcgaggtggtgtacctgaaggtgggcaagcccaccaccatctacatgaccgacccctacggcccccccgacatcacccacagctacagcccccccatggagaaccacctgctgagcggcaacaacggcaccctggagtacaagaccagcctgccccccatcagccccggcagatacagccccatccccaagcacatgctggtggacgacgactacaccagaccccccgagcccgtgtacagcaccgtgaacaagctgtgcgacaagcccgccagccccagacactacagccccgtggagtgcgacaagagcttcctgctgagcgccccctacagccactaccacctgggcctgctgcccgacagcgagatgaccagccacagccagcacagcaccgccaccagacagcccagcatgaccctgcagagagccgtgagcctggagggcgagcccagaaaggtggtgctgcacaagggcagcaccggcctgggcttcaacatcgtgggcggcgaggacggcgagggcatcttcgtgagcttcatcctggccggcggccccgccgacctgagcggcgagctgcagagaggcgaccagatcctgagcgtgaacggcatcgacctgagaggcgccagccacgagcaggccgccgccgccctgaagggcgccggccagaccgtgaccatcatcgcccagtaccagcccgaggactacgccagattcgaggccaagatccacgacctgagagagcagatgatgaaccacagcatgagcagcggcagcggcagcctgagaaccaaccagaagagaagcctgtacgtgagagccatgttcgactacgacaagagcaaggacagcggcctgcccagccagggcctgagcttcaagtacggcgacatcctgcacgtgatcaacgccagcgacgacgagtggtggcaggccagaagagtgatgctggagggcgacagcgaggagatgggcgtgatccccagcaagagaagagtggagagaaaggagagagccagactgaagaccgtgaagttcaacgccaagcccggcgtgatcgacagcaagggcagcttcaacgacaagagaaagaagagcttcatcttcagcagaaagttccccttctacaagaacaaggagcagagcgagcaggagaccagcgaccccgagagaggccaggaggacctgatcctgagctacgagcccgtgaccagacaggagatcaactacaccagacccgtgatcatcctgggccccatgaaggacagaatcaacgacgacctgatcagcgagttccccgacaagttcggcagctgcgtgccccacaccaccagacccaagagagactacgaggtggacggcagagactaccacttcgtgatcagcagagagcagatggagaaggacatccaggagcacaagttcatcgaggccggccagtacaacgacaacctgtacggcaccagcgtgcagagcgtgagattcgtggccgagagaggcaagcactgcatcctggacgtgagcggcaacgccatcaagagactgcaggtggcccagctgtaccccatcgccatcttcatcaagcccagaagcctggagcccctgatggagatgaacaagagactgaccgaggagcaggccaagaagacctacgacagagccatcaagctggagcaggagttcggcgagtacttcaccgccatcgtgcagggcgacaccctggaggacatctacaaccagtgcaagctggtgatcgaggagcagagcggccccttcatctggatccccagcaaggagaagctgtag

SEQ ID NO: 79375 - DNA, 1005 bp, synthetic construct
  misc_feature 1..1005: note = Description of Artificial Sequence: Synthetic coding sequence
  source 1..1005: mol_type = other DNA
atgatgaaccacagcatgagcagcggcagcggcagcctgagaaccaaccagaagagaagcctgtacgtgagagccatgttcgactacgacaagagcaaggacagcggcctgcccagccagggcctgagcttcaagtacggcgacatcctgcacgtgatcaacgccagcgacgacgagtggtggcaggccagaagagtgatgctggagggcgacagcgaggagatgggcgtgatccccagcaagagaagagtggagagaaaggagagagccagactgaagaccgtgaagttcaacgccaagcccggcgtgatcgacagcaagggcgacatccccggcctgggcgacgacggctacggcaccaagaccctgagaggccaggaggacctgatcctgagctacgagcccgtgaccagacaggagatcaactacaccagacccgtgatcatcctgggccccatgaaggacagaatcaacgacgacctgatcagcgagttccccgacaagttcggcagctgcgtgccccacaccaccagacccaagagagactacgaggtggacggcagagactaccacttcgtgatcagcagagagcagatggagaaggacatccaggagcacaagttcatcgaggccggccagtacaacgacaacctgtacggcaccagcgtgcagagcgtgagattcgtggccgagagaggcaagcactgcatcctggacgtgagcggcaacgccatcaagagactgcaggtggcccagctgtaccccatcgccatcttcatcaagcccagaagcctggagcccctgatggagatgaacaagagactgaccgaggagcaggccaagaagacctacgacagagccatcaagctggagcaggagttcggcgagtacttcaccgccatcgtgcagggcgacaccctggaggacatctacaaccagtgcaagctggtgatcgaggagcagagcggccccttcatctggatccccagcaaggagaagctgtag

SEQ ID NO: 79376 - DNA, 2613 bp, synthetic construct
  misc_feature 1..2613: note = Description of Artificial Sequence: Synthetic coding sequence
  source 1..2613: mol_type = other DNA
atgttcttcgcctgctactgcgccctgagaaccaacgtgaagaagtacagataccaggacgaggacgccccccacgaccacagcctgcccagactgacccacgaggtgagaggccccgagctggtgcacgtgagcgagaagaacctgagccagatcgagaacgtgcacggctacgtgctgcagagccacatcagccccctgaaggccagccccgcccccatcatcgtgaacaccgacaccctggacaccatcccctacgtgaacggcaccgagatcgagtacgagttcgaggagatcaccctggagagaggcaacagcggcctgggcttcagcatcgccggcggcaccgacaacccccacatcggcgacgaccccggcatcttcatcaccaagatcatccccggcggcgccgccgccgaggacggcagactgagagtgaacgactgcatcctgagagtgaacgaggtggacgtgagcgaggtgagccacagcaaggccgtggaggccctgaaggaggccggcagcatcgtgagactgtacgtgagaagaagaagacccatcctggagaccgtggtggagatcaagctgttcaagggccccaagggcctgggcttcagcatcgccggcggcgtgggcaaccagcacatccccggcgacaacagcatctacgtgaccaagatcatcgacggcggcgccgcccagaaggacggcagactgcaggtgggcgacagactgctgatggtgaacaactacagcctggaggaggtgacccacgaggaggccgtggccatcctgaagaacaccagcgaggtggtgtacctgaaggtgggcaagcccaccaccatctacatgaccgacccctacggcccccccgacatcacccacagctacagcccccccatggagaaccacctgctgagcggcaacaacggcaccctggagtacaagaccagcctgccccccatcagccccggcagatacagccccatccccaagcacatgctggtggacgacgactacaccagaccccccgagcccgtgtacagcaccgtgaacaagctgtgcgacaagcccgccagccccagacactacagccccgtggagtgcgacaagagcttcctgctgagcgccccctacagccactaccacctgggcctgctgcccgacagcgagatgaccagccacagccagcacagcaccgccaccagacagcccagcatgaccctgcagagagccgtgagcctggagggcgagcccagaaaggtggtgctgcacaagggcagcaccggcctgggcttcaacatcgtgggcggcgaggacggcgagggcatcttcgtgagcttcatcctggccggcggccccgccgacctgagcggcgagctgcagagaggcgaccagatcctgagcgtgaacggcatcgacctgagaggcgccagccacgagcaggccgccgccgccctgaagggcgccggccagaccgtgaccatcatcgcccagtaccagcccgaggactacgccagattcgaggccaagatccacgacctgagagagcagatgatgaaccacagcatgagcagcggcagcggcagcctgagaaccaaccagaagagaagcctgtacgtgagagccatgttcgactacgacaagagcaaggacagcggcctgcccagccagggcctgagcttcaagtacggcgacatcctgcacgtgatcaacgccagcgacgacgagtggtggcaggccagaagagtgatgctggagggcgacagcgaggagatgggcgtgatccccagcaagagaagagtggagagaaaggagagagccagactgaagaccgtgaagttcaacgccaagcccggcgtgatcgacagcaagggcagcttcaacgacaagagaaagaagagcttcatcttcagcagaaagttccccttctacaagaacaaggagcagagcgagcaggagaccagcgaccccgagagaggccaggaggacctgatcctgagctacgagcccgtgaccagacaggagatcaactacaccagacccgtgatcatcctgggccccatgaaggacagaatcaacgacgacctgatcagcgagttccccgacaagttcggcagctgcgtgccccacaccaccagacccaagagagactacgaggtggacggcagagactaccacttcgtgatcagcagagagcagatggagaaggacatccaggagcacaagttcatcgaggccggccagtacaacgacaacctgtacggcaccagcgtgcagagcgtgagattcgtggccgagagaggcaagcactgcatcctggacgtgagcggcaacgccatcaagagactgcaggtggcccagctgtaccccatcgccatcttcatcaagcccagaagcctggagcccctgatggagatgaacaagagactgaccgaggagcaggccaagaagacctacgacagagccatcaagctggagcaggagttcggcgagtacttcaccgccatcgtgcagggcgacaccctggaggacatctacaaccagtgcaagctggtgatcgaggagcagagcggccccttcatctggatccccagcaaggagaagctgtag

SEQ ID NO: 79377 - DNA, 1047 bp, synthetic construct
  misc_feature 1..1047: note = Description of Artificial Sequence: Synthetic coding sequence
  source 1..1047: mol_type = other DNA
atgatgaaccacagcatgagcagcggcagcggcagcctgagaaccaaccagaagagaagcctgtacgtgagagccatgttcgactacgacaagagcaaggacagcggcctgcccagccagggcctgagcttcaagtacggcgacatcctgcacgtgatcaacgccagcgacgacgagtggtggcaggccagaagagtgatgctggagggcgacagcgaggagatgggcgtgatccccagcaagagaagagtggagagaaaggagagagccagactgaagaccgtgaagttcaacgccaagcccggcgtgatcgacagcaagggcgacatccccggcctgggcgacgacggctacggcaccaagaccctgaagcacgtgagcagcaacgccagcgacagcgagagcagctacagaggccaggaggacctgatcctgagctacgagcccgtgaccagacaggagatcaactacaccagacccgtgatcatcctgggccccatgaaggacagaatcaacgacgacctgatcagcgagttccccgacaagttcggcagctgcgtgccccacaccaccagacccaagagagactacgaggtggacggcagagactaccacttcgtgatcagcagagagcagatggagaaggacatccaggagcacaagttcatcgaggccggccagtacaacgacaacctgtacggcaccagcgtgcagagcgtgagattcgtggccgagagaggcaagcactgcatcctggacgtgagcggcaacgccatcaagagactgcaggtggcccagctgtaccccatcgccatcttcatcaagcccagaagcctggagcccctgatggagatgaacaagagactgaccgaggagcaggccaagaagacctacgacagagccatcaagctggagcaggagttcggcgagtacttcaccgccatcgtgcagggcgacaccctggaggacatctacaaccagtgcaagctggtgatcgaggagcagagcggccccttcatctggatccccagcaaggagaagctgtag

SEQ ID NO: 79378 - DNA, 2250 bp, synthetic construct
  misc_feature 1..2250: note = Description of Artificial Sequence: Synthetic coding sequence
  source 1..2250: mol_type = other DNA
atgcagagacccagcgtgagcagagccgagaactaccagctgctgtgggacaccatcgccagcctgaagcagtgcgagcaggccatgcagcacgccttcatccccgtgaacggcaccgagatcgagtacgagttcgaggagatcaccctggagagaggcaacagcggcctgggcttcagcatcgccggcggcaccgacaacccccacatcggcgacgaccccggcatcttcatcaccaagatcatccccggcggcgccgccgccgaggacggcagactgagagtgaacgactgcatcctgagagtgaacgaggtggacgtgagcgaggtgagccacagcaaggccgtggaggccctgaaggaggccggcagcatcgtgagactgtacgtgagaagaagaagacccatcctggagaccgtggtggagatcaagctgttcaagggccccaagggcctgggcttcagcatcgccggcggcgtgggcaaccagcacatccccggcgacaacagcatctacgtgaccaagatcatcgacggcggcgccgcccagaaggacggcagactgcaggtgggcgacagactgctgatggtgaacaactacagcctggaggaggtgacccacgaggaggccgtggccatcctgaagaacaccagcgaggtggtgtacctgaaggtgggcaagcccaccaccatctacatgaccgacccctacggcccccccgacatcacccacagctacagcccccccatggagaaccacctgctgagcggcaacaacggcaccctggagtacaagaccagcctgccccccatcagccccggcagatacagccccatccccaagcacatgctggtggacgacgactacaccagccacagccagcacagcaccgccaccagacagcccagcatgaccctgcagagagccgtgagcctggagggcgagcccagaaaggtggtgctgcacaagggcagcaccggcctgggcttcaacatcgtgggcggcgaggacggcgagggcatcttcgtgagcttcatcctggccggcggccccgccgacctgagcggcgagctgcagagaggcgaccagatcctgagcgtgaacggcatcgacctgagaggcgccagccacgagcaggccgccgccgccctgaagggcgccggccagaccgtgaccatcatcgcccagtaccagcccgaggactacgccagattcgaggccaagatccacgacctgagagagcagatgatgaaccacagcatgagcagcggcagcggcagcctgagaaccaaccagaagagaagcctgtacgtgagagccatgttcgactacgacaagagcaaggacagcggcctgcccagccagggcctgagcttcaagtacggcgacatcctgcacgtgatcaacgccagcgacgacgagtggtggcaggccagaagagtgatgctggagggcgacagcgaggagatgggcgtgatccccagcaagagaagagtggagagaaaggagagagccagactgaagaccgtgaagttcaacgccaagcccggcgtgatcgacagcaagggcgacatccccggcctgggcgacgacggctacggcaccaagaccctgagaggccaggaggacctgatcctgagctacgagcccgtgaccagacaggagatcaactacaccagacccgtgatcatcctgggccccatgaaggacagaatcaacgacgacctgatcagcgagttccccgacaagttcggcagctgcgtgccccacaccaccagacccaagagagactacgaggtggacggcagagactaccacttcgtgatcagcagagagcagatggagaaggacatccaggagcacaagttcatcgaggccggccagtacaacgacaacctgtacggcaccagcgtgcagagcgtgagattcgtggccgagagaggcaagcactgcatcctggacgtgagcggcaacgccatcaagagactgcaggtggcccagctgtaccccatcgccatcttcatcaagcccagaagcctggagcccctgatggagatgaacaagagactgaccgaggagcaggccaagaagacctacgacagagccatcaagctggagcaggagttcggcgagtacttcaccgccatcgtgcagggcgacaccctggaggacatctacaaccagtgcaagctggtgatcgaggagcagagcggccccttcatctggatccccagcaaggagaagctgtag

SEQ ID NO: 79379 - DNA, 1005 bp, synthetic construct; identical to SEQ ID NO: 79375
  misc_feature 1..1005: note = Description of Artificial Sequence: Synthetic coding sequence
  source 1..1005: mol_type = other DNA

SEQ ID NO: 79380 - DNA, 2601 bp, synthetic construct
  misc_feature 1..2601: note = Description of Artificial Sequence: Synthetic coding sequence
  source 1..2601: mol_type = other DNA
atgttcttcgcctgctactgcgccctgagaaccaacgtgaagaagtacagataccaggacgaggacgccccccacgaccacagcctgcccagactgacccacgaggtgagaggccccgagctggtgcacgtgagcgagaagaacctgagccagatcgagaacgtgcacggctacgtgctgcagagccacatcagccccctgaaggccagccccgcccccatcatcgtgaacaccgacaccctggacaccatcccctacgtgaacggcaccgagatcgagtacgagttcgaggagatcaccctggagagaggcaacagcggcctgggcttcagcatcgccggcggcaccgacaacccccacatcggcgacgaccccggcatcttcatcaccaagatcatccccggcggcgccgccgccgaggacggcagactgagagtgaacgactgcatcctgagagtgaacgaggtggacgtgagcgaggtgagccacagcaaggccgtggaggccctgaaggaggccggcagcatcgtgagactgtacgtgagaagaagaagacccatcctggagaccgtggtggagatcaagctgttcaagggccccaagggcctgggcttcagcatcgccggcggcgtgggcaaccagcacatccccggcgacaacagcatctacgtgaccaagatcatcgacggcggcgccgcccagaaggacggcagactgcaggtgggcgacagactgctgatggtgaacaactacagcctggaggaggtgacccacgaggaggccgtggccatcctgaagaacaccagcgaggtggtgtacctgaaggtgggcaagcccaccaccatctacatgaccgacccctacggcccccccgacatcacccacagctacagcccccccatggagaaccacctgctgagcggcaacaacggcaccctggagtacaagaccagcctgccccccatcagccccggcagatacagccccatccccaagcacatgctggtggacgacgactacaccagaccccccgagcccgtgtacagcaccgtgaacaagctgtgcgacaagcccgccagccccagacactacagccccgtggagtgcgacaagagcttcctgctgagcgccccctacagccactaccacctgggcctgctgcccgacagcgagatgaccagccacagccagcacagcaccgccaccagacagcccagcatgaccctgcagagagccgtgagcctggagggcgagcccagaaaggtggtgctgcacaagggcagcaccggcctgggcttcaacatcgtgggcggcgaggacggcgagggcatcttcgtgagcttcatcctggccggcggccccgccgacctgagcggcgagctgcagagaggcgaccagatcctgagcgtgaacggcatcgacctgagaggcgccagccacgagcaggccgccgccgccctgaagggcgccggccagaccgtgaccatcatcgcccagtaccagcccgaggactacgccagattcgaggccaagatccacgacctgagagagcagatgatgaaccacagcatgagcagcggcagcggcagcctgagaaccaaccagaagagaagcctgtacgtgagagccatgttcgactacgacaagagcaaggacagcggcctgcccagccagggcctgagcttcaagtacggcgacatcctgcacgtgatcaacgccagcgacgacgagtggtggcaggccagaagagtgatgctggagggcgacagcgaggagatgggcgtgatccccagcaagagaagagtggagagaaaggagagagccagactgaagaccgtgaagttcaacgccaagcccggcgtgatcgacagcaagggcgacatccccggcctgggcgacgacggctacggcaccaagaccctgaagcacgtgagcagcaacgccagcgacagcgagagcagctacagaggccaggaggacctgatcctgagctacgagcccgtgaccagacaggagatcaactacaccagacccgtgatcatcctgggccccatgaaggacagaatcaacgacgacctgatcagcgagttccccgacaagttcggcagctgcgtgccccacaccaccagacccaagagagactacgaggtggacggcagagactaccacttcgtgatcagcagagagcagatggagaaggacatccaggagcacaagttcatcgaggccggccagtacaacgacaacctgtacggcaccagcgtgcagagcgtgagattcgtggccgagagaggcaagcactgcatcctggacgtgagcggcaacgccatcaagagactgcaggtggcccagctgtaccccatcgccatcttcatcaagcccagaagcctggagcccctgatggagatgaacaagagactgaccgaggagcaggccaagaagacctacgacagagccatcaagctggagcaggagttcggcgagtacttcaccgccatcgtgcagggcgacaccctggaggacatctacaaccagtgcaagctggtgatcgaggagcagagcggccccttcatctggatccccagcaaggagaagctgtag

SEQ ID NO: 79381 - DNA, 285 bp, synthetic construct
  misc_feature 1..285: note = Description of Artificial Sequence: Synthetic coding sequence
  source 1..285: mol_type = other DNA
atgatgaaccacagcatgagcagcggcagcggcagcctgagaaccaaccagaagagaagcctgtacgtgagagccatgttcgactacgacaagagcaaggacagcggcctgcccagccagggcctgagcttcaagtacggcgacatcctgcacgtgatcaacgccagcgacgacgagtggtggcaggccagaagagtgatgctggagggcgacagcgaggagatgggcgtgatccccagcaagagaagagtggagagaaaggagagagccagactgaagacctag

SEQ ID NO: 79382 - DNA, 2559 bp, synthetic construct
  misc_feature 1..2559: note = Description of Artificial Sequence: Synthetic coding sequence
  source 1..2559: mol_type = other DNA
atgttcttcgcctgctactgcgccctgagaaccaacgtgaagaagtacagataccaggacgaggacgccccccacgaccacagcctgcccagactgacccacgaggtgagaggccccgagctggtgcacgtgagcgagaagaacctgagccagatcgagaacgtgcacggctacgtgctgcagagccacatcagccccctgaaggccagccccgcccccatcatcgtgaacaccgacaccctggacaccatcccctacgtgaacggcaccgagatcgagtacgagttcgaggagatcaccctggagagaggcaacagcggcctgggcttcagcatcgccggcggcaccgacaacccccacatcggcgacgaccccggcatcttcatcaccaagatcatccccggcggcgccgccgccgaggacggcagactgagagtgaacgactgcatcctgagagtgaacgaggtggacgtgagcgaggtgagccacagcaaggccgtggaggccctgaaggaggccggcagcatcgtgagactgtacgtgagaagaagaagacccatcctggagaccgtggtggagatcaagctgttcaagggccccaagggcctgggcttcagcatcgccggcggcgtgggcaaccagcacatccccggcgacaacagcatctacgtgaccaagatcatcgacggcggcgccgcccagaaggacggcagactgcaggtgggcgacagactgctgatggtgaacaactacagcctggaggaggtgacccacgaggaggccgtggccatcctgaagaacaccagcgaggtggtgtacctgaaggtgggcaagcccaccaccatctacatgaccgacccctacggcccccccgacatcacccacagctacagcccccccatggagaaccacctgctgagcggcaacaacggcaccctggagtacaagaccagcctgccccccatcagccccggcagatacagccccatccccaagcacatgctggtggacgacgactacaccagaccccccgagcccgtgtacagcaccgtgaacaagctgtgcgacaagcccgccagccccagacactacagccccgtggagtgcgacaagagcttcctgctgagcgccccctacagccactaccacctgggcctgctgcccgacagcgagatgaccagccacagccagcacagcaccgccaccagacagcccagcatgaccctgcagagagccgtgagcctggagggcgagcccagaaaggtggtgctgcacaagggcagcaccggcctgggcttcaacatcgtgggcggcgaggacggcgagggcatcttcgtgagcttcatcctggccggcggccccgccgacctgagcggcgagctgcagagaggcgaccagatcctgagcgtgaacggcatcgacctgagaggcgccagccacgagcaggccgccgccgccctgaagggcgccggccagaccgtgaccatcatcgcccagtaccagcccgaggactacgccagattcgaggccaagatccacgacctgagagagcagatgatgaaccacagcatgagcagcggcagcggcagcctgagaaccaaccagaagagaagcctgtacgtgagagccatgttcgactacgacaagagcaaggacagcggcctgcccagccagggcctgagcttcaagtacggcgacatcctgcacgtgatcaacgccagcgacgacgagtggtggcaggccagaagagtgatgctggagggcgacagcgaggagatgggcgtgatccccagcaagagaagagtggagagaaaggagagagccagactgaagaccgtgaagttcaacgccaagcccggcgtgatcgacagcaagggcgacatccccggcctgggcgacgacggctacggcaccaagaccctgagaggccaggaggacctgatcctgagctacgagcccgtgaccagacaggagatcaactacaccagacccgtgatcatcctgggccccatgaaggacagaatcaacgacgacctgatcagcgagttccccgacaagttcggcagctgcgtgccccacaccaccagacccaagagagactacgaggtggacggcagagactaccacttcgtgatcagcagagagcagatggagaaggacatccaggagcacaagttcatcgaggccggccagtacaacgacaacctgtacggcaccagcgtgcagagcgtgagattcgtggccgagagaggcaagcactgcatcctggacgtgagcggcaacgccatcaagagactgcaggtggcccagctgtaccccatcgccatcttcatcaagcccagaagcctggagcccctgatggagatgaacaagagactgaccgaggagcaggccaagaagacctacgacagagccatcaagctggagcaggagttcggcgagtacttcaccgccatcgtgcagggcgacaccctggaggacatctacaaccagtgcaagctggtgatcgaggagcagagcggccccttcatctggatccccagcaaggagaagctgtag

SEQ ID NO: 79383 - DNA, 1863 bp, synthetic construct
  misc_feature 1..1863: note = Description of Artificial Sequence: Synthetic coding sequence
  source 1..1863: mol_type = other DNA
atggtgaacaactacagcctggaggaggtgacccacgaggaggccgtggccatcctgaagaacaccagcgaggtggtgtacctgaaggtgggcaagcccaccaccatctacatgaccgacccctacggcccccccgacatcacccacagctacagcccccccatggagaaccacctgctgagcggcaacaacggcaccctggagtacaagaccagcctgccccccatcagccccggcagatacagccccatccccaagcacatgctggtggacgacgactacaccagaccccccgagcccgtgtacagcaccgtgaacaagctgtgcgacaagcccgccagccccagacactacagccccgtggagtgcgacaagagcttcctgctgagcgccccctacagccactaccacctgggcctgctgcccgacagcgagatgaccagccacagccagcacagcaccgccaccagacagcccagcatgaccctgcagagagccgtgagcctggagggcgagcccagaaaggtggtgctgcacaagggcagcaccggcctgggcttcaacatcgtgggcggcgaggacggcgagggcatcttcgtgagcttcatcctggccggcggccccgccgacctgagcggcgagctgcagagaggcgaccagatcctgagcgtgaacggcatcgacctgagaggcgccagccacgagcaggccgccgccgccctgaagggcgccggccagaccgtgaccatcatcgcccagtaccagcccgaggactacgccagattcgaggccaagatccacgacctgagagagcagatgatgaaccacagcatgagcagcggcagcggcagcctgagaaccaaccagaagagaagcctgtacgtgagagccatgttcgactacgacaagagcaaggacagcggcctgcccagccagggcctgagcttcaagtacggcgacatcctgcacgtgatcaacgccagcgacgacgagtggtggcaggccagaagagtgatgctggagggcgacagcgaggagatgggcgtgatccccagcaagagaagagtggagagaaaggagagagccagactgaagaccgtgaagttcaacgccaagcccggcgtgatcgacagcaagggcgacatccccggcctgggcgacgacggctacggcaccaagaccctgaagcacgtgagcagcaacgccagcgacagcgagagcagctacagaggccaggaggacctgatcctgagctacgagcccgtgaccagacaggagatcaactacaccagacccgtgatcatcctgggccccatgaaggacagaatcaacgacgacctgatcagcgagttccccgacaagttcggcagctgcgtgccccacaccaccagacccaagagagactacgaggtggacggcagagactaccacttcgtgatcagcagagagcagatggagaaggacatccaggagcacaagttcatcgaggccggccagtacaacgacaacctgtacggcaccagcgtgcagagcgtgagattcgtggccgagagaggcaagcactgcatcctggacgtgagcggcaacgccatcaagagactgcaggtggcccagctgtaccccatcgccatcttcatcaagcccagaagcctggagcccctgatggagatgaacaagagactgaccgaggagcaggccaagaagacctacgacagagccatcaagctggagcaggagttcggcgagtacttcaccgccatcgtgcagggcgacaccctggaggacatctacaaccagtgcaagctggtgatcgaggagcagagcggccccttcatctggatccccagcaaggagaagctgtag

SEQ ID NO: 79384 - DNA, 2928 bp, synthetic construct; identical to SEQ ID NO: 79374
  misc_feature 1..2928: note = Description of Artificial Sequence: Synthetic coding sequence
  source 1..2928: mol_type = other DNA

SEQ ID NO: 79385 - DNA, 2928 bp, synthetic construct
  misc_feature 1..2928: note = Description of Artificial Sequence: Synthetic coding sequence
  source 1..2928: mol_type = other DNA
ttcggcttcatcgtgagcgtgcacttccagagctacctgaacatccaggagttctacgaggtgaccctgctgaacagccagaagagctgcgagcagaagatcgaggaggccaaccaggtgctgcagaagtgggagaagaccagcctgctggccccctgccacgacagactgcagaagagcagcgagctgaccgactgcagcggcagcaaggagaacgccagctgcatcgagcagaacaaggagaaccagagcttcgagaacgagaccgacgagaccaccacccagaaccagggcagatgccccgcccagaactgcagcgtggaggcccccgcctggatgcccgtgcaccactgcaccaagtacagataccaggacgaggacgccccccacgaccacagcctgcccagactgacccacgaggtgagaggccccgagctggtgcacgtgagcgagaagaacctgagccagatcgagaacgtgcacggctacgtgctgcagagccacatcagccccctgaaggccagccccgcccccatcatcgtgaacaccgacaccctggacaccatcccctacgtgaacggcaccgagatcgagtacgagttcgaggagatcaccctggagagaggcaacagcggcctgggcttcagcatcgccggcggcaccgacaacccccacatcggcgacgaccccggcatcttcatcaccaagatcatccccggcggcgccgccgccgaggacggcagactgagagtgaacgactgcatcctgagagtgaacgaggtggacgtgagcgaggtgagccacagcaaggccgtggaggccctgaaggaggccggcagcatcgtgagactgtacgtgagaagaagaagacccatcctggagaccgtggtggagatcaagctgttcaagggccccaagggcctgggcttcagcatcgccggcggcgtgggcaaccagcacatccccggcgacaacagcatctacgtgaccaagatcatcgacggcggcgccgcccagaaggacggcagactgcaggtgggcgacagactgctgatggtgaacaactacagcctggaggaggtgacccacgaggaggccgtggccatcctgaagaacaccagcgaggtggtgtacctgaaggtgggcaagcccaccaccatctacatgaccgacccctacggcccccccgacatcacccacagctacagcccccccatggagaaccacctgctgagcggcaacaacggcaccctggagtacaagaccagcctgccccccatcagccccggcagatacagccccatccccaagcacatgctggtggacgacgactacaccagaccccccgagcccgtgtacagcaccgtgaacaagctgtgcgacaagcccgccagccccagacactacagccccgtggagtgcgacaagagcttcctgctgagcgccccctacagccactaccacctgggcctgctgcccgacagcgagatgaccagccacagccagcacagcaccgccaccagacagcccagcatgaccctgcagagagccgtgagcctggagggcgagcccagaaaggtggtgctgcacaagggcagcaccggcctgggcttcaacatcgtgggcggcgaggacggcgagggcatcttcgtgagcttcatcctggccggcggccccgccgacctgagcggcgagctgcagagaggcgaccagatcctgagcgtgaacggcatcgacctgagaggcgccagccacgagcaggccgccgccgccctgaagggcgccggccagaccgtgaccatcatcgcccagtaccagcccgaggactacgccagattcgaggccaagatccacgacctgagagagcagatgatgaaccacagcatgagcagcggcagcggcagcctgagaaccaaccagaagagaagcctgtacgtgagagccatgttcgactacgacaagagcaaggacagcggcctgcccagccagggcctgagcttcaagtacggcgacatcctgcacgtgatcaacgccagcgacgacgagtggtggcaggccagaagagtgatgctggagggcgacagcgaggagatgggcgtgatccccagcaagagaagagtggagagaaaggagagagccagactgaagaccgtgaagttcaacgccaagcccggcgtgatcgacagcaagggcagcttcaacgacaagagaaagaagagcttcatcttcagcagaaagttccccttctacaagaacaaggagcagagcgagcaggagaccagcgaccccgagagaggccaggaggacctgatcctgagctacgagcccgtgaccagacaggagatcaactacaccagacccgtgatcatcctgggccccatgaaggacagaatcaacgacgacctgatcagcgagttccccgacaagttcggcagctgcgtgccccacaccaccagacccaagagagactacgaggtggacggcagagactaccacttcgtgatcagcagagagcagatggagaaggacatccaggagcacaagttcatcgaggccggccagtacaacgacaacctgtacggcaccagcgtgcagagcgtgagattcgtggccgagagaggcaagcactgcatcctggacgtgagcggcaacgccatcaagagactgcaggtggcccagctgtaccccatcgccatcttcatcaagcccagaagcctggagcccctgatggagatgaacaagagactgaccgaggagcaggccaagaagacctacgacagagccatcaagctggagcaggagttcggcgagtacttcaccgccatcgtgcagggcgacaccctggaggacatctacaaccagtgcaagctggtgatcgaggagcagagcggccccttcatctggatccccagcaaggagaagctgtag

SEQ ID NO: 79386 - DNA, 2550 bp, synthetic construct
  misc_feature 1..2550: note = Description of Artificial Sequence: Synthetic coding sequence
  source 1..2550: mol_type = other DNA
atgcacaagcaccagcactgctgcaagtgccccgagtgctacgaggtgaccagactggccgccctgagaagactggagccccccggctacggcgactggcaggtgcccgacccctacggccccggcggcggcaacggcgccagcgccggctacggcggctacagcagccagaccctgcccagccaggccggcgccacccccacccccagaaccaaggccaagctgatccccaccggcagagacgtgggccccgtgccccccaagcccgtgcccggcaagagcacccccaagctgaacggcagcggccccagctggtggcccgagtgcacctgcaccaacagagactggtacgagcaggccagacccgcccccctgctggtgaaccccgagaccctgaagcacagcctgagcgtgaacggcagcgacggcatgttcaagtacgaggagatcgtgctggagagaggcaacagcggcctgggcttcagcatcgccggcggcatcgacaacccccacgtgcccgacgaccccggcatcttcatcaccaagatcatccccggcggcgccgccgccatggacggcagactgggcgtgaacgactgcgtgctgagagtgaacgaggtggacgtgagcgaggtggtgcacagcagagccgtggaggccctgaaggaggccggccccgtggtgagactggtggtgagaagaagacagcccccccccgagaccatcatggaggtgaacctgctgaagggccccaagggcctgggcttcagcatcgccggcggcatcggcaaccagcacatccccggcgacaacagcatctacatcaccaagatcatcgagggcggcgccgcccagaaggacggcagactgcagatcggcgacagactgctggccgtgaacaacaccaacctgcaggacgtgagacacgaggaggccgtggccagcctgaagaacaccagcgacatggtgtacctgaaggtggccaagcccggcagcctgcacctgaacgacatgtacgccccccccgactacgccagcaccttcaccgccctggccgacaaccacatcagccacaacagcagcctgggctacctgggcgccgtggagagcaaggtgagctaccccgcccccccccaggtgccccccaccagatacagccccatccccagacacatgctggccgaggaggacttcaccagagagcccagaaagatcatcctgcacaagggcagcaccggcctgggcttcaacatcgtgggcggcgaggacggcgagggcatcttcgtgagcttcatcctggccggcggccccgccgacctgagcggcgagctgagaagaggcgacagaatcctgagcgtgaacggcgtgaacctgagaaacgccacccacgagcaggccgccgccgccctgaagagagccggccagagcgtgaccatcgtggcccagtacagacccgaggagtacagcagattcgagagcaagatccacgacctgagagagcagatgatgaacagcagcatgagcagcggcagcggcagcctgagaaccagcgagaagagaagcctgtacgtgagagccctgttcgactacgacagaaccagagacagctgcctgcccagccagggcctgagcttcagctacggcgacatcctgcacgtgatcaacgccagcgacgacgagtggtggcaggccagactggtgaccccccacggcgagagcgagcagatcggcgtgatccccagcaagaagagagtggagaagaaggagagagccagactgaagaccgtgaagttccacgccagaaccggcatgatcgagagcaacagagacttccccggcctgagcgacgactactacggcgccaagaacctgaagggcgtgaccagcaacaccagcgacagcgagagcagcagcaagggccaggaggacgccatcctgagctacgagcccgtgaccagacaggagatccactacgccagacccgtgatcatcctgggccccatgaaggacagagtgaacgacgacctgatcagcgagttcccccacaagttcggcagctgcgtgccccacaccaccagacccagaagagacaacgaggtggacggccaggactaccacttcgtggtgagcagagagcagatggagaaggacatccaggacaacaagttcatcgaggccggccagttcaacgacaacctgtacggcaccagcatccagagcgtgagagccgtggccgagagaggcaagcactgcatcctggacgtgagcggcaacgccatcaagagactgcagcaggcccagctgtaccccatcgccatcttcatcaagcccaagagcatcgaggccctgatggagatgaacagaagacagacctacgagcaggccaacaagatctacgacaaggccatgaagctggagcaggagttcggcgagtacttcaccgccatcgtgcagggcgacagcctggaggagatctacaacaagatcaagcagatcatcgaggaccagagcggccactacatctgggtgcccagccccgagaagctgtag

SEQ ID NO: 79387 - DNA, 2454 bp, synthetic construct
  misc_feature 1..2454: note = Description of Artificial Sequence: Synthetic coding sequence
  source 1..2454: mol_type = other DNA
atgcacaagcaccagcactgctgcaagtgccccgagtgctacgaggtgaccagactggccgccctgagaagactggagccccccggctacggcgactggcaggtgcccgacccctacggccccggcggcggcaacggcgccagcgccggctacggcggctacagcagccagaccctgcccagccaggccggcgccacccccacccccagaaccaaggccaagctgatccccaccggcagagacgtgggccccgtgccccccaagcccgtgcccggcaagagcacccccaagctgaacggcagcggccccagctggtggcccgagtgcacctgcaccaacagagactggtacgagcaggtgaacggcagcgacggcatgttcaagtacgaggagatcgtgctggagagaggcaacagcggcctgggcttcagcatcgccggcggcatcgacaacccccacgtgcccgacgaccccggcatcttcatcaccaagatcatccccggcggcgccgccgccatggacggcagactgggcgtgaacgactgcgtgctgagagtgaacgaggtggacgtgagcgaggtggtgcacagcagagccgtggaggccctgaaggaggccggccccgtggtgagactggtggtgagaagaagacagcccccccccgagaccatcatggaggtgaacctgctgaagggccccaagggcctgggcttcagcatcgccggcggcatcggcaaccagcacatccccggcgacaacagcatctacatcaccaagatcatcgagggcggcgccgcccagaaggacggcagactgcagatcggcgacagactgctggccgtgaacaacaccaacctgcaggacgtgagacacgaggaggccgtggccagcctgaagaacaccagcgacatggtgtacctgaaggtggccaagcccggcagcctgcacctgaacgacatgtacgccccccccgactacgccagcaccttcaccgccctggccgacaaccacatcagccacaacagcagcctgggctacctgggcgccgtggagagcaaggtgagctaccccgcccccccccaggtgccccccaccagatacagccccatccccagacacatgctggccgaggaggacttcaccagagagcccagaaagatcatcctgcacaagggcagcaccggcctgggcttcaacatcgtgggcggcgaggacggcgagggcatcttcgtgagcttcatcctggccggcggccccgccgacctgagcggcgagctgagaagaggcgacagaatcctgagcgtgaacggcgtgaacctgagaaacgccacccacgagcaggccgccgccgccctgaagagagccggccagagcgtgaccatcgtggcccagtacagacccgaggagtacagcagattcgagagcaagatccacgacctgagagagcagatgatgaacagcagcatgagcagcggcagcggcagcctgagaaccagcgagaagagaagcctgtacgtgagagccctgttcgactacgacagaaccagagacagctgcctgcccagccagggcctgagcttcagctacggcgacatcctgcacgtgatcaacgccagcgacgacgagtggtggcaggccagactggtgaccccccacggcgagagcgagcagatcggcgtgatccccagcaagaagagagtggagaagaaggagagagccagactgaagaccgtgaagttccacgccagaaccggcatgatcgagagcaacagagacttccccggcctgagcgacgactactacggcgccaagaacctgaagggccaggaggacgccatcctgagctacgagcccgtgaccagacaggagatccactacgccagacccgtgatcatcctgggccccatgaaggacagagtgaacgacgacctgatcagcgagttcccccacaagttcggcagctgcgtgccccacaccaccagacccagaagagacaacgaggtggacggccaggactaccacttcgtggtgagcagagagcagatggagaaggacatccaggacaacaagttcatcgaggccggccagttcaacgacaacctgtacggcaccagcatccagagcgtgagagccgtggccgagagaggcaagcactgcatcctggacgtgagcggcaacgccatcaagagactgcagcaggcccagctgtaccccatcgccatcttcatcaagcccaagagcatcgaggccctgatggagatgaacagaagacagacctacgagcaggccaacaagatctacgacaaggccatgaagctggagcaggagttcggcgagtacttcaccgccatcgtgcagggcgacagcctggaggagatctacaacaagatcaagcagatcatcgaggaccagagcggccactacatctgggtgcccagccccgagaagctgtag

SEQ ID NO: 79388 - DNA, 1101 bp, synthetic construct
  misc_feature 1..1101: note = Description of Artificial Sequence: Synthetic coding sequence
  source 1..1101: mol_type = other DNA
atgatgaacagcagcatgagcagcggcagcggcagcctgagaaccagcgagaagagaagcctgtacgtgagagccctgttcgactacgacagaaccagagacagctgcctgcccagccagggcctgagcttcagctacggcgacatcctgcacgtgatcaacgccagcgacgacgagtggtggcaggccagactggtgaccccccacggcgagagcgagcagatcggcgtgatccccagcaagaagagagtggagaagaaggagagagccagactgaagaccgtgaagttccacgccagaaccggcatgatcgagagcaacagaagcatcaagaccaagagaaagaagagcttcagactgagcagaaagttccccttctacaagagcaaggagaacatggcccaggagagcagcatccaggagcagggcgtgaccagcaacaccagcgacagcgagagcagcagcaagggccaggaggacgccatcctgagctacgagcccgtgaccagacaggagatccactacgccagacccgtgatcatcctgggccccatgaaggacagagtgaacgacgacctgatcagcgagttcccccacaagttcggcagctgcgtgccccacaccaccagacccagaagagacaacgaggtggacggccaggactaccacttcgtggtgagcagagagcagatggagaaggacatccaggacaacaagttcatcgaggccggccagttcaacgacaacctgtacggcaccagcatccagagcgtgagagccgtggccgagagaggcaagcactgcatcctggacgtgagcggcaacgccatcaagagactgcagcaggcccagctgtaccccatcgccatcttcatcaagcccaagagcatcgaggccctgatggagatgaacagaagacagacctacgagcaggccaacaagatctacgacaaggccatgaagctggagcaggagttcggcgagtacttcaccgccatcgtgcagggcgacagcctggaggagatctacaacaagatcaagcagatcatcgaggaccagagcggccactacatctgggtgcccagccccgagaagctgtag

SEQ ID NO: 79389 - DNA, 2304 bp, synthetic construct
  misc_feature 1..2304: note = Description of Artificial Sequence: Synthetic coding sequence
  source 1..2304: mol_type = other DNA
atgagccagagacccagagcccccagaagcgccctgtggctgctggccccccccctgctgagatgggccccccccctgctgaccgtgctgcacagcgacctgttccaggccctgctggacatcctggactactacgaggccagcctgagcgagagccagaagtacagataccaggacgaggacaccccccccctggagcacagccccgcccacctgcccaaccaggccaacagcccccccgtgatcgtgaacaccgacaccctggaggcccccggctacgagctgcaggtgaacggcaccgagggcgagatggagtacgaggagatcaccctggagagaggcaacagcggcctgggcttcagcatcgccggcggcaccgacaacccccacatcggcgacgaccccagcatcttcatcaccaagatcatccccggcggcgccgccgcccaggacggcagactgagagtgaacgacagcatcctgttcgtgaacgaggtggacgtgagagaggtgacccacagcgccgccgtggaggccctgaaggaggccggcagcatcgtgagactgtacgtgatgagaagaaagccccccgccgagaaggtgatggagatcaagctgatcaagggccccaagggcctgggcttcagcatcgccggcggcgtgggcaaccagcacatccccggcgacaacagcatctacgtgaccaagatcatcgagggcggcgccgcccacaaggacggcagactgcagatcggcgacaagatcctggccgtgaacagcgtgggcctggaggacgtgatgcacgaggacgccgtggccgccctgaagaacacctacgacgtggtgtacctgaaggtggccaagcccagcaacgcctacctgagcgacagctacgccccccccgacatcaccaccagctacagccagcacctggacaacgagatcagccacagcagctacctgggcaccgactaccccaccgccatgacccccaccagccccagaagatacagccccgtggccaaggacctgctgggcgaggaggacatccccagagagcccagaagaatcgtgatccacagaggcagcaccggcctgggcttcaacatcgtgggcggcgaggacggcgagggcatcttcatcagcttcatcctggccggcggccccgccgacctgagcggcgagctgagaaagggcgaccagatcctgagcgtgaacggcgtggacctgagaaacgccagccacgagcaggccgccatcgccctgaagaacgccggccagaccgtgaccatcatcgcccagtacaagcccgaggagtacagcagattcgaggccaagatccacgacctgagagagcagctgatgaacagcagcctgggcagcggcaccgccagcctgagaagcaaccccaagagaggcttctacatcagagccctgttcgactacgacaagaccaaggactgcggcttcctgagccaggccctgagcttcagattcggcgacgtgctgcacgtgatcgacgccagcgacgaggagtggtggcaggccagaagagtgcacagcgacagcgagaccgacgacatcggcttcatccccagcaagagaagagtggagagaagagagtggagcagactgaaggccaaggactggggcagcagcagcggcagccagggcagagaggacagcgtgctgagctacgagaccgtgacccagatggaggtgcactacgccagacccatcatcatcctgggccccaccaaggacagagccaacgacgacctgctgagcgagttccccgacaagttcggcagctgcgtgccccacaccaccagacccaagagagagtacgagatcgacggcagagactaccacttcgtgagcagcagagagaagatggagaaggacatccaggcccacaagttcatcgaggccggccagtacaacagccacctgtacggcaccagcgtgcagagcgtgagagaggtggccgagcagggcaagcactgcatcctggacgtgagcgccaacgccgtgagaagactgcaggccgcccacctgcaccccatcgccatcttcatcagacccagaagcctggagaacgtgctggagatcaacaagagaatcaccgaggagcaggccagaaaggccttcgacagagccaccaagctggagcaggagttcaccgagtgcttcagcgccatcgtggagggcgacagcttcgaggagatctaccacaaggtgaagagagtgatcgaggacctgagcggcccctacatctgggtgcccgccagagagagactgtag

SEQ ID NO: 79390 - DNA, 2166 bp, synthetic construct
  misc_feature 1..2166: note = Description of Artificial Sequence: Synthetic coding sequence
  source 1..2166: mol_type = other DNA
atggactgcctgtgcatcgtgaccaccaagaagtacagataccaggacgaggacaccccccccctggagcacagccccgcccacctgcccaaccaggccaacagcccccccgtgatcgtgaacaccgacaccctggaggcccccggctacgtgaacggcaccgagggcgagatggagtacgaggagatcaccctggagagaggcaacagcggcctgggcttcagcatcgccggcggcaccgacaacccccacatcggcgacgaccccagcatcttcatcaccaagatcatccccggcggcgccgccgcccaggacggcagactgagagtgaacgacagcatcctgttcgtgaacgaggtggacgtgagagaggtgacccacagcgccgccgtggaggccctgaaggaggccggcagcatcgtgagactgtacgtgatgagaagaaagccccccgccgagaaggtgatggagatcaagctgatcaagggccccaagggcctgggcttcagcatcgccggcggcgtgggcaaccagcacatccccggcgacaacagcatctacgtgaccaagatcatcgagggcggcgccgcccacaaggacggcagactgcagatcggcgacaagatcctggccgtgaacagcgtgggcctggaggacgtgatgcacgaggacgccgtggccgccctgaagaacacctacgacgtggtgtacctgaaggtggccaagcccagcaacgcctacctgagcgacagctacgccccccccgacatcaccaccagctacagccagcacctggacaacgagatcagccacagcagctacctgggcaccgactaccccaccgccatgacccccaccagccccagaagatacagccccgtggccaaggacctgctgggcgaggaggacatccccagagagcccagaagaatcgtgatccacagaggcagcaccggcctgggcttcaacatcgtgggcggcgaggacggcgagggcatcttcatcagcttcatcctggccggcggccccgccgacctgagcggcgagctgagaaagggcgaccagatcctgagcgtgaacggcgtggacctgagaaacgccagccacgagcaggccgccatcgccctgaagaacgccggccagaccgtgaccatcatcgcccagtacaagcccgaggagtacagcagattcgaggccaagatccacgacctgagagagcagctgatgaacagcagcctgggcagcggcaccgccagcctgagaagcaaccccaagagaggcttctacatcagagccctgttcgactacgacaagaccaaggactgcggcttcctgagccaggccctgagcttcagattcggcgacgtgctgcacgtgatcgacgccagcgacgaggagtggtggcaggccagaagagtgcacagcgacagcgagaccgacgacatcggcttcatccccagcaagagaagagtggagagaagagagtggagcagactgaaggccaaggactggggcagcagcagcggcagccagggcagagaggacagcgtgctgagctacgagaccgtgacccagatggaggtgcactacgccagacccatcatcatcctgggccccaccaaggacagagccaacgacgacctgctgagcgagttccccgacaagttcggcagctgcgtgccccacaccaccagacccaagagagagtacgagatcgacggcagagactaccacttcgtgagcagcagagagaagatggagaaggacatccaggcccacaagttcatcgaggccggccagtacaacagccacctgtacggcaccagcgtgcagagcgtgagagaggtggccgagcagggcaagcactgcatcctggacgtgagcgccaacgccgtgagaagactgcaggccgcccacctgcaccccatcgccatcttcatcagacccagaagcctggagaacgtgctggagatcaacaagagaatcaccgaggagcaggccagaaaggccttcgacagagccaccaagctggagcaggagttcaccgagtgcttcagcgccatcgtggagggcgacagcttcgaggagatctaccacaaggtgaagagagtgatcgaggacctgagcggcccctacatctgggtgcccgccagagagagactgtag

SEQ ID NO: 79391 - DNA, 1995 bp, synthetic construct
  misc_feature 1..1995: note = Description of Artificial Sequence: Synthetic coding sequence
  source 1..1995: mol_type = other DNA
atggagtacgaggagatcaccctggagagaggcaacagcggcctgggcttcagcatcgccggcggcaccgacaacccccacatcggcgacgaccccagcatcttcatcaccaagatcatccccggcggcgccgccgcccaggacggcagactgagagtgaacgacagcatcctgttcgtgaacgaggtggacgtgagagaggtgacccacagcgccgccgtggaggccctgaaggaggccggcagcatcgtgagactgtacgtgatgagaagaaagccccccgccgagaaggtgatggagatcaagctgatcaagggccccaagggcctgggcttcagcatcgccggcggcgtgggcaaccagcacatccccggcgacaacagcatctacgtgaccaagatcatcgagggcggcgccgcccacaaggacggcagactgcagatcggcgacaagatcctggccgtgaacagcgtgggcctggaggacgtgatgcacgaggacgccgtggccgccctgaagaacacctacgacgtggtgtacctgaaggtggccaagcccagcaacgcctacctgagcgacagctacgccccccccgacatcaccaccagctacagccagcacctggacaacgagatcagccacagcagctacctgggcaccgactaccccaccgccatgacccccaccagccccagaagatacagccccgtggccaaggacctgctgggcgaggaggacatccccagagagcccagaagaatcgtgatccacagaggcagcaccggcctgggcttcaacatcgtgggcggcgaggacggcgagggcatcttcatcagcttcatcctggccggcggccccgccgacctgagcggcgagctgagaaagggcgaccagatcctgagcgtgaacggcgtggacctgagaaacgccagccacgagcaggccgccatcgccctgaagaacgccggccagaccgtgaccatcatcgcccagtacaagcccgaggagtacagcagattcgaggccaagatccacgacctgagagagcagctgatgaacagcagcctgggcagcggcaccgccagcctgagaagcaaccccaagagaggcttctacatcagagccctgttcgactacgacaagaccaaggactgcggcttcctgagccaggccctgagcttcagattcggcgacgtgctgcacgtgatcgacgccagcgacgaggagtggtggcaggccagaagagtgcacagcgacagcgagaccgacgacatcggcttcatccccagcaagagaagagtggagagaagagagtggagcagactgaaggccaaggactggggcagcagcagcggcagccagggcagagaggacagcgtgctgagctacgagaccgtgacccagatggaggtgcactacgccagacccatcatcatcctgggccccaccaaggacagagccaacgacgacctgctgagcgagttccccgacaagttcggcagctgcgtgccccacaccaccagacccaagagagagtacgagatcgacggcagagactaccacttcgtgagcagcagagagaagatggagaaggacatccaggcccacaagttcatcgaggccggccagtacaacagccacctgtacggcaccagcgtgcagagcgtgagagaggtggccgagcagggcaagcactgcatcctggacgtgagcgccaacgccgtgagaagactgcaggccgcccacctgcaccccatcgccatcttcatcagacccagaagcctggagaacgtgctggagatcaacaagagaatcaccgaggagcaggccagaaaggccttcgacagagccaccaagctggagcaggagttcaccgagtgcttcagcgccatcgtggagggcgacagcttcgaggagatctaccacaaggtgaagagagtgatcgaggacctgagcggcccctacatctgggtgcccgccagagagagactgtag

SEQ ID NO: 79392 - DNA, 2175 bp, synthetic construct
  misc_feature 1..2175: note = Description of Artificial Sequence: Synthetic coding sequence
  source 1..2175: mol_type = other DNA
atggactgcctgtgcatcgtgaccaccaagaagtacagataccaggacgaggacaccccccccctggagcacagccccgcccacctgcccaaccaggccaacagcccccccgtgatcgtgaacaccgacaccctggaggcccccggctacgtgctgcaggtgaacggcaccgagggcgagatggagtacgaggagatcaccctggagagaggcaacagcggcctgggcttcagcatcgccggcggcaccgacaacccccacatcggcgacgaccccagcatcttcatcaccaagatcatccccggcggcgccgccgcccaggacggcagactgagagtgaacgacagcatcctgttcgtgaacgaggtggacgtgagagaggtgacccacagcgccgccgtggaggccctgaaggaggccggcagcatcgtgagactgtacgtgatgagaagaaagccccccgccgagaaggtgatggagatcaagctgatcaagggccccaagggcctgggcttcagcatcgccggcggcgtgggcaaccagcacatccccggcgacaacagcatctacgtgaccaagatcatcgagggcggcgccgcccacaaggacggcagactgcagatcggcgacaagatcctggccgtgaacagcgtgggcctggaggacgtgatgcacgaggacgccgtggccgccctgaagaacacctacgacgtggtgtacctgaaggtggccaagcccagcaacgcctacctgagcgacagctacgccccccccgacatcaccaccagctacagccagcacctggacaacgagatcagccacagcagctacctgggcaccgactaccccaccgccatgacccccaccagccccagaagatacagccccgtggccaaggacctgctgggcgaggaggacatccccagagagcccagaagaatcgtgatccacagaggcagcaccggcctgggcttcaacatcgtgggcggcgaggacggcgagggcatcttcatcagcttcatcctggccggcggccccgccgacctgagcggcgagctgagaaagggcgaccagatcctgagcgtgaacggcgtggacctgagaaacgccagccacgagcaggccgccatcgccctgaagaacgccggccagaccgtgaccatcatcgcccagtacaagcccgaggagtacagcagattcgaggccaagatccacgacctgagagagcagctgatgaacagcagcctgggcagcggcaccgccagcctgagaagcaaccccaagagaggcttctacatcagagccctgttcgactacgacaagaccaaggactgcggcttcctgagccaggccctgagcttcagattcggcgacgtgctgcacgtgatcgacgccagcgacgaggagtggtggcaggccagaagagtgcacagcgacagcgagaccgacgacatcggcttcatccccagcaagagaagagtggagagaagagagtggagcagactgaaggccaaggactggggcagcagcagcggcagccagggcagagaggacagcgtgctgagctacgagaccgtgacccagatggaggtgcactacgccagacccatcatcatcctgggccccaccaaggacagagccaacgacgacctgctgagcgagttccccgacaagttcggcagctgcgtgccccacaccaccagacccaagagagagtacgagatcgacggcagagactaccacttcgtgagcagcagagagaagatggagaaggacatccaggcccacaagttcatcgaggccggccagtacaacagccacctgtacggcaccagcgtgcagagcgtgagagaggtggccgagcagggcaagcactgcatcctggacgtgagcgccaacgccgtgagaagactgcaggccgcccacctgcaccccatcgccatcttcatcagacccagaagcctggagaacgtgctggagatcaacaagagaatcaccgaggagcaggccagaaaggccttcgacagagccaccaagctggagcaggagttcaccgagtgcttcagcgccatcgtggagggcgacagcttcgaggagatctaccacaaggtgaagagagtgatcgaggacctgagcggcccctacatctgggtgcccgccagagagagactgtag

SEQ ID NO: 79393 - DNA, 2304 bp, synthetic construct
  misc_feature 1..2304: note = Description of Artificial Sequence: Synthetic coding sequence
  source 1..2304: mol_type = other DNA
atgagccagagacccagagcccccagaagcgccctgtggctgctggccccccccctgctgagatgggccccccccctgctgaccgtgctgcacagcgacctgttccaggccctgctggacatcctggactactacgaggccagcctgagcgagagccagaagtacagataccaggacgaggacaccccccccctggagcacagccccgcccacctgcccaaccaggccaacagcccccccgtgatcgtgaacaccgacaccctggaggcccccggctacgtgctgcaggtgaacggcaccgagggcgagatggagtacgaggagatcaccctggagagaggcaacagcggcctgggcttcagcatcgccggcggcaccgacaacccccacatcggcgacgaccccagcatcttcatcaccaagatcatccccggcggcgccgccgcccaggacggcagactgagagtgaacgacagcatcctgttcgtgaacgaggtggacgtgagagaggtgacccacagcgccgccgtggaggccctgaaggaggccggcagcatcgtgagactgtacgtgatgagaagaaagccccccgccgagaaggtgatggagatcaagctgatcaagggccccaagggcctgggcttcagcatcgccggcggcgtgggcaaccagcacatccccggcgacaacagcatctacgtgaccaagatcatcgagggcggcgccgcccacaaggacggcagactgcagatcggcgacaagatcctggccgtgaacagcgtgggcctggaggacgtgatgcacgaggacgccgtggccgccctgaagaacacctacgacgtggtgtacctgaaggtggccaagcccagcaacgcctacctgagcgacagctacgccccccccgacatcaccaccagctacagccagcacctggacaacgagatcagccacagcagctacctgggcaccgactaccccaccgccatgacccccaccagccccagaagatacagccccgtggccaaggacctgctgggcgaggaggacatccccagagagcccagaagaatcgtgatccacagaggcagcaccggcctgggcttcaacatcgtgggcggcgaggacggcgagggcatcttcatcagcttcatcctggccggcggccccgccgacctgagcggcgagctgagaaagggcgaccagatcctgagcgtgaacggcgtggacctgagaaacgccagccacgagcaggccgccatcgccctgaagaacgccggccagaccgtgaccatcatcgcccagtacaagcccgaggagtacagcagattcgaggccaagatccacgacctgagagagcagctgatgaacagcagcctgggcagcggcaccgccagcctgagaagcaaccccaagagaggcttctacatcagagccctgttcgactacgacaagaccaaggactgcggcttcctgagccaggccctgagcttcagattcggcgacgtgctgcacgtgatcgacgccagcgacgaggagtggtggcaggccagaagagtgcacagcgacagcgagaccgacgacatcggcttcatccccagcaagagaagagtggagagaagagagtggagcagactgaaggccaaggactggggcagcagcagcggcagccagggcagagaggacagcgtgctgagctacgagaccgtgacccagatggaggtgcactacgccagacccatcatcatcctgggccccaccaaggacagagccaacgacgacctgctgagcgagttccccgacaagttcggcagctgcgtgccccacaccaccagacccaagagagagtacgagatcgacggcagagactaccacttcgtgagcagcagagagaagatggagaaggacatccaggcccacaagttcatcgaggccggccagtacaacagccacctgtacggcaccagcgtgcagagcgtgagagaggtggccgagcagggcaagcactgcatcctggacgtgagcgccaacgccgtgagaagactgcaggccgcccacctgcaccccatcgccatcttcatcagacccagaagcctggagaacgtgctggagatcaacaagagaatcaccgaggagcaggccagaaaggccttcgacagagccaccaagctggagcaggagttcaccgagtgcttcagcgccatcgtggagggcgacagcttcgaggagatctaccacaaggtgaagagagtgatcgaggacctgagcggcccctacatctgggtgcccgccagagagagactgtag

SEQ ID NO: 79394 - DNA, 2004 bp, synthetic construct
  misc_feature 1..2004: note = Description of Artificial Sequence: Synthetic coding sequence
  source 1..2004: mol_type = other DNA
atgagccagagacccagagcccccagaagcgccctgtggctgctggccccccccctgctgagatgggccccccccctgctgaccgtgctgcacagcgacctgttccaggccctgctggacatcctggactactacgaggccagcctgagcgagagccagaagtacagataccaggacgaggacaccccccccctggagcacagccccgcccacctgcccaaccaggccaacagcccccccgtgatcgtgaacaccgacaccctggaggcccccggctacgagctgcaggtgaacggcaccgagggcgagatggagtacgaggagatcaccctggagagaggcaacagcggcctgggcttcagcatcgccggcggcaccgacaacccccacatcggcgacgaccccagcatcttcatcaccaagatcatccccggcggcgccgccgcccaggacggcagactgagagtgaacgacagcatcctgttcgtgaacgaggtggacgtgagagaggtgacccacagcgccgccgtggaggccctgaaggaggccggcagcatcgtgagactgtacgtgatgagaagaaagccccccgccgagaaggtgatggagatcaagctgatcaagggccccaagggcctgggcttcagcatcgccggcggcgtgggcaaccagcacatccccggcgacaacagcatctacgtgaccaagatcatcgagggcggcgccgcccacaaggacggcagactgcagatcggcgacaagatcctggccgtgaacagcgtgggcctggaggacgtgatgcacgaggacgccgtggccgccctgaagaacacctacgacgtggtgtacctgaaggtggccaagcccagcaacgcctacctgagcgacagctacgccccccccgacatcaccaccagctacagccagcacctggacaacgagatcagccacagcagctacctgggcaccgactaccccaccgccatgacccccaccagccccagaagatacagccccgtggccaaggacctgctgggcgaggaggacatccccagagagcccagaagaatcgtgatccacagaggcagcaccggcctgggcttcaacatcgtgggcggcgaggacggcgagggcatcttcatcagcttcatcctggccggcggccccgccgacctgagcggcgagctgagaaagggcgaccagatcctgagcgtgaacggcgtggacctgagaaacgccagccacgagcaggccgccatcgccctgaagaacgccggccagaccgtgaccatcatcgcccagtacaagcccgaggagtacagcagattcgaggccaagatccacgacctgagagagcagctgatgaacagcagcctgggcagcggcaccgccagcctgagaagcaaccccaagagaggcttctacatcagagccctgttcgactacgacaagaccaaggactgcggcttcctgagccaggccctgagcttcagattcggcgacgtgctgcacgtgatcgacgccagcgacgaggagtggtggcaggccagaagagtgcacagcgacagcgagaccgacgacatcggcttcatccccagcaagagaagagtggagagaagagagtggagcagactgaaggccaaggactggggcagcagcagcggcagccagggcagagaggacagcgtgctgagctacgagaccgtgacccagatggaggtgcactacgccagacccatcatcatcctgggccccaccaaggacagagccaacgacgacctgctgagcgagttccccgacaagttcggcagctgcgtgccccacaccaccagacccaagagagagtacgagatcgacggcagagactaccacttcgtgagcagcagagagaagatggagaaggacatccaggcccacaagttcatcgaggccggccagtacaacagccacctgtacggcaccagcgtgcagagcgtgagagaggtggccgagcagagagactag

SEQ ID NO: 79395 - DNA, 4740 bp, synthetic construct
  misc_feature 1..4740: note = Description of Artificial Sequence: Synthetic coding sequence
  source 1..4740: mol_type = other DNA
atggagccccagagaagagagctgctggcccagtgccagcagagcctggcccaggccatgaccgaggtggaggccgtgctgggcctgctggaggccgccggcgccctgagccccggcgagagaagacagctggacgaggaggccggcggcgccaaggccgagctgctgctgaagctgctgctggccaaggagagagaccacttccaggacctgagagccgccctggagaagacccagccccacctgctgcccatcctgtacctgaacggcgtggtgggccccccccagcccgccgagggcgccggcagcacctacagcgtgctgagcaccatgcccagcgacagcgagagcagcagcagcctgagcagcgtgggcaccaccggcaaggcccccagccccccccccctgctgaccgaccagcaggtgaacgagaaggtggagaacctgagcatccagctgagactgatgaccagagagagaaacgagctgagaaagagactggccttcgccacccacggcaccgccttcgacaagagaccctaccacagactgaaccccgactacgagagactgaagatccagtgcgtgagagccatgagcgacctgcagagcctgcagaaccagcacaccaacgccctgaagagatgcgaggaggtggccaaggagaccgacttctaccacaccctgcacagcagactgctgagcgaccagaccagactgaaggacgacgtggacatgctgagaagagagaacggccagctgctgagagagagaaacctgctgcagcagagctgggaggacatgaagagactgcacgaggaggaccagaaggagatcggcgacctgagagcccagcagcagcaggtgctgaagcacaacggcagcagcgagatcctgaacaagctgtacgacaccgccatggacaagctggaggtggtgaagaaggactacgacgccctgagaaagagatacagcgagaaggtggccatccacaacgccgacctgagcagactggagcagctgggcgaggagaaccagagactgctgaagcagaccgagatgctgacccagcagagagacaccgccatccagctgcagcaccagtgcgccctgagcctgagaagattcgaggccatccaccacgagctgaacaaggccaccgcccagaacaaggacctgcagtgggagatggagctgctgcagagcgagctgaccgagctgagaaccacccaggtgaagaccgccaaggagagcgagaagtacagagaggagagagacgccgtgtacagcgagtacaagctgatcatgagcgagagagaccaggtgatcagcgagctggacaagctgcagaccgaggtggagctggccgagagcaagctgaagagcagcaccagcgagaagaaggccgccaacgaggagatggaggccctgagacagatcaaggacaccgtgaccatggacgccggcagagccaacaaggaggtggagatcctgagaaagcagtgcaaggccctgtgccaggagctgaaggaggccctgcaggaggccgacgtggccaagtgcagaagagactgggccttccaggagagagacaagatcgtggccgagagagacagcatcagaaccctgtgcgacaacctgagaagagagagagacagagccgtgagcgagctggccgaggccctgagaagcctggacgacaccagaaagcagaagaacgacgtgagcagagagctgaaggagctgaaggagcagatggagagccagctggagaaggaggccagattcagacagctgatggcccacagcagccacgacagcgccatcgacaccgacagcatggagtgggagaccgaggtggtggagttcgagagagagaccgaggacatcgacctgaaggccctgggcttcgacatggccgagggcgtgaacgagccctgcttccccggcgactgcggcatcttcgtgaccaaggtggacaagggcagcatcgccgacggcagactgagagtgaacgactggctgctgagaatcaacgacgtggacctgatcaacaaggacaagaagcaggccatcaaggccctgctgaacggcgagggcgccatcaacatggtggtgagaagaagaaagagcctgggcggcaaggtggtgacccccctgcacatcaacctgagcggccagaaggacagcggcatcagcctggagaacggcgtgtacgccgccgccgtgctgcccggcagccccgccgccaaggagggcagcctggccgtgggcgacagaatcgtggccatcaacggcatcgccctggacaacaagagcctgaacgagtgcgagagcctgctgagaagctgccaggacagcctgaccctgagcctgctgaaggagcagaagtgcgtgcccgccagcggcgagctgagccccgagctgcaggagtgggccccctacagccccggccacagcagcagacacagcaacccccccctgtaccccagcagacccagcgtgggcaccgtgcccagaagcctgacccccagcaccaccgtgagcagcatcctgagaaaccccatctacaccgtgagaagccacagagtgggcccctgcagcagcccccccgccgccagagacgccggcccccagggcctgcaccccagcgtgcagcaccagggcagactgagcctggacctgagccacagaacctgcagcgactacagcgagatgagagccacccacggcagcaacagcctgcccagcagcgccagactgggcagcagcagcaacctgcagttcaaggccgagagaatcaagatccccagcacccccagataccccagaagcgtggtgggcagcgagagaggcagcgtgagccacagcgagtgcagcacccccccccagagccccctgaacatcgacaccctgagcagctgcagccagagccagaccagcgccagcaccctgcccagaatcgccgtgaaccccgccagcctgggcgagagaagaaaggacagaccctacgtggaggagcccagacacgtgaaggtgcagaagggcagcgagcccctgggcatcagcatcgtgagcggcgagaagggcggcatctacgtgagcaaggtgaccgtgggcagcatcgcccaccaggccggcctggagtacggcgaccagctgctggagttcaacggcatcaacctgagaagcgccaccgagcagcaggccagactgatcatcggccagcagtgcgacaccatcaccatcctggcccagtacaacccccacgtgcaccagctgagcagccacagcagaagcagcagccacctggaccccgccggcacccacagcaccctgcagggcagcggcaccaccacccccgagcaccccagcgtgatcgaccccctgatggagcaggacgagggccccagcaccccccccgccaagcagagcagcagcagaatcgccggcgacgccaacaagaagaccctggagcccagagtggtgttcatcaagaagagccagctggagctgggcgtgcacctgtgcggcggcaacctgcacggcgtgttcgtggccgaggtggaggacgacagccccgccaagggccccgacggcctggtgcccggcgacctgatcctggagtacggcagcctggacgtgagaaacaagaccgtggaggaggtgtacgtggagatgctgaagcccagagacggcgtgagactgaaggtgcagtacagacccgaggagttcaccaaggccaagggcctgcccggcgacagcttctacatcagagccctgtacgacagactggccgacgtggagcaggagctgagcttcaagaaggacgacatcctgtacgtggacgacaccctgccccagggcaccttcggcagctggatggcctggcagctggacgagaacgcccagaagatccagagaggccagatccccagcaagtacgtgatggaccaggagttcagcagaagactgagcatgagcgaggtgaaggacgacaacagcgccaccaagaccctgagcgccgccgccagaagaagcttcttcagaagaaagcacaagcacaagagaagcggcagcaaggacggcaaggacctgctggccctggacgccttcagcagcgacagcatccccctgttcgaggacagcgtgagcctggcctaccagagagtgcagaaggtggactgcaccgccctgagacccgtgctgatcctgggccccctgctggacgtggtgaaggagatgctggtgaacgaggcccccggcaagttctgcagatgccccctggaggtgatgaaggccagccagcaggccatcgagagaggcgtgaaggactgcctgttcgtggactacaagagaagaagcggccacttcgacgtgaccaccgtggccagcatcaaggagatcaccgagaagaacagacactgcctgctggacatcgccccccacgccatcgagagactgcaccacatgcacatctaccccatcgtgatcttcatccactacaagagcgccaagcacatcaaggagcagagagaccccatctacctgagagacaaggtgacccagagacacagcaaggagcagttcgaggccgcccagaagctggagcaggagtacagcagatacttcaccggcgtgatccagggcggcgccctgagcagcatctgcacccagatcctggccatggtgaaccaggagcagaacaaggtgctgtggatccccgcctgccccctgtag

SEQ ID NO: 79396 - DNA, 5760 bp, synthetic construct
  misc_feature 1..5760: note = Description of Artificial Sequence: Synthetic coding sequence
  source 1..5760: mol_type = other DNA
atggagccccagagaagagagctgctggcccagtgccagcagagcctggcccaggccatgaccgaggtggaggccgtgctgggcctgctggaggccgccggcgccctgagccccggcgagagaagacagctggacgaggaggccggcggcgccaaggccgagctgctgctgaagctgctgctggccaaggagagagaccacttccaggacctgagagccgccctggagaagacccagccccacctgctgcccatcctgtacctgaacggcgtggtgggccccccccagcccgccgagggcgccggcagcacctacagcgtgctgagcaccatgcccagcgacagcgagagcagcagcagcctgagcagcgtgggcaccaccggcaaggcccccagccccccccccctgctgaccgaccagcaggtgaacgagaaggtggagaacctgagcatccagctgagactgatgaccagagagagaaacgagctgagaaagagactggccttcgccacccacggcaccgccttcgacaagagaccctaccacagactgaaccccgactacgagagactgaagatccagtgcgtgagagccatgagcgacctgcagagcctgcagaaccagcacaccaacgccctgaagagatgcgaggaggtggccaaggagaccgacttctaccacaccctgcacagcagactgctgagcgaccagaccagactgaaggacgacgtggacatgctgagaagagagaacggccagctgctgagagagagaaacctgctgcagcagagctgggaggacatgaagagactgcacgaggaggaccagaaggagatcggcgacctgagagcccagcagcagcaggtgctgaagcacaacggcagcagcgagatcctgaacaagctgtacgacaccgccatggacaagctggaggtggtgaagaaggactacgacgccctgagaaagagatacagcgagaaggtggccatccacaacgccgacctgagcagactggagcagctgggcgaggagaaccagagactgctgaagcagaccgagatgctgacccagcagagagacaccgccatccagctgcagcaccagtgcgccctgagcctgagaagattcgaggccatccaccacgagctgaacaaggccaccgcccagaacaaggacctgcagtgggagatggagctgctgcagagcgagctgaccgagctgagaaccacccaggtgaagaccgccaaggagagcgagaagtacagagaggagagagacgccgtgtacagcgagtacaagctgatcatgagcgagagagaccaggtgatcagcgagctggacaagctgcagaccgaggtggagctggccgagagcaagctgaagagcagcaccagcgagaagaaggccgccaacgaggagatggaggccctgagacagatcaaggacaccgtgaccatggacgccggcagagccaacaaggaggtggagatcctgagaaagcagtgcaaggccctgtgccaggagctgaaggaggccctgcaggaggccgacgtggccaagtgcagaagagactgggccttccaggagagagacaagatcgtggccgagagagacagcatcagaaccctgtgcgacaacctgagaagagagagagacagagccgtgagcgagctggccgaggccctgagaagcctggacgacaccagaaagcagaagaacgacgtgagcagagagctgaaggagctgaaggagcagatggagagccagctggagaaggaggccagattcagacagctgatggcccacagcagccacgacagcgccatcgacaccgacagcatggagtgggagaccgaggtggtggagttcgagagagagaccgaggacatcgacctgaaggccctgggcttcgacatggccgagggcgtgaacgagccctgcttccccggcgactgcggcatcttcgtgaccaaggtggacaagggcagcatcgccgacggcagactgagagtgaacgactggctgctgagaatcaacgacgtggacctgatcaacaaggacaagaagcaggccatcaaggccctgctgaacggcgagggcgccatcaacatggtggtgagaagaagaaagagcctgggcggcaaggtggtgacccccctgcacatcaacctgagcggccagaaggacagcggcatcagcctggagaacggcgtgtacgccgccgccgtgctgcccggcagccccgccgccaaggagggcagcctggccgtgggcgacagaatcgtggccatcaacggcatcgccctggacaacaagagcctgaacgagtgcgagagcctgctgagaagctgccaggacagcctgaccctgagcctgctgaaggtgttcccccagagcagcagctggagcggccagaacatcttcgagaacatcaaggacagcgacaagatgctgagcttcagagcccacggccccgaggtgcaggcccacaacaagagaaacctgatccagcacaacaacagcacccagaccgacatcttctacaccgacagactggaggacagaaaggagcccggcccccccggcggcagcagcagcttcctgcacaagcccttccccggcggccccctgcaggtgtgcccccaggcctgccccagcgccagcgagagaagcctgagcagcttcagaagcgacgccagcggcgacagaggcttcggcctggtggacgtgagaggcagaagacccctgctgcccttcgagaccgaggtgggcccctgcggcgtgggcgaggccagcctggacaaggccgacagcgagggcagcaacagcggcggcacctggcccaaggccatgctgagcagcaccgccgtgcccgagaagctgagcgtgtacaagaagcccaagcagagaaagagcatcttcgaccccaacaccttcaagagaccccagaccccccccaagatcgactacctgctgcccggccccggccccgcccacagcccccagcccagcaagagagccggccccctgaccccccccaagccccccagaagaagcgacagcatcaagttccagcacagactggagaccagcagcgagagcgaggccaccctggtgggcagcagccccagcaccagcccccccagcgccctgccccccgacgtggaccccggcgagcccatgcacgccagcccccccagaaaggccagagtgagaatcgccagcagctactaccccgagggcgacggcgacagcagccacctgcccgccaagaagagctgcgacgaggacctgaccagccagaaggtggacgagctgggccagaagagaagaagacccaagagcgcccccagcttcagacccaagctggcccccgtggtgatccccgcccagttcctggaggagcagaagtgcgtgcccgccagcggcgagctgagccccgagctgcaggagtgggccccctacagccccggccacagcagcagacacagcaacccccccctgtaccccagcagacccagcgtgggcaccgtgcccagaagcctgacccccagcaccaccgtgagcagcatcctgagaaaccccatctacaccgtgagaagccacagagtgggcccctgcagcagcccccccgccgccagagacgccggcccccagggcctgcaccccagcgtgcagcaccagggcagactgagcctggacctgagccacagaacctgcagcgactacagcgagatgagagccacccacggcagcaacagcctgcccagcagcgccagactgggcagcagcagcaacctgcagttcaaggccgagagaatcaagatccccagcacccccagataccccagaagcgtggtgggcagcgagagaggcagcgtgagccacagcgagtgcagcacccccccccagagccccctgaacatcgacaccctgagcagctgcagccagagccagaccagcgccagcaccctgcccagaatcgccgtgaaccccgccagcctgggcgagagaagaaaggacagaccctacgtggaggagcccagacacgtgaaggtgcagaagggcagcgagcccctgggcatcagcatcgtgagcggcgagaagggcggcatctacgtgagcaaggtgaccgtgggcagcatcgcccaccaggccggcctggagtacggcgaccagctgctggagttcaacggcatcaacctgagaagcgccaccgagcagcaggccagactgatcatcggccagcagtgcgacaccatcaccatcctggcccagtacaacccccacgtgcaccagctgagcagccacagcagaagcagcagccacctggaccccgccggcacccacagcaccctgcagggcagcggcaccaccacccccgagcaccccagcgtgatcgaccccctgatggagcaggacgagggccccagcaccccccccgccaagcagagcagcagcagaatcgccggcgacgccaacaagaagaccctggagcccagagtggtgttcatcaagaagagccagctggagctgggcgtgcacctgtgcggcggcaacctgcacggcgtgttcgtggccgaggtggaggacgacagccccgccaagggccccgacggcctggtgcccggcgacctgatcctggagtacggcagcctggacgtgagaaacaagaccgtggaggaggtgtacgtggagatgctgaagcccagagacggcgtgagactgaaggtgcagtacagacccgaggagttcaccaaggccaagggcctgcccggcgacagcttctacatcagagccctgtacgacagactggccgacgtggagcaggagctgagcttcaagaaggacgacatcctgtacgtggacgacaccctgccccagggcaccttcggcagctggatggcctggcagctggacgagaacgcccagaagatccagagaggccagatccccagcaagtacgtgatggaccaggagttcagcagaagactgagcatgagcgaggtgaaggacgacaacagcgccaccaagaccctgagcgccgccgccagaagaagcttcttcagaagaaagcacaagcacaagagaagcggcagcaaggacggcaaggacctgctggccctggacgccttcagcagcgacagcatccccctgttcgaggacagcgtgagcctggcctaccagagagtgcagaaggtggactgcaccgccctgagacccgtgctgatcctgggccccctgctggacgtggtgaaggagatgctggtgaacgaggcccccggcaagttctgcagatgccccctggaggtgatgaaggccagccagcaggccatcgagagaggcgtgaaggactgcctgttcgtggactacaagagaagaagcggccacttcgacgtgaccaccgtggccagcatcaaggagatcaccgagaagaacagacactgcctgctggacatcgccccccacgccatcgagagactgcaccacatgcacatctaccccatcgtgatcttcatccactacaagagcgccaagcacatcaaggagcagagagaccccatctacctgagagacaaggtgacccagagacacagcaaggagcagttcgaggccgcccagaagctggagcaggagtacagcagatacttcaccggcgtgatccagggcggcgccctgagcagcatctgcacccagatcctggccatggtgaaccaggagcagaacaaggtgctgtggatccccgcctgccccctgtag

SEQ ID NO: 79397 - DNA, 2052 bp, synthetic construct
  misc_feature 1..2052: note = Description of Artificial Sequence: Synthetic coding sequence
  source 1..2052: mol_type = other DNA
atggagccccagagaagagagctgctggcccagtgccagcagagcctggcccaggccatgaccgaggtggaggccgtgctgggcctgctggaggccgccggcgccctgagccccggcgagagaagacagctggacgaggaggccggcggcgccaaggccgagctgctgctgaagctgctgctggccaaggagagagaccacttccaggacctgagagccgccctggagaagacccagccccacctgctgcccatcctgtacctgaacggcgtggtgggccccccccagcccgccgagggcgccggcagcacctacagcgtgctgagcaccatgcccagcgacagcgagagcagcagcagcctgagcagcgtgggcaccaccgtgaagcacctgagagagcagatggagagccagctggagaaggaggccagattcagacagctgatggcccacagcagccacgacagcgccatcgacaccgacagcatggagtgggagaccgaggtggtggagttcgagagagagaccgaggacatcgacctgaaggccctgggcttcgacatggccgagggcgtgaacgagccctgcttccccggcgactgcggcatcttcgtgaccaaggtggacaagggcagcatcgccgacggcagactgagagtgaacgactggctgctgagaatcaacgacgtggacctgatcaacaaggacaagaagcaggccatcaaggccctgctgaacggcgagggcgccatcaacatggtggtgagaagaagaaagagcctgggcggcaaggtggtgacccccctgcacatcaacctgagcggccagaaggacagcggcatcagcctggagaacggcgtgtacgccgccgccgtgctgcccggcagccccgccgccaaggagggcagcctggccgtgggcgacagaatcgtggccatcaacggcatcgccctggacaacaagagcctgaacgagtgcgagagcctgctgagaagctgccaggacagcctgaccctgagcctgctgaaggtgttcccccagagcagcagctggagcggccagaacatcttcgagaacatcaaggacagcgacaagatgctgagcttcagagcccacggccccgaggtgcaggcccacaacaagagaaacctgatccagcacaacaacagcacccagaccgacatcttctacaccgacagactggaggacagaaaggagcccggcccccccggcggcagcagcagcttcctgcacaagcccttccccggcggccccctgcaggtgtgcccccaggcctgccccagcgccagcgagagaagcctgagcagcttcagaagcgacgccagcggcgacagaggcttcggcctggtggacgtgagaggcagaagacccctgctgcccttcgagaccgaggtgggcccctgcggcgtgggcgaggccagcctggacaaggccgacagcgagggcagcaacagcggcggcacctggcccaaggccatgctgagcagcaccgccgtgcccgagaagctgagcgtgtacaagaagcccaagcagagaaagagcatcttcgaccccaacaccttcaagagaccccagaccccccccaagatcgactacctgctgcccggccccggccccgcccacagcccccagcccagcaagagagccggccccctgaccccccccaagccccccagaagaagcgacagcatcaagttccagcacagactggagaccagcagcgagagcgaggccaccctggtgggcagcagccccagcaccagcccccccagcgccctgccccccgacgtggaccccggcgagcccatgcacgccagcccccccagaaaggccagagtgagaatcgccagcagctactaccccgagggcgacggcgacagcagccacctgcccgccaagaagagctgcgacgaggacctgaccagccagaaggtggacgagctgggccagaagagaagaagacccaagagcgcccccagcttcagacccaagctggcccccgtggtgatccccgcccagttcctggagtag

SEQ ID NO: 79398 - DNA, 2643 bp, synthetic construct
  misc_feature 1..2643: note = Description of Artificial Sequence: Synthetic coding sequence
  source 1..2643: mol_type = other DNA
ggcgccatcaacatggtggtgagaagaagaaagagcctgggcggcaaggtggtgacccccctgcacatcaacctgagcggccagaaggacagcggcatcagcctggagaacggcgtgtacgccgccgccgtgctgcccggcagccccgccgccaaggagggcagcctggccgtgggcgacagaatcgtggccatcaacggcatcgccctggacaacaagagcctgaacgagtgcgagagcctgctgagaagctgccaggacagcctgaccctgagcctgctgaaggagcagaagtgcgtgcccgccagcggcgagctgagccccgagctgcaggagtgggccccctacagccccggccacagcagcagacacagcaacccccccctgtaccccagcagacccagcgtgggcaccgtgcccagaagcctgacccccagcaccaccgtgagcagcatcctgagaaaccccatctacaccgtgagaagccacagagtgggcccctgcagcagcccccccgccgccagagacgccggcccccagggcctgcaccccagcgtgcagcaccagggcagactgagcctggacctgagccacagaacctgcagcgactacagcgagatgagagccacccacggcagcaacagcctgcccagcagcgccagactgggcagcagcagcaacctgcagttcaaggccgagagaatcaagatccccagcacccccagataccccagaagcgtggtgggcagcgagagaggcagcgtgagccacagcgagtgcagcacccccccccagagccccctgaacatcgacaccctgagcagctgcagccagagccagaccagcgccagcaccctgcccagaatcgccgtgaaccccgccagcctgggcgagagaagaaaggacagaccctacgtggaggagcccagacacgtgaaggtgcagaagggcagcgagcccctgggcatcagcatcgtgagcggcgagaagggcggcatctacgtgagcaaggtgaccgtgggcagcatcgcccaccaggccggcctggagtacggcgaccagctgctggagttcaacggcatcaacctgagaagcgccaccgagcagcaggccagactgatcatcggccagcagtgcgacaccatcaccatcctggcccagtacaacccccacgtgcaccagctgagcagccacagcagaagcagcagccacctggaccccgccggcacccacagcaccctgcagggcagcggcaccaccacccccgagcaccccagcgtgatcgaccccctgatggagcaggacgagggccccagcaccccccccgccaagcagagcagcagcagaatcgccggcgacgccaacaagaagaccctggagcccagagtggtgttcatcaagaagagccagctggagctgggcgtgcacctgtgcggcggcaacctgcacggcgtgttcgtggccgaggtggaggacgacagccccgccaagggccccgacggcctggtgcccggcgacctgatcctggagtacggcagcctggacgtgagaaacaagaccgtggaggaggtgtacgtggagatgctgaagcccagagacggcgtgagactgaaggtgcagtacagacccgaggagttcaccaaggccaagggcctgcccggcgacagcttctacatcagagccctgtacgacagactggccgacgtggagcaggagctgagcttcaagaaggacgacatcctgtacgtggacgacaccctgccccagggcaccttcggcagctggatggcctggcagctggacgagaacgcccagaagatccagagaggccagatccccagcaagtacgtgatggaccaggagttcagcagaagactgagcatgagcgaggtgaaggacgacaacagcgccaccaagaccctgagcgccgccgccagaagaagcttcttcagaagaaagcacaagcacaagagaagcggcagcaaggacggcaaggacctgctggccctggacgccttcagcagcgacagcatccccctgttcgaggacagcgtgagcctggcctaccagagagtgcagaaggtggactgcaccgccctgagacccgtgctgatcctgggccccctgctggacgtggtgaaggagatgctggtgaacgaggcccccggcaagttctgcagatgccccctggaggtgatgaaggccagccagcaggccatcgagagaggcgtgaaggactgcctgttcgtggactacaagagaagaagcggccacttcgacgtgaccaccgtggccagcatcaaggagatcaccgagaagaacagacactgcctgctggacatcgccccccacgccatcgagagactgcaccacatgcacatctaccccatcgtgatcttcatccactacaagagcgccaagcacatcaaggagcagagagaccccatctacctgagagacaaggtgacccagagacacagcaaggagcagttcgaggccgcccagaagctggagcaggagtacagcagatacttcaccggcgtgatccagggcggcgccctgagcagcatctgcacccagatcctggccatggtgaaccaggagcagaacaaggtgctgtggatccccgcctgccccctgtag

SEQ ID NO: 79399 - DNA, 3237 bp, synthetic construct
  misc_feature 1..3237: note = Description of Artificial Sequence: Synthetic coding sequence
  source 1..3237: mol_type = other DNA
atggcccccagaaagagaggcggcagaggcatcagcttcatcttctgctgcttcagaaacaacgaccaccccgagatcacctacagactgagaaacgacagcaacttcgccctgcagaccatggagcccgccctgcccatgccccccgtggaggagctggacgtgatgttcagcgagctggtggacgagctggacctgaccgacaagcacagagaggccatgttcgccctgcccgccgagaagaagtggcagatctactgcagcaagaagaaggaccaggaggagaacaagggcgccaccagctggcccgagttctacatcgaccagctgaacagcatggccgccagaaagagcctgctggccctggagaaggaggaggaggaggagagaagcaagaccatcgagagcctgaagaccgccctgagaaccaagcccatgagattcgtgaccagattcatcgacctggacggcctgagctgcatcctgaacttcctgaagaccatggactacgagaccagcgagagcagaatccacaccagcctgatcggctgcatcaaggccctgatgaacaacagccagggcagagcccacgtgctggcccacagcgagagcatcaacgtgatcgcccagagcctgagcaccgagaacatcaagaccaaggtggccgtgctggagatcctgggcgccgtgtgcctggtgcccggcggccacaagaaggtgctgcaggccatgctgcactaccagaagtacgccagcgagagaaccagattccagaccctgatcaacgacctggacaagagcaccggcagatacagagacgaggtgagcctgaagaccgccatcatgagcttcatcaacgccgtgctgagccagggcgccggcgtggagagcctggacttcagactgcacctgagatacgagttcctgatgctgggcatccagcccgtgatcgacaagctgagagagcacgagaacagcaccctggacagacacctggacttcttcgagatgctgagaaacgaggacgagctggagttcgccaagagattcgagctggtgcacatcgacaccaagagcgccacccagatgttcgagctgaccagaaagagactgacccacagcgaggcctacccccacttcatgagcatcctgcaccactgcctgcagatgccctacaagagaagcggcaacaccgtgcagtactggctgctgctggacagaatcatccagcagatcgtgatccagaacgacaagggccaggaccccgacagcacccccctggagaacttcaacatcaagaacgtggtgagaatgctggtgaacgagaacgaggtgaagcagtggaaggagcaggccgagaagatgagaaaggagcacaacgagctgcagcagaagctggagaagaaggagagagagtgcgacgccaagacccaggagaaggaggagatgatgcagaccctgaacaagatgaaggagaagctggagaaggagaccaccgagcacaagcaggtgaagcagcaggtggccgacctgaccgcccagctgcacgagctgagcagaagagccgtgtgcgccagcatccccggcggccccagccccggcgcccccggcggccccttccccagcagcgtgcccggcagcctgctgcccccccccccccccccccccctgcccggcggcatgctgccccccccccccccccccctgccccccggcggccccccccccccccccggccccccccccctgggcgccatcatgcccccccccggcgcccccatgggcctggccctgaagaagaagagcatcccccagcccaccaacgccctgaagagcttcaactggagcaagctgcccgagaacaagctggagggcaccgtgtggaccgagatcgacgacaccaaggtgttcaagatcctggacctggaggacctggagagaaccttcagcgcctaccagagacagcaggacttcttcgtgaacagcaacagcaagcagaaggaggccgacgccatcgacgacaccctgagcagcaagctgaaggtgaaggagctgagcgtgatcgacggcagaagagcccagaactgcaacatcctgctgagcagactgaagctgagcaacgacgagatcaagagagccatcctgaccatggacgagcaggaggacctgcccaaggacatgctggagcagctgctgaagttcgtgcccgagaagagcgacatcgacctgctggaggagcacaagcacgagctggacagaatggccaaggccgacagattcctgttcgagatgagcagaatcaaccactaccagcagagactgcagagcctgtacttcaagaagaagttcgccgagagagtggccgaggtgaagcccaaggtggaggccatcagaagcggcagcgaggaggtgttcagaagcggcgccctgaagcagctgctggaggtggtgctggccttcggcaactacatgaacaagggccagagaggcaacgcctacggcttcaagatcagcagcctgaacaagatcgccgacaccaagagcagcatcgacaagaacatcaccctgctgcactacctgatcaccatcgtggagaacaagtaccccagcgtgctgaacctgaacgaggagctgagagacatcccccaggccgccaaggtgaacatgaccgagctggacaaggagatcagcaccctgagaagcggcctgaaggccgtggagaccgagctggagtaccagaagagccagcccccccagcccggcgacaagttcgtgagcgtggtgagccagttcatcaccgtggccagcttcagcttcagcgacgtggaggacctgctggccgaggccaaggacctgttcaccaaggccgtgaagcacttcggcgaggaggccggcaagatccagcccgacgagttcttcggcatcttcgaccagttcctgcaggccgtgagcgaggccaagcaggagaacgagaacatgagaaagaagaaggaggaggaggagagaagagccagaatggaggcccagctgaaggagcagagagagagagagagaaagatgagaaaggccaaggagaacagcgaggagagcggcgagttcgacgacctggtgagcgccctgagaagcggcgaggtgttcgacaaggacctgagcaagctgaagagaaacagaaagagaatcaccaaccagatgaccgacagcagcagagagagacccatcaccaagctgaacttctag

SEQ ID NO: 79400 - DNA, 2649 bp, synthetic construct
  misc_feature 1..2649: note = Description of Artificial Sequence: Synthetic coding sequence
  source 1..2649: mol_type = other DNA
atggcccccagaaagagaggcggcagaggcatcagcttcatcttctgctgcttcagaaacaacgaccaccccgagatcacctacagactgagaaacgacagcaacttcgccctgcagaccatggagcccgccctgcccatgccccccgtggaggagctggacgtgatgttcagcgagctggtggacgagctggacctgaccgacaagcacagagaggccatgttcgccctgcccgccgagaagaagtggcagatctactgcagcaagaagaaggaccaggaggagaacaagggcgccaccagctggcccgagttctacatcgaccagctgaacagcatggccgccagaaagagcctgctggccctggagaaggaggaggaggaggagagaagcaagaccatcgagagcctgaagaccgccctgagaaccaagcccatgagattcgtgaccagattcatcgacctggacggcctgagctgcatcctgaacttcctgaagaccatggactacgagaccagcgagagcagaatccacaccagcctgatcggctgcatcaaggccctgatgaacaacagccagggcagagcccacgtgctggcccacagcgagagcatcaacgtgatcgcccagagcctgagcaccgagaacatcaagaccaaggtggccgtgctggagatcctgggcgccgtgtgcctggtgcccggcggccacaagaaggtgctgcaggccatgctgcactaccagaagtacgccagcgagagaaccagattccagaccctgatcaacgacctggacaagagcaccggcagatacagagacgaggtgagcctgaagaccgccatcatgagcttcatcaacgccgtgctgagccagggcgccggcgtggagagcctggacttcagactgcacctgagatacgagttcctgatgctgggcatccagcccgtgatcgacaagctgagagagcacgagaacagcaccctggacagacacctggacttcttcgagatgctgagaaacgaggacgagctggagttcgccaagagattcgagctggtgcacatcgacaccaagagcgccacccagatgttcgagctgaccagaaagagactgacccacagcgaggcctacccccacttcatgagcatcctgcaccactgcctgcagatgccctacaagagaagcggcaacaccgtgcagtactggctgctgctggacagaatcatccagcagatcgtgatccagaacgacaagggccaggaccccgacagcacccccctggagaacttcaacatcaagaacgtggtgagaatgctggtgaacgagaacgaggtgaagcagtggaaggagcaggccgagaagatgagaaaggagcacaacgagctgcagcagaagctggagaagaaggagagagagtgcgacgccaagacccaggagaaggaggagatgatgcagaccctgaacaagatgaaggagaagctggagaaggagaccaccgagcacaagcaggtgaagcagcaggtggccgacctgaccgcccagctgcacgagctgagcagaagagccgtgtgcgccagcatccccggcggccccagccccggcgcccccggcggccccttccccagcagcgtgcccggcagcctgctgcccccccccccccccccccccctgcccggcggcatgctgccccccccccccccccccctgccccccggcggccccccccccccccccggccccccccccctgggcgccatcatgcccccccccggcgcccccatgggcctggccctgaagaagaagagcatcccccagcccaccaacgccctgaagagcttcaactggagcaagctgcccgagaacaagctggagggcaccgtgtggaccgagatcgacgacaccaaggtgttcaagatcctggacctggaggacctggagagaaccttcagcgcctaccagagacagcaggacttcttcgtgaacagcaacagcaagcagaaggaggccgacgccatcgacgacaccctgagcagcaagctgaaggtgaaggagctgagcgtgatcgacggcagaagagcccagaactgcaacatcctgctgagcagactgaagctgagcaacgacgagatcaagagagccatcctgaccatggacgagcaggaggacctgcccaaggacatgctggagcagctgctgaagttcgtgcccgagaagagcgacatcgacctgctggaggagcacaagcacgagctggacagaatggccaaggccgacagattcctgttcgagatgagcagaatcaaccactaccagcagagactgcagagcctgtacttcaagaagaagttcgccgagagagtggccttcggcaactacatgaacaagggccagagaggcaacgcctacggcttcaagatcagcagcctgaacaagatcgccgacaccaagagcagcatcgacaagaacatcaccctgctgcactacctgatcaccatcgtggagaacaagtaccccagcgtgctgaacctgaacgaggagctgagagacatcccccaggccgccaaggtgaagagctggaacatcagaagcctgagcccccacagccccgagatcagcctgtgcctgctgagcgccagcagcagccagtag

SEQ ID NO: 79401 - DNA, 3207 bp, synthetic construct
  misc_feature 1..3207: note = Description of Artificial Sequence: Synthetic coding sequence
  source 1..3207: mol_type = other DNA
atggcccccagaaagagaggcggcagaggcatcagcttcatcttctgctgcttcagaaacaacgaccaccccgagatcacctacagactgagaaacgacagcaacttcgccctgcagaccatggagcccgccctgcccatgccccccgtggaggagctggacgtgatgttcagcgagctggtggacgagctggacctgaccgacaagcacagagaggccatgttcgccctgcccgccgagaagaagtggcagatctactgcagcaagaagaaggaccaggaggagaacaagggcgccaccagctggcccgagttctacatcgaccagctgaacagcatggccgccagaaagagcctgctggccctggagaaggaggaggaggaggagagaagcaagaccatcgagagcctgaagaccgccctgagaaccaagcccatgagattcgtgaccagattcatcgacctggacggcctgagctgcatcctgaacttcctgaagaccatggactacgagaccagcgagagcagaatccacaccagcctgatcggctgcatcaaggccctgatgaacaacagccagggcagagcccacgtgctggcccacagcgagagcatcaacgtgatcgcccagagcctgagcaccgagaacatcaagaccaaggtggccgtgctggagatcctgggcgccgtgtgcctggtgcccggcggccacaagaaggtgctgcaggccatgctgcactaccagaagtacgccagcgagagaaccagattccagaccctgatcaacgacctggacaagagcaccggcagatacagagacgaggtgagcctgaagaccgccatcatgagcttcatcaacgccgtgctgagccagggcgccggcgtggagagcctggacttcagactgcacctgagatacgagttcctgatgctgggcatccagcccgtgatcgacaagctgagagagcacgagaacagcaccctggacagacacctggacttcttcgagatgctgagaaacgaggacgagctggagttcgccaagagattcgagctggtgcacatcgacaccaagagcgccacccagatgttcgagctgaccagaaagagactgacccacagcgaggcctacccccacttcatgagcatcctgcaccactgcctgcagatgccctacaagagaagcggcaacaccgtgcagtactggctgctgctggacagaatcatccagcagatcgtgatccagaacgacaagggccaggaccccgacagcacccccctggagaacttcaacatcaagaacgtggtgagaatgctggtgaacgagaacgaggtgaagcagtggaaggagcaggccgagaagatgagaaaggagcacaacgagctgcagcagaagctggagaagaaggagagagagtgcgacgccaagacccaggagaaggaggagatgatgcagaccctgaacaagatgaaggagaagctggagaaggagaccaccgagcacaagcaggtgaagcagcaggtggccgacctgaccgcccagctgcacgagctgagcagaagagccgtgtgcgccagcatccccggcggccccagccccggcgcccccggcggccccttccccagcagcgtgcccggcagcctgctgcccccccccccccccccccccctgcccggcggcatgctgccccccccccccccccccctgccccccggcggccccccccccccccccggccccccccccctgggcgccatcatgcccccccccggcgcccccatgggcctggccctgaagaagaagagcatcccccagcccaccaacgccctgaagagcttcaactggagcaagctgcccgagaacaagctggagggcaccgtgtggaccgagatcgacgacaccaaggtgttcaagatcctggacctggaggacctggagagaaccttcagcgcctaccagagacagcagaaggaggccgacgccatcgacgacaccctgagcagcaagctgaaggtgaaggagctgagcgtgatcgacggcagaagagcccagaactgcaacatcctgctgagcagactgaagctgagcaacgacgagatcaagagagccatcctgaccatggacgagcaggaggacctgcccaaggacatgctggagcagctgctgaagttcgtgcccgagaagagcgacatcgacctgctggaggagcacaagcacgagctggacagaatggccaaggccgacagattcctgttcgagatgagcagaatcaaccactaccagcagagactgcagagcctgtacttcaagaagaagttcgccgagagagtggccgaggtgaagcccaaggtggaggccatcagaagcggcagcgaggaggtgttcagaagcggcgccctgaagcagctgctggaggtggtgctggccttcggcaactacatgaacaagggccagagaggcaacgcctacggcttcaagatcagcagcctgaacaagatcgccgacaccaagagcagcatcgacaagaacatcaccctgctgcactacctgatcaccatcgtggagaacaagtaccccagcgtgctgaacctgaacgaggagctgagagacatcccccaggccgccaaggtgaacatgaccgagctggacaaggagatcagcaccctgagaagcggcctgaaggccgtggagaccgagctggagtaccagaagagccagcccccccagcccggcgacaagttcgtgagcgtggtgagccagttcatcaccgtggccagcttcagcttcagcgacgtggaggacctgctggccgaggccaaggacctgttcaccaaggccgtgaagcacttcggcgaggaggccggcaagatccagcccgacgagttcttcggcatcttcgaccagttcctgcaggccgtgagcgaggccaagcaggagaacgagaacatgagaaagaagaaggaggaggaggagagaagagccagaatggaggcccagctgaaggagcagagagagagagagagaaagatgagaaaggccaaggagaacagcgaggagagcggcgagttcgacgacctggtgagcgccctgagaagcggcgaggtgttcgacaaggacctgagcaagctgaagagaaacagaaagagaatcaccaaccagatgaccgacagcagcagagagagacccatcaccaagctgaacttctag

SEQ ID NO: 79402 - DNA, 3237 bp, synthetic construct; identical to SEQ ID NO: 79399
  misc_feature 1..3237: note = Description of Artificial Sequence: Synthetic coding sequence
  source 1..3237: mol_type = other DNA

SEQ ID NO: 79403 - DNA, 3207 bp, synthetic construct
  misc_feature 1..3207: note = Description of Artificial Sequence: Synthetic coding sequence
  source 1..3207: mol_type = other DNA
atggcccccagaaagagaagccaccacggcctgggcttcctgtgctgcttcggcggcagcgacatccccgagatcaacctgagagacaaccaccccctgcagttcatggagttcagcagccccatccccaacgccgaggagctgaacatcagattcgccgagctggtggacgagctggacctgaccgacaagaacagagaggccatgttcgccctgccccccgagaagaagtggcagatctactgcagcaagaagaaggagcaggaggaccccaacaagctggccaccagctggcccgactactacatcgacagaatcaacagcatggccgccatgcagagcctgtacgccttcgacgaggaggagaccgagatgagaaaccaggtggtggaggacctgaagaccgccctgagaacccagcccatgagattcgtgaccagattcatcgagctggagggcctgacctgcctgctgaacttcctgagaagcatggaccacgccacctgcgagagcagaatccacaccagcctgatcggctgcatcaaggccctgatgaacaacagccagggcagagcccacgtgctggcccagcccgaggccatcagcaccatcgcccagagcctgagaaccgagaacagcaagaccaaggtggccgtgctggagatcctgggcgccgtgtgcctggtgcccggcggccacaagaaggtgctgcaggccatgctgcactaccaggtgtacgccgccgagagaaccagattccagaccctgctgaacgagctggacagaagcctgggcagatacagagacgaggtgaacctgaagaccgccatcatgagcttcatcaacgccgtgctgaacgccggcgccggcgaggacaacctggagttcagactgcacctgagatacgagttcctgatgctgggcatccagcccgtgatcgacaagctgagacagcacgagaacgccatcctggacaagcacctggacttcttcgagatggtgagaaacgaggacgacctggagctggccagaagattcgacatggtgcacatcgacaccaagagcgccagccagatgttcgagctgatccacaagaagctgaagtacaccgaggcctacccctgcctgctgagcgtgctgcaccactgcctgcagatgccctacaagagaaacggcggctacttccagcagtggcagctgctggacagaatcctgcagcagatcgtgctgcaggacgagagaggcgtggaccccgacctggcccccctggagaacttcaacgtgaagaacatcgtgaacatgctgatcaacgagaacgaggtgaagcagtggagagaccaggccgagaagttcagaaaggagcacatggagctggtgagcagactggagagaaaggagagagagtgcgagaccaagaccctggagaaggaggagatgatgagaaccctgaacaagatgaaggacaagctggccagagagagccaggagctgagacaggccagaggccaggtggccgagctggtggcccagctgagcgagctgagcaccggccccgtgagcagcccccccccccccggcggccccctgaccctgagcagcagcatgaccaccaacgacctgccccccccccccccccccctgcccttcgcctgctgccccccccccccccccccccccctgccccccggcggcccccccaccccccccggcgcccccccctgcctgggcatgggcctgcccctgccccaggacccctaccccagcagcgacgtgcccctgagaaagaagagagtgccccagcccagccaccccctgaagagcttcaactgggtgaagctgaacgaggagagagtgcccggcaccgtgtggaacgagatcgacgacatgcaggtgttcagaatcctggacctggaggacttcgagaagatgttcagcgcctaccagagacaccagaaggagctgggcagcaccgaggacatctacctggccagcagaaaggtgaaggagctgagcgtgatcgacggcagaagagcccagaactgcatcatcctgctgagcaagctgaagctgagcaacgaggagatcagacaggccatcctgaagatggacgagcaggaggacctggccaaggacatgctggagcagctgctgaagttcatccccgagaagagcgacatcgacctgctggaggagcacaagcacgagatcgagagaatggccagagccgacagattcctgtacgagatgagcagaatcgaccactaccagcagagactgcaggccctgttcttcaagaagaagttccaggagagactggccgaggccaagcccaaggtggaggccatcctgctggccagcagagagctggtgagaagcaagagactgagacagatgctggaggtgatcctggccatcggcaacttcatgaacaagggccagagaggcggcgcctacggcttcagagtggccagcctgaacaagatcgccgacaccaagagcagcatcgacagaaacatcagcctgctgcactacctgatcatgatcctggagaagcacttccccgacatcctgaacatgcccagcgagctgcagcacctgcccgaggccgccaaggtgaacctggccgagctggagaaggaggtgggcaacctgagaagaggcctgagagccgtggaggtggagctggagtaccagagaagacaggtgagagagcccagcgacaagttcgtgcccgtgatgagcgacttcatcaccgtgagcagcttcagcttcagcgagctggaggaccagctgaacgaggccagagacaagttcgccaaggccctgatgcacttcggcgagcacgacagcaagatgcagcccgacgagttcttcggcatcttcgacaccttcctgcaggccttcagcgaggccagacaggacctggaggccatgagaagaagaaaggaggaggaggagagaagagccagaatggaggccatgctgaaggagcagagagagagagagagatggcagagacagagaaaggtgctggccgccggcagcagcctggaggagggcggcgagttcgacgacctggtgagcgccctgagaagcggcgaggtgttcgacaaggacctgtgcaagctgaagagaagcagaaagagaagcggcagccaggccctggaggtgaccagagagagagccatcaacagactgaactactag

SEQ ID NO: 79404 - DNA, 3207 bp, synthetic construct; identical to SEQ ID NO: 79403
  misc_feature 1..3207: note = Description of Artificial Sequence: Synthetic coding sequence
  source 1..3207: mol_type = other DNA

SEQ ID NO: 79405 - DNA, 399 bp, synthetic construct
  misc_feature 1..399: note = Description of Artificial Sequence: Synthetic coding sequence
  source 1..399: mol_type = other DNA
atggcccccagaaagagaagccaccacggcctgggcttcctgtgctgcttcggcggcagcgacatccccgagatcaacctgagagacaaccaccccctgcagttcatggagttcagcagccccatccccaacgccgaggagctgaacatcagattcgccgagctggtggacgagctggacctgaccgacaagaacagagaggccatgttcgccctgccccccgagaagaagtggcagatctactgcagcaagaagaaggtgcccagcctgacccccctggccaccagccagggcagctggcacggcgtggccctggccgccctggcctgcagctgcatccacctgatgttcatcacctgccagccctgcagcagatgctggagaaacaacagcgagtag

SEQ ID NO: 79406 - DNA, 3204 bp, synthetic construct
  misc_feature 1..3204: note = Description of Artificial Sequence: Synthetic coding sequence
  source 1..3204: mol_type = other DNA
atggcccccagaaagagaagccaccacggcctgggcttcctgtgctgcttcggcggcagcgacatccccgagatcaacctgagagacaaccaccccctgcagttcatggagttcagcagccccatccccaacgccgaggagctgaacatcagattcgccgagctggtggacgagctggacctgaccgacaagaacagagaggccatgttcgccctgccccccgagaagaagtggcagatctactgcagcaagaagaaggagcaggaggaccccaacaagctggccaccagctggcccgactactacatcgacagaatcaacagcatggccgccatgcagagcctgtacgccttcgacgaggaggagaccgagatgagaaaccaggtggtggaggacctgaagaccgccctgagaacccagcccatgagattcgtgaccagattcatcgagctggagggcctgacctgcctgctgaacttcctgagaagcatggaccacgccacctgcgagagcagaatccacaccagcctgatcggctgcatcaaggccctgatgaacaacagccagggcagagcccacgtgctggcccagcccgaggccatcagcaccatcgcccagagcctgagaaccgagaacagcaagaccaaggtggccgtgctggagatcctgggcgccgtgtgcctggtgcccggcggccacaagaaggtgctgcaggccatgctgcactaccaggtgtacgccgccgagagaaccagattccagaccctgctgaacgagctggacagaagcctgggcagatacagagacgaggtgaacctgaagaccgccatcatgagcttcatcaacgccgtgctgaacgccggcgccggcgaggacaacctggagttcagactgcacctgagatacgagttcctgatgctgggcatccagcccgtgatcgacaagctgagacagcacgagaacgccatcctggacaagcacctggacttcttcgagatggtgagaaacgaggacgacctggagctggccagaagattcgacatggtgcacatcgacaccaagagcgccagccagatgttcgagctgatccacaagaagctgaagtacaccgaggcctacccctgcctgctgagcgtgctgcaccactgcctgcagatgccctacaagagaaacggcggctacttccagcagtggcagctgctggacagaatcctgcagcagatcgtgctgcaggacgagagaggcgtggaccccgacctggcccccctggagaacttcaacgtgaagaacatcgtgaacatgctgatcaacgagaacgaggtgaagcagtggagagaccaggccgagaagttcagaaaggagcacatggagctggtgagcagactggagagaaaggagagagagtgcgagaccaagaccctggagaaggaggagatgatgagaaccctgaacaagatgaaggacaagctggccagagagagccaggagctgagacaggccagaggccaggtggccgagctggtggcccagctgagcgagctgagcaccggccccgtgagcagcccccccccccccggcggccccctgaccctgagcagcagcatgaccaccaacgacctgccccccccccccccccccctgcccttcgcctgctgccccccccccccccccccccccctgccccccggcggcccccccaccccccccggcgcccccccctgcctgggcatgggcctgcccctgccccaggacccctaccccagcagcgacgtgcccctgagaaagaagagagtgccccagcccagccaccccctgaagagcttcaactgggtgaagctgaacgaggagagagtgcccggcaccgtgtggaacgagatcgacgacatgcaggtgttcagaatcctggacctggaggacttcgagaagatgttcagcgcctaccagagacaccagaaggagctgggcagcaccgaggacatctacctggccagcagaaaggtgaaggagctgagcgtgatcgacggcagaagagcccagaactgcatcatcctgctgagcaagctgaagctgagcaacgaggagatcagacaggccatcctgaagatggacgagcaggaggacctggccaaggacatgctggagcagctgctgaagttcatccccgagaagagcgacatcgacctgctggaggagcacaagcacgagatcgagagaatggccagagccgacagattcctgtacgagatgagcagaatcgaccactaccagcagagactgcaggccctgttcttcaagaagaagttccaggagagactggccgaggccaagcccaaggtggaggccatcctgctggccagcagagagctggtgagaagcaagagactgagacagatgctggaggtgatcctggccatcggcaacttcatgaacaagggccagagaggcggcgcctacggcttcagagtggccagcctgaacaagatcgccgacaccaagagcagcatcgacagaaacatcagcctgctgcactacctgatcatgatcctggagaagcacttccccgacatcctgaacatgcccagcgagctgcagcacctgcccgaggccgccaaggtgaacctggccgagctggagaaggaggtgggcaacctgagaagaggcctgagagccgtggaggtgctggagtaccagagaagacaggtgagagagcccagcgacaagttcgtgcccgtgatgagcgacttcatcaccgtgagcagcttcagcttcagcgagctggaggaccagctgaacgaggccagagacaagttcgccaaggccctgatgcacttcggcgagcacgacagcaagatgcagcccgacgagttcttcggcatcttcgacaccttcctgcaggccttcagcgaggccagacaggacctggaggccatgagaagaagaaaggaggaggaggagagaagagccagaatggaggccatgctgaaggagcagagagagagagagagatggcagagacagagaaaggtgctggccgccggcagcagcctggaggagggcggcgagttcgacgacctggtgagcgccctgagaagcggcgaggtgttcgacaaggacctgtgcaagctgaagagaagcagaaagagaagcggcagccaggccctggaggtgaccagagagagagccatcaacagactgaactactag

SEQ ID NO: 79407 - DNA, 1062 bp, synthetic construct
  misc_feature 1..1062: note = Description of Artificial Sequence: Synthetic coding sequence
  source 1..1062: mol_type = other DNA
atgggcgccctgctgtgcgaccacagaagctgcagacccatcagcctgaccgtggccaagtgctgggaccccacccccagaagctacttcaccgtgcccagagccgaccccgtgagacccatcgaccccgccgcctggctgagccacaccgccgccctgaccggcgccctgcccagatacgagctggaggaggcccccctgaccgtgaagagcgacatgagcgccgtggtgagagtgatgcagctgcccgacagcggcctggagatcagagacagaatgtggctgaagatcaccatcgccaacgccgtgatcggcgccgacgtggtggactggctgtacacccacgtggagggcttcaaggagagaagagaggccagaaagtacgccagcagcctgctgaagcacggcttcctgagacacaccgtgaacaagatcaccttcagcgagcagtgctactacgtgttcggcgacctgtgcagcaacctggccaccctgaacctgaacagcggcagcagcggcaccagcgaccaggacaccctggcccccctgccccaccccgccgccccctggcccctgggccagggctacccctaccagtaccccggcccccccccctgcttcccccccgcctaccaggaccccggcttcagctacggcagcggcagcaccggcagccagcagagcgagggcagcaagagcagcggcagcaccagaagcagcagaagagcccccggcagagagaaggagagaagagccgccggcgccggcggcagcggcagcgagagcgaccacaccgcccccagcggcgtgggcagcagctggagagagagacccgccggccagctgagcagaggcagcagccccagaagccaggccagcgccaccgcccccggcctgccccccccccaccccaccaccaaggcctacaccgtggtgggcggcccccccggcggcccccccgtgagagagctggccgccgtgccccccgagctgaccggcagcagacagagcttccagaaggccatgggcaacccctgcgagttcttcgtggacatcatgtag

SEQ ID NO: 79408 - DNA, 1335 bp, synthetic construct
  misc_feature 1..1335: note = Description of Artificial Sequence: Synthetic coding sequence
  source 1..1335: mol_type = other DNA
atggccgagaccaagatcatctaccacatggacgaggaggagaccccctacctggtgaagctgcccgtggcccccgagagagtgaccctggccgacttcaagaacgtgctgagcaacagacccgtgcacgcctacaagttcttcttcaagagcatggaccaggacttcggcgtggtgaaggaggagatcttcgacgacaacgccaagctgccctgcttcaacggcagagtggtgagctggctggtgctggccgagggcgcccacagcgacgccggcagccagggcaccgacagccacaccgacctgcccccccccctggagagaaccggcggcatcggcgacagcagaccccccagcttccaccccaacgtggccagcagcagagacggcatggacaacgagaccggcaccgagagcatggtgagccacagaagagagagagccagaagaagaaacagagaggaggccgccagaaccaacggccaccccagaggcgacagaagaagagacgtgggcctgccccccgacagcgccagcaccgccctgagcagcgagctggagagcagcagcttcgtggacagcgacgaggacggcagcaccagcagactgagcagcagcaccgagcagagcaccagcagcagactgatcagaaagtacgccagcagcctgctgaagcacggcttcctgagacacaccgtgaacaagatcaccttcagcgagcagtgctactacgtgttcggcgacctgtgcagcaacctggccaccctgaacctgaacagcggcagcagcggcaccagcgaccaggacaccctggcccccctgccccaccccgccgccccctggcccctgggccagggctacccctaccagtaccccggcccccccccctgcttcccccccgcctaccaggaccccggcttcagctacggcagcggcagcaccggcagccagcagagcgagggcagcaagagcagcggcagcaccagaagcagcagaagagcccccggcagagagaaggagagaagagccgccggcgccggcggcagcggcagcgagagcgaccacaccgcccccagcggcgtgggcagcagctggagagagagacccgccggccagctgagcagaggcagcagccccagaagccaggccagcgccaccgcccccggcctgccccccccccaccccaccaccaaggcctacaccgtggtgggcggcccccccggcggcccccccgtgagagagctggccgccgtgccccccgagctgaccggcagcagacagagcttccagaaggccatgggcaacccctgcgagttcttcgtggacatcatgtag

SEQ ID NO: 79409 - DNA, 2088 bp, synthetic construct
  misc_feature 1..2088: note = Description of Artificial Sequence: Synthetic coding sequence
  source 1..2088: mol_type = other DNA
atggccgagaccaagatcatctaccacatggacgaggaggagaccccctacctggtgaagctgcccgtggcccccgagagagtgaccctggccgacttcaagaacgtgctgagcaacagacccgtgcacgcctacaagttcttcttcaagagcatggaccaggacttcggcgtggtgaaggaggagatcttcgacgacaacgccaagctgccctgcttcaacggcagagtggtgagctggctggtgctggccgagggcgcccacagcgacgccggcagccagggcaccgacagccacaccgacctgcccccccccctggagagaaccggcggcatcggcgacagcagaccccccagcttccaccccaacgtggccagcagcagagacggcatggacaacgagaccggcaccgagagcatggtgagccacagaagagagagagccagaagaagaaacagagaggaggccgccagaaccaacggccaccccagaggcgacagaagaagagacgtgggcctgccccccgacagcgccagcaccgccctgagcagcgagctggagagcagcagcttcgtggacagcgacgaggacggcagcaccagcagactgagcagcagcaccgagcagagcaccagcagcagactgatcagaaagcacaagagaagaagaagaaagcagagactgagacaggccgacagagccagcagcttcagcagcatcaccgacagcaccatgagcctgaacatcgtgaccgtgaccctgaacatggagagacaccacttcctgggcatcagcatcgtgggccagagcaacgacagaggcgacggcggcatctacatcggcagcatcatgaagggcggcgccgtggccgccgacggcagaatcgagcccggcgacatgctgctgcaggtgaacgacgtgaacttcgagaacatgagcaacgacgacgccgtgagagtgctgagagagatcgtgagccagaccggccccatcagcctgaccgtggccaagtgctgggaccccacccccagaagctacttcaccgtgcccagagccgaccccgtgagacccatcgaccccgccgcctggctgagccacaccgccgccctgaccggcgccctgcccagatacggcaccagcccctgcagcagcgccgtgaccagaaccagcagcagcagcctgaccagcagcgtgcccggcgccccccagctggaggaggcccccctgaccgtgaagagcgacatgagcgccgtggtgagagtgatgcagctgcccgacagcggcctggagatcagagacagaatgtggctgaagatcaccatcgccaacgccgtgatcggcgccgacgtggtggactggctgtacacccacgtggagggcttcaaggagagaagagaggccagaaagtacgccagcagcctgctgaagcacggcttcctgagacacaccgtgaacaagatcaccttcagcgagcagtgctactacgtgttcggcgacctgtgcagcaacctggccaccctgaacctgaacagcggcagcagcggcaccagcgaccaggacaccctggcccccctgccccaccccgccgccccctggcccctgggccagggctacccctaccagtaccccggcccccccccctgcttcccccccgcctaccaggaccccggcttcagctacggcagcggcagcaccggcagccagcagagcgagggcagcaagagcagcggcagcaccagaagcagcagaagagcccccggcagagagaaggagagaagagccgccggcgccggcggcagcggcagcgagagcgaccacaccgcccccagcggcgtgggcagcagctggagagagagacccgccggccagctgagcagaggcagcagccccagaagccaggccagcgccaccgcccccggcctgccccccccccaccccaccaccaaggcctacaccgtggtgggcggcccccccggcggcccccccgtgagagagctggccgccgtgccccccgagctgaccggcagcagacagagcttccagaaggccatgggcaacccctgcgagttcttcgtggacatcatgtag

SEQ ID NO: 79410 - DNA, 2013 bp, synthetic construct
  misc_feature 1..2013: note = Description of Artificial Sequence: Synthetic coding sequence
  source 1..2013: mol_type = other DNA
atggccgagaccaagatcatctaccacatggacgaggaggagaccccctacctggtgaagctgcccgtggcccccgagagagtgaccctggccgacttcaagaacgtgctgagcaacagacccgtgcacgcctacaagttcttcttcaagagcatggaccaggacttcggcgtggtgaaggaggagatcttcgacgacaacgccaagctgccctgcttcaacggcagagtggtgagctggctggtgctggccgagggcgcccacagcgacgccggcagccagggcaccgacagccacaccgacctgcccccccccctggagagaaccggcggcatcggcgacagcagaccccccagcttccaccccaacgtggccagcagcagagacggcatggacaacgagaccggcaccgagagcatggtgagccacagaagagagagagccagaagaagaaacagagaggaggccgccagaaccaacggccaccccagaggcgacagaagaagagacgtgggcctgccccccgacagcgccagcaccgccctgagcagcgagctggagagcagcagcttcgtggacagcgacgaggacggcagcaccagcagactgagcagcagcaccgagcagagcaccagcagcagactgatcagaaagcacaagagaagaagaagaaagcagagactgagacaggccgacagagccagcagcttcagcagcatcaccgacagcaccatgagcctgaacatcgtgaccgtgaccctgaacatggagagacaccacttcctgggcatcagcatcgtgggccagagcaacgacagaggcgacggcggcatctacatcggcagcatcatgaagggcggcgccgtggccgccgacggcagaatcgagcccggcgacatgctgctgcaggtgaacgacgtgaacttcgagaacatgagcaacgacgacgccgtgagagtgctgagagagatcgtgagccagaccggccccatcagcctgaccgtggccaagtgctgggaccccacccccagaagctacttcaccgtgcccagagccgaccccgtgagacccatcgaccccgccgcctggctgagccacaccgccgccctgaccggcgccctgcccagatacgagctggaggaggcccccctgaccgtgaagagcgacatgagcgccgtggtgagagtgatgcagctgcccgacagcggcctggagatcagagacagaatgtggctgaagatcaccatcgccaacgccgtgatcggcgccgacgtggtggactggctgtacacccacgtggagggcttcaaggagagaagagaggccagaaagtacgccagcagcctgctgaagcacggcttcctgagacacaccgtgaacaagatcaccttcagcgagcagtgctactacgtgttcggcgacctgtgcagcaacctggccaccctgaacctgaacagcggcagcagcggcaccagcgaccaggacaccctggcccccctgccccaccccgccgccccctggcccctgggccagggctacccctaccagtaccccggcccccccccctgcttcccccccgcctaccaggaccccggcttcagctacggcagcggcagcaccggcagccagcagagcgagggcagcaagagcagcggcagcaccagaagcagcagaagagcccccggcagagagaaggagagaagagccgccggcgccggcggcagcggcagcgagagcgaccacaccgcccccagcggcgtgggcagcagctggagagagagacccgccggccagctgagcagaggcagcagccccagaagccaggccagcgccaccgcccccggcctgccccccccccaccccaccaccaaggcctacaccgtggtgggcggcccccccggcggcccccccgtgagagagctggccgccgtgccccccgagctgaccggcagcagacagagcttccagaaggccatgggcaacccctgcgagttcttcgtggacatcatgtag

SEQ ID NO: 79411 - DNA, 2151 bp, synthetic construct
  misc_feature 1..2151: note = Description of Artificial Sequence: Synthetic coding sequence
  source 1..2151: mol_type = other DNA
atgggcgagaccaagatcatctaccacctggacggccaggagaccccctacctggtgaagctgcccctgcccgccgagagagtgaccctggccgacttcaagggcgtgctgcagagacccagctacaagttcttcttcaagagcatggacgacgacttcggcgtggtgaaggaggagatcagcgacgacaacgccaagctgccctgcttcaacggcagagtggtgagctggctggtgagcgccgagggcagccaccccgaccccgcccccttctgcgccgacaaccccagcgagctgcccccccccatggagagaaccggcggcatcggcgacagcagaccccccagcttccacccccacgccggcggcggcagccaggagaacctggacaacgacaccgagaccgacagcctggtgagcgcccagagagagagacccagaagaagagacggccccgagcacgccaccagactgaacggcaccgccaagggcgagagaagaagagagcccggcggctacgacagcagcagcaccctgatgagcagcgagctggagaccaccagcttcttcgacagcgacgaggacgacagcaccagcagattcagcagcagcaccgagcagagcagcgccagcagactgatgagaagacacaagagaagaagaagaaagcagaaggtgagcagaatcgagagaagcagcagcttcagcagcatcaccgacagcaccatgagcctgaacatcatcaccgtgaccctgaacatggagaagtacaacttcctgggcatcagcatcgtgggccagagcaacgagagaggcgacggcggcatctacatcggcagcatcatgaagggcggcgccgtggccgccgacggcagaatcgagcccggcgacatgctgctgcaggtgaacgagatcaacttcgagaacatgagcaacgacgacgccgtgagagtgctgagagagatcgtgcacaagcccggccccatcaccctgaccgtggccaagtgctgggaccccagccccagaggctgcttcaccctgcccagaagcgagcccatcagacccatcgaccccgccgcctgggtgagccacaccgccgccatgaccggcaccttccccgcctacggcatgagccccagcctgagcaccatcaccagcaccagcagcagcatcaccagcagcatccccgacaccgagagactggacgacttccacctgagcatccacagcgacatggccgccatcgtgaaggccatggccagccccgagagcggcctggaggtgagagacagaatgtggctgaagatcaccatccccaacgccttcatcggcagcgacgtggtggactggctgtaccacaacgtggagggcttcaccgacagaagagaggccagaaagtacgccagcaacctgctgaaggccggcttcatcagacacaccgtgaacaagatcaccttcagcgagcagtgctactacatcttcggcgacctgtgcggcaacatggccaacctgagcctgcacgaccacgacggcagcagcggcgccagcgaccaggacaccctggcccccctgccccaccccggcgccgccccctggcccatggccttcccctaccagtaccccccccccccccacccctacaacccccaccccggcttccccgagctgggctacagctacggcggcggcagcgccagcagccagcacagcgagggcagcagaagcagcggcagcaacagaagcggcagcgacagaagaaaggagaaggaccccaaggccggcgacagcaagagcggcggcagcggcagcgagagcgaccacaccaccagaagcagcctgagaggccccagagagagagcccccagcgagagaagcggccccgccgccagcgagcacagccacagaagccaccacagcctggccagcagcctgagaagccaccacacccaccccagctacggcccccccggcgtgccccccctgtacggcccccccatgctgatgatgccccccccccccgccgccatgggcccccccggcgccccccccggcagagacctggccagcgtgccccccgagctgaccgccagcagacagagcttcagaatggccatgggcaaccccagcgagttcttcgtggacgtgatgtag

SEQ ID NO: 79412 - DNA, 2172 bp, synthetic construct
  misc_feature 1..2172: note = Description of Artificial Sequence: Synthetic coding sequence
  source 1..2172: mol_type = other DNA
atgggcgagaccaagatcatctaccacctggacggccaggagaccccctacctggtgaagctgcccctgcccgccgagagagtgaccctggccgacttcaagggcgtgctgcagagacccagctacaagttcttcttcaagagcatggacgacgacttcggcgtggtgaaggaggagatcagcgacgacaacgccaagctgccctgcttcaacggcagagtggtgagctggctggtgagcgccgagggcagccaccccgaccccgcccccttctgcgccgacaaccccagcgagctgcccccccccatggagagaaccggcggcatcggcgacagcagaccccccagcttccacccccacgccggcggcggcagccaggagaacctggacaacgacaccgagaccgacagcctggtgagcgcccagagagagagacccagaagaagagacggccccgagcacgccaccagactgaacggcaccgccaagggcgagagaagaagagagcccggcggctacgacagcagcagcaccctgatgagcagcgagctggagaccaccagcttcttcgacagcgacgaggacgacagcaccagcagattcagcagcagcaccgagcagagcagcgccagcagactgatgagaagacacaagagaagaagaagaaagcagaaggtgagcagaatcgagagaagcagcagcttcagcagcatcaccgacagcaccatgagcctgaacatcatcaccgtgaccctgaacatggagaagtacaacttcctgggcatcagcatcgtgggccagagcaacgagagaggcgacggcggcatctacatcggcagcatcatgaagggcggcgccgtggccgccgacggcagaatcgagcccggcgacatgctgctgcaggtgaacgagatcaacttcgagaacatgagcaacgacgacgccgtgagagtgctgagagagatcgtgcacaagcccggccccatcaccctgaccgtggccaagtgctgggaccccagccccagaggctgcttcaccctgcccagaagcgagcccatcagacccatcgaccccgccgcctgggtgagccacaccgccgccatgaccggcaccttccccgcctacggcatgagccccagcctgagcaccatcaccagcaccagcagcagcatcaccagcagcatccccgacaccgagagactggacgacttccacctgagcatccacagcgacatggccgccatcgtgaaggccatggccagccccgagagcggcctggaggtgagagacagaatgtggctgaagatcaccatccccaacgccttcatcggcagcgacgtggtggactggctgtaccacaacgtggagggcttcaccgacagaagagaggccagaaagtacgccagcaacctgctgaaggccggcttcatcagacacaccgtgaacaagatcaccttcagcgagcagtgctactacatcttcggcgacctgtgcggcaacatggccaacctgagcctgcacgaccacgacggcagcagcggcgccagcgaccaggacaccctggcccccctgccccaccccggcgccgccccctggcccatggccttcccctaccagtaccccccccccccccacccctacaacccccaccccggcttccccgagctgggctacagctacggcggcggcagcgccagcagccagcacagcgagggcagcagaagcagcggcagcaacagaagcggcagcgacagaagaaaggagaaggaccccaaggccggcgacagcaagagcggcggcagcggcagcgagagcgaccacaccaccagaagcagcctgagaggccccagagagagagcccccagcgagagaagcggccccgccgccagcgagcacagccacagaagccaccacagcctggccagcagcctgagaagccaccacacccaccccagctacggcccccccggcgtgccccccctgtacggcccccccatgctgatgatgccccccccccccgccgccatgggcccccccggcgccccccccggcagagacctggccagcgtgccccccgagctgaccgccagcagacagagcttcagaatggccatgggcaaccccagcgagttcttcgtggacgtgatggtgctgagaggctggggcgcctag

SEQ ID NO: 79413 - DNA, 2100 bp, synthetic construct
  misc_feature 1..2100: note = Description of Artificial Sequence: Synthetic coding sequence
  source 1..2100: mol_type = other DNA
atgggcgagaccaagatcatctaccacctggacggccaggagaccccctacctggtgaagctgcccctgcccgccgagagagtgaccctggccgacttcaagggcgtgctgcagagacccagctacaagttcttcttcaagagcatggacgacgacttcggcgtggtgaaggaggagatcagcgacgacaacgccaagctgccctgcttcaacggcagagtggtgagctggctggtgagcgccgagggcagccaccccgaccccgcccccttctgcgccgacaaccccagcgagctgcccccccccatggagagaaccggcggcatcggcgacagcagaccccccagcttccacccccacgccggcggcggcagccaggagaacctggacaacgacaccgagaccgacagcctggtgagcgcccagagagagagacccagaagaagagacggccccgagcacgccaccagactgaacggcaccgccaagggcgagagaagaagagagcccggcggctacgacagcagcagcaccctgatgagcagcgagctggagaccaccagcttcttcgacagcgacgaggacgacagcaccagcagattcagcagcagcaccgagcagagcagcgccagcagactgatgagaagacacaagagaagaagaagaaagcagaaggtgagcagaatcgagagaagcagcagcttcagcagcatcaccgacagcaccatgagcctgaacatcatcaccgtgaccctgaacatggagaagtacaacttcctgggcatcagcatcgtgggccagagcaacgagagaggcgacggcggcatctacatcggcagcatcatgaagggcggcgccgtggccgccgacggcagaatcgagcccggcgacatgctgctgcaggtgaacgagatcaacttcgagaacatgagcaacgacgacgccgtgagagtgctgagagagatcgtgcacaagcccggccccatcaccctgaccgtggccaagtgctgggaccccagccccagaggctgcttcaccctgcccagaaccatgaccggcaccttccccgcctacggcatgagccccagcctgagcaccatcaccagcaccagcagcagcatcaccagcagcatccccgacaccgagagactggacgacttccacctgagcatccacagcgacatggccgccatcgtgaaggccatggccagccccgagagcggcctggaggtgagagacagaatgtggctgaagatcaccatccccaacgccttcatcggcagcgacgtggtggactggctgtaccacaacgtggagggcttcaccgacagaagagaggccagaaagtacgccagcaacctgctgaaggccggcttcatcagacacaccgtgaacaagatcaccttcagcgagcagtgctactacatcttcggcgacctgtgcggcaacatggccaacctgagcctgcacgaccacgacggcagcagcggcgccagcgaccaggacaccctggcccccctgccccaccccggcgccgccccctggcccatggccttcccctaccagtaccccccccccccccacccctacaacccccaccccggcttccccgagctgggctacagctacggcggcggcagcgccagcagccagcacagcgagggcagcagaagcagcggcagcaacagaagcggcagcgacagaagaaaggagaaggaccccaaggccggcgacagcaagagcggcggcagcggcagcgagagcgaccacaccaccagaagcagcctgagaggccccagagagagagcccccagcgagagaagcggccccgccgccagcgagcacagccacagaagccaccacagcctggccagcagcctgagaagccaccacacccaccccagctacggcccccccggcgtgccccccctgtacggcccccccatgctgatgatgccccccccccccgccgccatgggcccccccggcgccccccccggcagagacctggccagcgtgccccccgagctgaccgccagcagacagagcttcagaatggccatgggcaaccccagcgagttcttcgtggacgtgatgtag

SEQ ID NO: 79414 - DNA, 315 bp, synthetic construct
  misc_feature 1..315: note = Description of Artificial Sequence: Synthetic coding sequence
  source 1..315: mol_type = other DNA
atgcccgaggcccacatgcagcccgccaagctgcagaccagcctgcccaccaccgaccacggcagcaagaagcccgtgagctgctacctgccccccctgagcaacgcccaccccatgtgcatcgaggtgcagaacgcccagaactgcagcagcgccgccgccaccctggagcccagcatcatcagcgacacctgcttctacaagcccatcaccaaggaccagctgagcagcagaagcgagctgaacaccgtgagactgaagtgcctgaacagcctgagaggctggaagatcctgaaccagctgagcctgacctag

SEQ ID NO: 79415 - DNA, 1437 bp, synthetic construct
  misc_feature 1..1437: note = Description of Artificial Sequence: Synthetic coding sequence
  source 1..1437: mol_type = other DNA
atgggcagcagatggagcagcgaggaggagagacagcccctgctgggccccggcctgggccccggcctgggcgccagctggagaagcagagaggccgccgccgccgccctgcccgccgccgtgcccggccccggcagagtgtacggcagaagatggctggtgctgctgctgttcagcctgctggccttcgtgcagggcctggtgtggaacacctggggccccatccagaacagcgccagacaggcctacggcttcagcagctgggacatcgccctgctggtgctgtggggccccatcggcttcctgccctgcttcgccttcatgtggctgctggacaagagaggcctgagaatcaccgtgctgctgaccagcttcctgatggtgctgggcaccggcctgagatgcatccccatcagcgacctgatcctgaagagaagactgatccacggcggccagatgctgaacggcctggccggccccaccgtgatgaacgccgcccccttcctgagcaccacctggttcagcgccgacgagagagccaccgccaccgccatcgccagcatgctgagctacctgggcggcgcctgcgccttcctggtgggccccctggtggtgcccgcccccaacggcaccagccccctgctggccgccgagagcagcagagcccacatcaaggacagaatcgaggccgtgctgtacgccgagttcggcgtggtgtgcctgatcttcagcgccaccctggcctacttcccccccagaccccccctgccccccagcgtggccgccgccagccagagactgagctacagaagaagcgtgtgcagactgctgagcaacttcagattcctgatgatcgccctggcctacgccatccccctgggcgtgttcgccggctggagcggcgtgctggacctgatcctgacccccgcccacgtgagccaggtggacgccggctggatcggcttctggagcatcgtgggcggctgcgtggtgggcatcgccatggccagattcgccgacttcatcagaggcatgctgaagctgatcctgctgctgctgttcagcggcgccaccctgagcagcacctggttcaccctgacctgcctgaacagcatcacccacctgcccctgaccaccgtgaccctgtacgccagctgcatcctgctgggcgtgttcctgaacagcagcgtgcccatcttcttcgagctgttcgtggagaccgtgtaccccgtgcccgagggcatcacctgcggcgtggtgaccttcctgagcaacatgttcatgggcgtgctgctgttcttcctgaccttctaccacaccgagctgagctggttcaactggtgcctgcccggcagctgcctgctgagcctgctgctgatcctgtgcttcagagagagctacgacagactgtacctggacgtggtggtgagcgtgtag

SEQ ID NO: 79416 - DNA, 1644 bp, synthetic construct
  misc_feature 1..1644: note = Description of Artificial Sequence: Synthetic coding sequence
  source 1..1644: mol_type = other DNA
atgcccggcggcggcccccagggcgcccccgccgccgccggcggcggcggcgtgagccacagagccggcagcagagactgcctgccccccgccgcctgcttcagaagaagaagactggccagaagacccggctacatgagaagcagcaccggccccggcatcggcttcctgagccccgccgtgggcaccctgttcagattccccggcggcgtgagcggcgaggagagccaccacagcgagagcagagccagacagtgcggcctggacagcagaggcctgctggtgagaagccccgtgagcaagagcgccgccgcccccaccgtgaccagcgtgagaggcaccagcgcccacttcggcatccagctgagaggcggcaccagactgcccgacagactgagctggccctgcggccccggcagcgccggctggcagcaggagttcgccgccatggacagcagcgagaccctggacgccagctgggaggccgcctgcagcgacggcgccagaagagtgagagccgccggcagcctgcccagcgccgagctgagcagcaacagctgcagccccggctgcggccccgaggtgccccccaccccccccggcagccacagcgccttcaccagcagcttcagcttcatcagactgagcctgggcagcgccggcgagagaggcgaggccgagggctgcccccccagcagagaggccgagagccactgccagagcccccaggagatgggcgccaaggccgccagcctggacggcccccacgaggaccccagatgcctgagcagacccttcagcctgctggccaccagagtgagcgccgacctggcccaggccgccagaaacagcagcagacccgagagagacatgcacagcctgcccgacatggaccccggcagcagcagcagcctggaccccagcctggccggctgcggcggcgacggcagcagcggcagcggcgacgcccacagctgggacaccctgctgagaaagtgggagcccgtgctgagagactgcctgctgagaaacagaagacagatggaggtgatcagcctgagactgaagctgcagaagctgcaggaggacgccgtggagaacgacgactacgacaaggccgagaccctgcagcagagactggaggacctggagcaggagaagatcagcctgcacttccagctgcccagcagacagcccgccctgagcagcttcctgggccacctggccgcccaggtgcaggccgccctgagaagaggcgccacccagcaggccagcggcgacgacacccacacccccctgagaatggagcccagactgctggagcccaccgcccaggacagcctgcacgtgagcatcaccagaagagactggctgctgcaggagaagcagcagctgcagaaggagatcgaggccctgcaggccagaatgttcgtgctggaggccaaggaccagcagctgagaagagagatcgaggagcaggagcagcagctgcagtggcagggctgcgacctgacccccctggtgggccagctgagcctgggccagctgcaggaggtgagcaaggccctgcaggacaccctggccagcgccggccagatccccttccacgccgagccccccgagaccatcagaagatgcgtgtag

SEQ ID NO: 79417 - DNA, 1110 bp, synthetic construct
  misc_feature 1..1110: note = Description of Artificial Sequence: Synthetic coding sequence
  source 1..1110: mol_type = other DNA
atgcccggcggcggcccccagggcgcccccgccgccgccggcggcggcggcgtgagccacagagccggcagcagagactgcctgccccccgccgcctgcttcagaagaagaagactggccagaagacccggctacatgagaagcagcaccggccccggcatcggcttcctgagccccgccgtgggcaccctgttcagattccccggcggcgtgagcggcgaggagagccaccacagcgagagcagagccagacagtgcggcctggacagcagaggcctgctggtgagaagccccgtgagcaagagcgccgccgcccccaccgtgaccagcgtgagaggcaccagcgcccacttcggcatccagctgagaggcggcaccagactgcccgacagactgagctggccctgcggccccggcagcgccggctggcagcaggagttcgccgccatggacagcagcgagaccctggacgccagctgggaggccgcctgcagcgacggcgccagaagagtgagagccgccggcagcctgcccagcgccgagctgagcagcaacagctgcagccccggctgcggccccgaggtgccccccaccccccccggcagccacagcgccttcaccagcagcttcagcttcatcagactgagcctgggcagcgccggcgagagaggcgaggccgagggctgcccccccagcagagaggccgagagccactgccagagcccccaggagatgggcgccaaggccgccagcctggacggcccccacgaggaccccagatgcctgagcagacccttcagcctgctggccaccagagtgagcgccgacctggcccaggccgccagaaacagcagcagacccgagagagacatgcacagcctgcccgacatggaccccggcagcagcagcagcctggaccccagcctggccggctgcggcggcgacggcagcagcggcagcggcgacgcccacagctgggacaccctgctgagaaagtgggagcccgtgctgagagactgcctgctgagaaacagaagacagatggagctggagcccatcgccctggaccccccctggaagcccagacaccccgagcccaacagctactag

SEQ ID NO: 79418 - DNA, 717 bp, synthetic construct
  misc_feature 1..717: note = Description of Artificial Sequence: Synthetic coding sequence
  source 1..717: mol_type = other DNA
atggacagcagcgagaccctggacgccagctgggaggccgcctgcagcgacggcgccagaagagtgagagccgccggcagcctgcccagcgccgagctgagcagcaacagctgcagccccggctgcggccccgaggtgccccccaccccccccggcagccacagcgccttcaccagcagcttcagcttcatcagactgagcctgggcagcgccggcgagagaggcgaggccgagggctgcccccccagcagagaggccgagagccactgccagagcccccaggagatgggcgccaaggccgccagcctggacggcccccacgaggaccccagatgcctgagcagacccttcagcctgctggccaccagagtgagcgccgacctggcccaggccgccagaaacagcagcagacccgagagagacatgcacagcctgcccgacatggaccccggcagcagcagcagcctggaccccagcctggccggctgcggcggcgacggcagcagcggcagcggcgacgcccacagctgggacaccctgctgagaaagtgggagcccgtgctgagagactgcctgctgagaaacagaagacagatggaggtgatcagcctgagactgaagctgcagaagctgcaggaggacgccgtggagaacgacgactacgacaaggccggcaccaactgcttcggcagcaccatggaggccagcaccagctag

SEQ ID NO: 79419 - DNA, 2268 bp, synthetic construct
  misc_feature 1..2268: note = Description of Artificial Sequence: Synthetic coding sequence
  source 1..2268: mol_type = other DNA
atgcccggcggcggcccccagggcgcccccgccgccgccggcggcggcggcgtgagccacagagccggcagcagagactgcctgccccccgccgcctgcttcagaagaagaagactggccagaagacccggctacatgagaagcagcaccggccccggcatcggcttcctgagccccgccgtgggcaccctgttcagattccccggcggcgtgagcggcgaggagagccaccacagcgagagcagagccagacagtgcggcctggacagcagaggcctgctggtgagaagccccgtgagcaagagcgccgccgcccccaccgtgaccagcgtgagaggcaccagcgcccacttcggcatccagctgagaggcggcaccagactgcccgacagactgagctggccctgcggccccggcagcgccggctggcagcaggagttcgccgccatggacagcagcgagaccctggacgccagctgggaggccgcctgcagcgacggcgccagaagagtgagagccgccggcagcctgcccagcgccgagctgagcagcaacagctgcagccccggctgcggccccgaggtgccccccaccccccccggcagccacagcgccttcaccagcagcttcagcttcatcagactgagcctgggcagcgccggcgagagaggcgaggccgagggctgcccccccagcagagaggccgagagccactgccagagcccccaggagatgggcgccaaggccgccagcctggacggcccccacgaggaccccagatgcctgagcagacccttcagcctgctggccaccagagtgagcgccgacctggcccaggccgccagaaacagcagcagacccgagagagacatgcacagcctgcccgacatggaccccggcagcagcagcagcctggaccccagcctggccggctgcggcggcgacggcagcagcggcagcggcgacgcccacagctgggacaccctgctgagaaagtgggagcccgtgctgagagactgcctgctgagaaacagaagacagatggaggtgatcagcctgagactgaagctgcagaagctgcaggaggacgccgtggagaacgacgactacgacaaggccgagaccctgcagcagagactggaggacctggagcaggagaagatcagcctgcacttccagctgcccagcagacagcccgccctgagcagcttcctgggccacctggccgcccaggtgcaggccgccctgagaagaggcgccacccagcaggccagcggcgacgacacccacacccccctgagaatggagcccagactgctggagcccaccgcccaggacagcctgcacgtgagcatcaccagaagagactggctgctgcaggagaagcagcagctgcagaaggagatcgaggccctgcaggccagaatgttcgtgctggaggccaaggaccagcagctgagaagagagatcgaggagcaggagcagcagctgcagtggcagggctgcgacctgacccccctggtgggccagctgagcctgggccagctgcaggaggtgagcaaggccctgcaggacaccctggccagcgccggccagatccccttccacgccgagccccccgagaccatcagaagcctgcaggagagaatcaagagcctgaacctgagcctgaaggagatcaccaccaaggtgtgcatgagcgagaagttctgcagcaccctgagaaagaaggtgaacgacatcgagacccagctgcccgccctgctggaggccaagatgcacgccatcagcggcaaccacttctggaccgccaaggacctgaccgaggagatcagaagcctgaccagcgagagagagggcctggagggcctgctgagcaagctgctggtgctgagcagcagaaacgtgaagaagctgggcagcgtgaaggaggactacaacagactgagaagagaggtggagcaccaggagaccgcctacgacggcgtgagcctgtgcagacccgtgtggagcgccgtggtgagaagctgcagcctgcagcccctgccccccgagttcaagcagttcagctgcctgagcctgagaagcagctgggactacagatgcccccccccctgcctggccaacttcgtgttcctggtggagatgggcttctaccacgtggaccagaccggcctgaagctgctgaccagcagcgacccccccagcagcgccagccagagcgccggcatcaccgacatgagccactgcgcctggcccctgcagtag

SEQ ID NO: 79420 - DNA, 2037 bp, synthetic construct
  misc_feature 1..2037: note = Description of Artificial Sequence: Synthetic coding sequence
  source 1..2037: mol_type = other DNA
atgcccggcggcggcccccagggcgcccccgccgccgccggcggcggcggcgtgagccacagagccggcagcagagactgcctgccccccgccgcctgcttcagaagaagaagactggccagaagacccggctacatgagaagcagcaccggccccggcatcggcttcctgagccccgccgtgggcaccctgttcagattccccggcggcgtgagcggcgaggagagccaccacagcgagagcagagccagacagtgcggcctggacagcagaggcctgctggtgagaagccccgtgagcaagagcgccgccgcccccaccgtgaccagcgtgagaggcaccagcgcccacttcggcatccagctgagaggcggcaccagactgcccgacagactgagctggccctgcggccccggcagcgccggctggcagcaggagttcgccgccatggacagcagcgagaccctggacgccagctgggaggccgcctgcagcgacggcgccagaagagtgagagccgccggcagcctgcccagcgccgagctgagcagcaacagctgcagccccggctgcggccccgaggtgccccccaccccccccggcagccacagcgccttcaccagcagcttcagcttcatcagactgagcctgggcagcgccggcgagagaggcgaggccgagggctgcccccccagcagagaggccgagagccactgccagagcccccaggagatgggcgccaaggccgccagcctggacggcccccacgaggaccccagatgcctgagcagacccttcagcctgctggccaccagagtgagcgccgacctggcccaggccgccagaaacagcagcagacccgagagagacatgcacagcctgcccgacatggaccccggcagcagcagcagcctggaccccagcctggccggctgcggcggcgacggcagcagcggcagcggcgacgcccacagctgggacaccctgctgagaaagtgggagcccgtgctgagagactgcctgctgagaaacagaagacagatggaggtgatcagcctgagactgaagctgcagaagctgcaggaggacgccgtggagaacgacgactacgacaaggccgagaccctgcagcagagactggaggacctggagcaggagaagatcagcctgcacttccagctgcccagcagacagcccgccctgagcagcttcctgggccacctggccgcccaggtgcaggccgccctgagaagaggcgccacccagcaggccagcggcgacgacacccacacccccctgagaatggagcccagactgctggagcccaccgcccaggacagcctgcacgtgagcatcaccagaagagactggctgctgcaggagaagcagcagctgcagaaggagatcgaggccctgcaggccagaatgttcgtgctggaggccaaggaccagcagctgagaagagagatcgaggagcaggagcagcagctgcagtggcagggctgcgacctgacccccctggtgggccagctgagcctgggccagctgcaggaggtgagcaaggccctgcaggacaccctggccagcgccggccagatccccttccacgccgagccccccgagaccatcagaagcctgcaggagagaatcaagagcctgaacctgagcctgaaggagatcaccaccaaggtgtgcatgagcgagaagttctgcagcaccctgagaaagaaggtgaacgacatcgagacccagctgcccgccctgctggaggccaagatgcacgccatcagcggcaaccacttctggaccgccaaggacctgaccgaggagatcagaagcctgaccagcgagagagagggcctggagggcctgctgagcaagctgctggtgctgagcagcagaaacgtgaagaagctgggcagcgtgaaggaggactacaacagactgagaagagaggtggagcaccaggagaccgcctacggctacaagtactgcgacgccgagagctggacccagagaagccagcagctggcctag

SEQ ID NO: 79421 - DNA, 2499 bp, synthetic construct
  misc_feature 1..2499: note = Description of Artificial Sequence: Synthetic coding sequence
  source 1..2499: mol_type = other DNA
atgcccggcggcggcccccagggcgcccccgccgccgccggcggcggcggcgtgagccacagagccggcagcagagactgcctgccccccgccgcctgcttcagaagaagaagactggccagaagacccggctacatgagaagcagcaccggccccggcatcggcttcctgagccccgccgtgggcaccctgttcagattccccggcggcgtgagcggcgaggagagccaccacagcgagagcagagccagacagtgcggcctggacagcagaggcctgctggtgagaagccccgtgagcaagagcgccgccgcccccaccgtgaccagcgtgagaggcaccagcgcccacttcggcatccagctgagaggcggcaccagactgcccgacagactgagctggccctgcggccccggcagcgccggctggcagcaggagttcgccgccatggacagcagcgagaccctggacgccagctgggaggccgcctgcagcgacggcgccagaagagtgagagccgccggcagcctgcccagcgccgagctgagcagcaacagctgcagccccggctgcggccccgaggtgccccccaccccccccggcagccacagcgccttcaccagcagcttcagcttcatcagactgagcctgggcagcgccggcgagagaggcgaggccgagggctgcccccccagcagagaggccgagagccactgccagagcccccaggagatgggcgccaaggccgccagcctggacggcccccacgaggaccccagatgcctgagcagacccttcagcctgctggccaccagagtgagcgccgacctggcccaggccgccagaaacagcagcagacccgagagagacatgcacagcctgcccgacatggaccccggcagcagcagcagcctggaccccagcctggccggctgcggcggcgacggcagcagcggcagcggcgacgcccacagctgggacaccctgctgagaaagtgggagcccgtgctgagagactgcctgctgagaaacagaagacagatggaggtgatcagcctgagactgaagctgcagaagctgcaggaggacgccgtggagaacgacgactacgacaaggccgagaccctgcagcagagactggaggacctggagcaggagaagatcagcctgcacttccagctgcccagcagacagcccgccctgagcagcttcctgggccacctggccgcccaggtgcaggccgccctgagaagaggcgccacccagcaggccagcggcgacgacacccacacccccctgagaatggagcccagactgctggagcccaccgcccaggacagcctgcacgtgagcatcaccagaagagactggctgctgcaggagaagcagcagctgcagaaggagatcgaggccctgcaggccagaatgttcgtgctggaggccaaggaccagcagctgagaagagagatcgaggagcaggagcagcagctgcagtggcagggctgcgacctgacccccctggtgggccagctgagcctgggccagctgcaggaggtgagcaaggccctgcaggacaccctggccagcgccggccagatccccttccacgccgagccccccgagaccatcagaagcctgcaggagagaatcaagagcctgaacctgagcctgaaggagatcaccaccaaggtgtgcatgagcgagaagttctgcagcaccctgagaaagaaggtgaacgacatcgagacccagctgcccgccctgctggaggccaagatgcacgccatcagcggcaaccacttctggaccgccaaggacctgaccgaggagatcagaagcctgaccagcgagagagagggcctggagggcctgctgagcaagctgctggtgctgagcagcagaaacgtgaagaagctgggcagcgtgaaggaggactacaacagactgagaagagaggtggagcaccaggagaccgcctacgagaccagcgtgaaggagaacaccatgaagtacatggagaccctgaagaacaagctgtgcagctgcaagtgccccctgctgggcaaggtgtgggaggccgacctggaggcctgcagactgctgatccagagcctgcagctgcaggaggccagaggcagcctgagcgtggaggacgagagacagatggacgacctggagggcgccgccccccccatcccccccagactgcacagcgaggacaagagaaagacccccctgaaggagagctacatcctgagcgccgagctgggcgagaagtgcgaggacatcggcaagaagctgctgtacctggaggaccagctgcacaccgccatccacagccacgacgaggacctgatccacagcctgagaagagagctgcagatggtgaaggagaccctgcaggccatgatcctgcagctgcagcccgccaaggaggccggcgagagagaggccgccgccagctgcatgaccgccggcgtgcacgaggcccaggcctag

SEQ ID NO: 79422 - DNA, 2661 bp, synthetic construct
  misc_feature 1..2661: note = Description of Artificial Sequence: Synthetic coding sequence
  source 1..2661: mol_type = other DNA
atgcccggcggcggcccccagggcgcccccgccgccgccggcggcggcggcgtgagccacagagccggcagcagagactgcctgccccccgccgcctgcttcagaagaagaagactggccagaagacccggctacatgagaagcagcaccggccccggcatcggcttcctgagccccgccgtgggcaccctgttcagattccccggcggcgtgagcggcgaggagagccaccacagcgagagcagagccagacagtgcggcctggacagcagaggcctgctggtgagaagccccgtgagcaagagcgccgccgcccccaccgtgaccagcgtgagaggcaccagcgcccacttcggcatccagctgagaggcggcaccagactgcccgacagactgagctggccctgcggccccggcagcgccggctggcagcaggagttcgccgccatggacagcagcgagaccctggacgccagctgggaggccgcctgcagcgacggcgccagaagagtgagagccgccggcagcctgcccagcgccgagctgagcagcaacagctgcagccccggctgcggccccgaggtgccccccaccccccccggcagccacagcgccttcaccagcagcttcagcttcatcagactgagcctgggcagcgccggcgagagaggcgaggccgagggctgcccccccagcagagaggccgagagccactgccagagcccccaggagatgggcgccaaggccgccagcctggacggcccccacgaggaccccagatgcctgagcagacccttcagcctgctggccaccagagtgagcgccgacctggcccaggccgccagaaacagcagcagacccgagagagacatgcacagcctgcccgacatggaccccggcagcagcagcagcctggaccccagcctggccggctgcggcggcgacggcagcagcggcagcggcgacgcccacagctgggacaccctgctgagaaagtgggagcccgtgctgagagactgcctgctgagaaacagaagacagatggaggtgatcagcctgagactgaagctgcagaagctgcaggaggacgccgtggagaacgacgactacgacaaggtggagaccggcttccactacgtgggccaggccggcctggagctgctgaccagcagcaacccccccgccagcgccagccagagcgccggcatcaccgccgagaccctgcagcagagactggaggacctggagcaggagaagatcagcctgcacttccagctgcccagcagacagcccgccctgagcagcttcctgggccacctggccgcccaggtgcaggccgccctgagaagaggcgccacccagcaggccagcggcgacgacacccacacccccctgagaatggagcccagactgctggagcccaccgcccaggacagcctgcacgtgagcatcaccagaagagactggctgctgcaggagaagcagcagctgcagaaggagatcgaggccctgcaggccagaatgttcgtgctggaggccaaggaccagcagctgagaagagagatcgaggagcaggagcagcagctgcagtggcagggctgcgacctgacccccctggtgggccagctgagcctgggccagctgcaggaggtgagcaaggccctgcaggacaccctggccagcgccggccagatccccttccacgccgagccccccgagaccatcagaagcctgcaggagagaatcaagagcctgaacctgagcctgaaggagatcaccaccaaggtgtgcatgagcgagaagttctgcagcaccctgagaaagaaggtgaacgacatcgagacccagctgcccgccctgctggaggccaagatgcacgccatcagcggcaaccacttctggaccgccaaggacctgaccgaggagatcagaagcctgaccagcgagagagagggcctggagggcctgctgagcaagctgctggtgctgagcagcagaaacgtgaagaagctgggcagcgtgaaggaggactacaacagactgagaagagaggtggagcaccaggagaccgcctacgagaccagcgtgaaggagaacaccatgaagtacatggagaccctgaagaacaagctgtgcagctgcaagtgccccctgctgggcaaggtgtgggaggccgacctggaggcctgcagactgctgatccagagcctgcagctgcaggaggccagaggcagcctgagcgtggaggacgagagacagatggacgacctggagggcgccgccccccccatcccccccagactgcacagcgaggacaagagaaagacccccctgaaggtgctggaggagtggaagacccacctgatccccagcctgcactgcgccggcggcgagcagaaggaggagagctacatcctgagcgccgagctgggcgagaagtgcgaggacatcggcaagaagctgctgtacctggaggaccagctgcacaccgccatccacagccacgacgaggacctgatccacagcctgagaagagagctgcagatggtgaaggagaccctgcaggccatgatcctgcagctgcagcccgccaaggaggccggcgagagagaggccgccgccagctgcatgaccgccggcgtgcacgaggcccaggcctag

SEQ ID NO: 79423 - DNA, 621 bp, synthetic construct
  misc_feature 1..621: note = Description of Artificial Sequence: Synthetic coding sequence
  source 1..621: mol_type = other DNA
tgaaaccacttctggaccgccaaggacctgaccgaggagatcagaagcctgaccagcgagagagagggcctggagggcctgctgagcaagctgctggtgctgagcagcagaaacgtgaagaagctgggcagcgtgaaggaggactacaacagactgagaagagaggtggagcaccaggagaccgcctacgagaccagcgtgaaggagaacaccatgaagtacatggagaccctgaagaacaagctgtgcagctgcaagtgccccctgctgggcaaggtgtgggaggccgacctggaggcctgcagactgctgatccagagcctgcagctgcaggaggccagaggcagcctgagcgtggaggacgagagacagatggacgacctggagggcgccgccccccccatcccccccagactgcacagcgaggacaagagaaagacccccctgaaggtgctggaggagtggaagacccacctgatccccagcctgcactgcgccggcggcgagcagaaggaggtgtgccccttccacatggccagcagaggcgacccctacagcaagggctgcttcggcaccatgctgcagatgggcaccatcaacatcggcaaggccagccactag

SEQ ID NO: 79424 - DNA, 279 bp, synthetic construct
  misc_feature 1..279: note = Description of Artificial Sequence: Synthetic coding sequence
  source 1..279: mol_type = other DNA
atgaagtacatggagaccctgaagaacaagctgtgcagctgcaagtgccccctgctgggcaaggtgtgggaggccgacctggaggcctgcagactgctgatccagagcctgcagctgcaggaggccagaggcagcctgagcgtggaggacgagagacagatggacgacctggagggcgccgccccccccatcccccccagactgcacagcgaggacaagagaaagacccccctgaaggtgctggaggagtggaagacccacctgatccccagcctgtag

SEQ ID NO: 79425 - DNA, 2565 bp, synthetic construct
  misc_feature 1..2565: note = Description of Artificial Sequence: Synthetic coding sequence
  source 1..2565: mol_type = other DNA
atgcccggcggcggcccccagggcgcccccgccgccgccggcggcggcggcgtgagccacagagccggcagcagagactgcctgccccccgccgcctgcttcagaagaagaagactggccagaagacccggctacatgagaagcagcaccggccccggcatcggcttcctgagccccgccgtgggcaccctgttcagattccccggcggcgtgagcggcgaggagagccaccacagcgagagcagagccagacagtgcggcctggacagcagaggcctgctggtgagaagccccgtgagcaagagcgccgccgcccccaccgtgaccagcgtgagaggcaccagcgcccacttcggcatccagctgagaggcggcaccagactgcccgacagactgagctggccctgcggccccggcagcgccggctggcagcaggagttcgccgccatggacagcagcgagaccctggacgccagctgggaggccgcctgcagcgacggcgccagaagagtgagagccgccggcagcctgcccagcgccgagctgagcagcaacagctgcagccccggctgcggccccgaggtgccccccaccccccccggcagccacagcgccttcaccagcagcttcagcttcatcagactgagcctgggcagcgccggcgagagaggcgaggccgagggctgcccccccagcagagaggccgagagccactgccagagcccccaggagatgggcgccaaggccgccagcctggacggcccccacgaggaccccagatgcctgagcagacccttcagcctgctggccaccagagtgagcgccgacctggcccaggccgccagaaacagcagcagacccgagagagacatgcacagcctgcccgacatggaccccggcagcagcagcagcctggaccccagcctggccggctgcggcggcgacggcagcagcggcagcggcgacgcccacagctgggacaccctgctgagaaagtgggagcccgtgctgagagactgcctgctgagaaacagaagacagatggaggtgatcagcctgagactgaagctgcagaagctgcaggaggacgccgtggagaacgacgactacgacaaggccgagaccctgcagcagagactggaggacctggagcaggagaagatcagcctgcacttccagctgcccagcagacagcccgccctgagcagcttcctgggccacctggccgcccaggtgcaggccgccctgagaagaggcgccacccagcaggccagcggcgacgacacccacacccccctgagaatggagcccagactgctggagcccaccgcccaggacagcctgcacgtgagcatcaccagaagagactggctgctgcaggagaagcagcagctgcagaaggagatcgaggccctgcaggccagaatgttcgtgctggaggccaaggaccagcagctgagaagagagatcgaggagcaggagcagcagctgcagtggcagggctgcgacctgacccccctggtgggccagctgagcctgggccagctgcaggaggtgagcaaggccctgcaggacaccctggccagcgccggccagatccccttccacgccgagccccccgagaccatcagaagcctgcaggagagaatcaagagcctgaacctgagcctgaaggagatcaccaccaaggtgtgcatgagcgagaagttctgcagcaccctgagaaagaaggtgaacgacatcgagacccagctgcccgccctgctggaggccaagatgcacgccatcagcggcaaccacttctggaccgccaaggacctgaccgaggagatcagaagcctgaccagcgagagagagggcctggagggcctgctgagcaagctgctggtgctgagcagcagaaacgtgaagaagctgggcagcgtgaaggaggactacaacagactgagaagagaggtggagcaccaggagaccgcctacgagaccagcgtgaaggagaacaccatgaagtacatggagaccctgaagaacaagctgtgcagctgcaagtgccccctgctgggcaaggtgtgggaggccgacctggaggcctgcagactgctgatccagagcctgcagctgcaggaggccagaggcagcctgagcgtggaggacgagagacagatggacgacctggagggcgccgccccccccatcccccccagactgcacagcgaggacaagagaaagacccccctgaaggtgctggaggagtggaagacccacctgatccccagcctgcactgcgccggcggcgagcagaaggaggagagctacatcctgagcgccgagctgggcgagaagtgcgaggacatcggcaagaagctgctgtacctggaggaccagctgcacaccgccatccacagccacgacgaggacctgatccacagcctgagaagagagctgcagatggtgaaggagaccctgcaggccatgatcctgcagctgcagcccgccaaggaggccggcgagagagaggccgccgccagctgcatgaccgccggcgtgcacgaggcccaggcctag

SEQ ID NO: 79426 - DNA, 2199 bp, synthetic construct
  misc_feature 1..2199: note = Description of Artificial Sequence: Synthetic coding sequence
  source 1..2199: mol_type = other DNA
atgcccggcggcggcccccagggcgcccccgccgccgccggcggcggcggcgtgagccacagagccggcagcagagactgcctgccccccgccgcctgcttcagaagaagaagactggccagaagacccggctacatgagaagcagcaccggccccggcatcggcttcctgagccccgccgtgggcaccctgttcagattccccggcggcgtgagcggcgaggagagccaccacagcgagagcagagccagacagtgcggcctggacagcagaggcctgctggtgagaagccccgtgagcaagagcgccgccgcccccaccgtgaccagcgtgagaggcaccagcgcccacttcggcatccagctgagaggcggcaccagactgcccgacagactgagctggccctgcggccccggcagcgccggctggcagcaggagttcgccgccatggacagcagcgagaccctggacgccagctgggaggccgcctgcagcgacggcgccagaagagtgagagccgccggcagcctgcccagcgccgagctgagcagcaacagctgcagccccggctgcggccccgaggtgccccccaccccccccggcagccacagcgccttcaccagcagcttcagcttcatcagactgagcctgggcagcgccggcgagagaggcgaggccgagggctgcccccccagcagagaggccgagagccactgccagagcccccaggagatgggcgccaaggccgccagcctggacggcccccacgaggaccccagatgcctgagcagacccttcagcctgctggccaccagagtgagcgccgacctggcccaggccgccagaaacagcagcagacccgagagagacatgcacagcctgcccgacatggaccccggcagcagcagcagcctggaccccagcctggccggctgcggcggcgacggcagcagcggcagcggcgacgcccacagctgggacaccctgctgagaaagtgggagcccgtgctgagagactgcctgctgagaaacagaagacagatggaggtgatcagcctgagactgaagctgcagaagctgcaggaggacgccgtggagaacgacgactacgacaaggccgagaccctgcagcagagactggaggacctggagcaggagaagatcagcctgcacttccagctgcccagcagacagcccgccctgagcagcttcctgggccacctggccgcccaggtgcaggccgccctgagaagaggcgccacccagcacctgcaggagagaatcaagagcctgaacctgagcctgaaggagatcaccaccaaggtgtgcatgagcgagaagttctgcagcaccctgagaaagaaggtgaacgacatcgagacccagctgcccgccctgctggaggccaagatgcacgccatcagcggcaaccacttctggaccgccaaggacctgaccgaggagatcagaagcctgaccagcgagagagagggcctggagggcctgctgagcaagctgctggtgctgagcagcagaaacgtgaagaagctgggcagcgtgaaggaggactacaacagactgagaagagaggtggagcaccaggagaccgcctacgagaccagcgtgaaggagaacaccatgaagtacatggagaccctgaagaacaagctgtgcagctgcaagtgccccctgctgggcaaggtgtgggaggccgacctggaggcctgcagactgctgatccagagcctgcagctgcaggaggccagaggcagcctgagcgtggaggacgagagacagatggacgacctggagggcgccgccccccccatcccccccagactgcacagcgaggacaagagaaagacccccctgaaggtgctggaggagtggaagacccacctgatccccagcctgcactgcgccggcggcgagcagaaggaggagagctacatcctgagcgccgagctgggcgagaagtgcgaggacatcggcaagaagctgctgtacctggaggaccagctgcacaccgccatccacagccacgacgaggacctgatccacagcctgagaagagagctgcagatggtgaaggagaccctgcaggccatgatcctgcagctgcagcccgccaaggaggccggcgagagagaggccgccgccagctgcatgaccgccggcgtgcacgaggcccaggcctag

SEQ ID NO: 79427 - DNA, 1830 bp, synthetic construct
  misc_feature 1..1830: note = Description of Artificial Sequence: Synthetic coding sequence
  source 1..1830: mol_type = other DNA
atgcccggcggcggcccccagggcgcccccgccgccgccggcggcggcggcgtgagccacagagccggcagcagagactgcctgccccccgccgcctgcttcagaagaagaagactggccagaagacccggctacatgagaagcagcaccggccccggcatcggcttcctgagccccgccgtgggcaccctgttcagattccccggcggcgtgagcggcgaggagagccaccacagcgagagcagagccagacagtgcggcctggacagcagaggcctgctggtgagaagccccgtgagcaagagcgccgccgcccccaccgtgaccagcgtgagaggcaccagcgcccacttcggcatccagctgagaggcggcaccagactgcccgacagactgagctggccctgcggccccggcagcgccggctggcagcaggagttcgccgccatggacagcagcgagaccctggacgccagctgggaggccgcctgcagcgacggcgccagaagagtgagagccgccggcagcctgcccagcgccgagctgagcagcaacagctgcagccccggctgcggccccgaggtgccccccaccccccccggcagccacagcgccttcaccagcagcttcagcttcatcagactgagcctgggcagcgccggcgagagaggcgaggccgagggctgcccccccagcagagaggccgagagccactgccagagcccccaggagatgggcgccaaggccgccagcctggacggcccccacgaggaccccagatgcctgagcagacccttcagcctgctggccaccagagtgagcgccgacctggcccaggccgccagaaacagcagcagacccgagagagacatgcacagcctgcccgacatggaccccggcagcagcagcagcctggaccccagcctggccggctgcggcggcgacggcagcagcggcagcggcgacgcccacagctgggacaccctgctgagaaagtgggagcccgtgctgagagactgcctgctgagaaacagaagacagatggaggtgatcagcctgagactgaagctgcagaagctgcaggaggacgccgtggagaacgacgactacgacaaggccgagaccctgcagcagagactggaggacctggagcaggagaagatcagcctgcacttccagctgcccagcagacagcccgccctgagcagcttcctgggccacctggccgcccaggtgcaggccgccctgagaagaggcgccacccagcaggccagcggcgacgacacccacacccccctgagaatggagcccagactgctggagcccaccgcccaggacagcctgcacgtgagcatcaccagaagagactggctgctgcaggagaagcagcagctgcagaaggagatcgaggccctgcaggccagaatgttcgtgctggaggccaaggaccagcagctgagaagagagatcgaggagcaggagcagcagctgcagtggcagggctgcgacctgacccccctggtgggccagctgagcctgggccagctgcaggaggtgagcaaggccctgcaggacaccctggccagcgccggccagatccccttccacgccgagccccccgagaccatcagaagagaggtgagacaccagaccgccccctgcagaaaccaccagctggagaagcccgtgatcaacatctgggccttccacctgagaagaaagatctgcctgttccaggccgacggcctgcagcacggcagcgccgaggtgaagcacctgaaggagaccagcgtggagcccgccggcagcaccgccagcagaaaggagtag

SEQ ID NO: 79428 - DNA, 2088 bp, synthetic construct
  misc_feature 1..2088: note = Description of Artificial Sequence: Synthetic coding sequence
  source 1..2088: mol_type = other DNA
atgcccggcggcggcccccagggcgcccccgccgccgccggcggcggcggcgtgagccacagagccggcagcagagactgcctgccccccgccgcctgcttcagaagaagaagactggccagaagacccggctacatgagaagcagcaccggccccggcatcggcttcctgagccccgccgtgggcaccctgttcagattccccggcggcgtgagcggcgaggagagccaccacagcgagagcagagccagacagtgcggcctggacagcagaggcctgctggtgagaagccccgtgagcaagagcgccgccgcccccaccgtgaccagcgtgagaggcaccagcgcccacttcggcatccagctgagaggcggcaccagactgcccgacagactgagctggccctgcggccccggcagcgccggctggcagcaggagttcgccgccatggacagcagcgagaccctggacgccagctgggaggccgcctgcagcgacggcgccagaagagtgagagccgccggcagcctgcccagcgccgagctgagcagcaacagctgcagccccggctgcggccccgaggtgccccccaccccccccggcagccacagcgccttcaccagcagcttcagcttcatcagactgagcctgggcagcgccggcgagagaggcgaggccgagggctgcccccccagcagagaggccgagagccactgccagagcccccaggagatgggcgccaaggccgccagcctggacggcccccacgaggaccccagatgcctgagcagacccttcagcctgctggccaccagagtgagcgccgacctggcccaggccgccagaaacagcagcagacccgagagagacatgcacagcctgcccgacatggaccccggcagcagcagcagcctggaccccagcctggccggctgcggcggcgacggcagcagcggcagcggcgacgcccacagctgggacaccctgctgagaaagtgggagcccgtgctgagagactgcctgctgagaaacagaagacagatggaggtgatcagcctgagactgaagctgcagaagctgcaggaggacgccgtggagaacgacgactacgacaaggccgagaccctgcagcagagactggaggacctggagcaggagaagatcagcctgcacttccagctgcccagcagacagcccgccctgagcagcttcctgggccacctggccgcccaggtgcaggccgccctgagaagaggcgccacccagcaggccagcggcgacgacacccacacccccctgagaatggagcccagactgctggagcccaccgcccaggacagcctgcacgtgagcatcaccagaagagactggctgctgcaggagaagcagcagctgcagaaggagatcgaggccctgcaggccagaatgttcgtgctggaggccaaggaccagcagctgagaagagagatcgaggagcaggagcagcagctgcagtggcagggctgcgacctgacccccctggtgggccagctgagcctgggccagctgcaggaggtgagcaaggccctgcaggacaccctggccagcgccggccagatccccttccacgccgagccccccgagaccatcagaagcctgcaggagagaatcaagagcctgaacctgagcctgaaggagatcaccaccaaggtgtgcatgagcgagaagttctgcagcaccctgagaaagaaggtgaacgacatcgagacccagctgcccgccctgctggaggccaagatgcacgccatcagcggcaaccacttctggaccgccaaggacctgaccgaggagatcagaagcctgaccagcgagagagagggcctggagggcctgctgagcaagctgctggtgctgagcagcagaaacgtgaagaagctgggcagcgtgaaggaggactacaacagactgagaagagaggtggagcaccaggagaccgcctacgccgccagcgtgcactgcctgggcaagtgcggcaagctgacctggaagctggtggactgcctgagcagagcctacagcagcagaaagcccggcgaggcctgcctgtag

SEQ ID NO: 79429 - DNA, 1680 bp, synthetic construct
  misc_feature 1..1680: note = Description of Artificial Sequence: Synthetic coding sequence
  source 1..1680: mol_type = other DNA
atgcccggcggcggcccccagggcgcccccgccgccgccggcggcggcggcgtgagccacagagccggcagcagagactgcctgccccccgccgcctgcttcagaagaagaagactggccagaagacccggctacatgagaagcagcaccggccccggcatcggcttcctgagccccgccgtgggcaccctgttcagattccccggcggcgtgagcggcgaggagagccaccacagcgagagcagagccagacagtgcggcctggacagcagaggcctgctggtgagaagccccgtgagcaagagcgccgccgcccccaccgtgaccagcgtgagaggcaccagcgcccacttcggcatccagctgagaggcggcaccagactgcccgacagactgagctggccctgcggccccggcagcgccggctggcagcaggagttcgccgccatggacagcagcgagaccctggacgccagctgggaggccgcctgcagcgacggcgccagaagagtgagagccgccggcagcctgcccagcgccgagctgagcagcaacagctgcagccccggctgcggccccgaggtgccccccaccccccccggcagccacagcgccttcaccagcagcttcagcttcatcagactgagcctgggcagcgccggcgagagaggcgaggccgagggctgcccccccagcagagaggccgagagccactgccagagcccccaggagatgggcgccaaggccgccagcctggacggcccccacgaggaccccagatgcctgagcagacccttcagcctgctggccaccagagtgagcgccgacctggcccaggccgccagaaacagcagcagacccgagagagacatgcacagcctgcccgacatggaccccggcagcagcagcagcctggaccccagcctggccggctgcggcggcgacggcagcagcggcagcggcgacgcccacagctgggacaccctgctgagaaagtgggagcccgtgctgagagactgcctgctgagaaacagaagacagatggaggtgatcagcctgagactgaagctgcagaagctgcaggaggacgccgtggagaacgacgactacgacaaggccgagaccctgcagcagagactggaggacctggagcaggagaagatcagcctgcacttccagctgcccagcagacagcccgccctgagcagcttcctgggccacctggccgcccaggtgcaggccgccctgagaagaggcgccacccagcaggccagcggcgacgacacccacacccccctgagaatggagcccagactgctggagcccaccgcccaggacagcctgcacgtgagcatcaccagaagagactggctgctgcaggagaagcagcagctgcagaaggagatcgaggccctgcaggccagaatgttcgtgctggaggccaaggaccagcagctgagaagagagatcgaggagcaggagcagcagctgcagtggcagggctgcgacctgacccccctggtgggccagctgagcctgggccagctgcaggaggtgagcaaggccctgcaggacaccctggccagcgccggccagatccccttccacgccgagccccccgagaccatcagaagaaacaagtgcgagggcaagtactacgaggtgcacggcaacacctag

SEQ ID NO: 79430 - DNA, 1740 bp, synthetic construct
  misc_feature 1..1740: note = Description of Artificial Sequence: Synthetic coding sequence
  source 1..1740: mol_type = other DNA
atgcccggcggcggcccccagggcgcccccgccgccgccggcggcggcggcgtgagccacagagccggcagcagagactgcctgccccccgccgcctgcttcagaagaagaagactggccagaagacccggctacatgagaagcagcaccggccccggcatcggcttcctgagccccgccgtgggcaccctgttcagattccccggcggcgtgagcggcgaggagagccaccacagcgagagcagagccagacagtgcggcctggacagcagaggcctgctggtgagaagccccgtgagcaagagcgccgccgcccccaccgtgaccagcgtgagaggcaccagcgcccacttcggcatccagctgagaggcggcaccagactgcccgacagactgagctggccctgcggccccggcagcgccggctggcagcaggagttcgccgccatggacagcagcgagaccctggacgccagctgggaggccgcctgcagcgacggcgccagaagagtgagagccgccggcagcctgcccagcgccgagctgagcagcaacagctgcagccccggctgcggccccgaggtgccccccaccccccccggcagccacagcgccttcaccagcagcttcagcttcatcagactgagcctgggcagcgccggcgagagaggcgaggccgagggctgcccccccagcagagaggccgagagccactgccagagcccccaggagatgggcgccaaggccgccagcctggacggcccccacgaggaccccagatgcctgagcagacccttcagcctgctggccaccagagtgagcgccgacctggcccaggccgccagaaacagcagcagacccgagagagacatgcacagcctgcccgacatggaccccggcagcagcagcagcctggaccccagcctggccggctgcggcggcgacggcagcagcggcagcggcgacgcccacagctgggacaccctgctgagaaagtgggagcccgtgctgagagactgcctgctgagaaacagaagacagatggaggtgatcagcctgagactgaagctgcagaagctgcaggaggacgccgtggagaacgacgactacgacaaggccgagaccctgcagcagagactggaggacctggagcaggagaagatcagcctgcacttccagctgcccagcagacagcccgccctgagcagcttcctgggccacctggccgcccaggtgcaggccgccctgagaagaggcgccacccagcaggccagcggcgacgacacccacacccccctgagaatggagcccagactgctggagcccaccgcccaggacagcctgcacgtgagcatcaccagaagagactggctgctgcaggagaagcagcagctgcagaaggagatcgaggccctgcaggccagaatgttcgtgctggaggccaaggaccagcagctgagaagagagatcgaggagcaggagcagcagctgcagtggcagggctgcgacctgacccccctggtgggccagctgagcctgggccagctgcaggaggtgagcaaggccctgcaggacaccctggccagcgccggccagatccccttccacgccgagccccccgagaccatcagaagcctgcaggagagaatcaagagcctgaacctgagcctgaaggagatcaccaccaaggagaccatcagcggcagactgaagaccagccccagaagactggaccactag

SEQ ID NO: 79431 - DNA, 390 bp, synthetic construct
  misc_feature 1..390: note = Description of Artificial Sequence: Synthetic coding sequence
  source 1..390: mol_type = other DNA
atgaccatgaccaccatgcccgagagcctgaacagccccgtgagcggcaaggccgtgttcatggagttcggcccccccaaccagcagatgagccccagccccatgagccacggccactacagcatgcactgcctgcacagcgccggccacagccagcccgacggcgcctacagcagcgccagcagcttcagcagacccctgggctacccctacgtgaacagcgtgagcagccacgccagcagcccctacatcagcagcgtgcagagctaccccggcagcgccagcctggcccagagcagactggaggaccccggccaggacctggtgcccaagcaggccatccaggtgcaggaggccgacgaggccggctggggcggcagcggcggctag

SEQ ID NO: 79432 - DNA, 516 bp, synthetic construct
  misc_feature 1..516: note = Description of Artificial Sequence: Synthetic coding sequence
  source 1..516: mol_type = other DNA
atgaccatgaccaccatgcccgagagcctgaacagccccgtgagcggcaaggccgtgttcatggagttcggcccccccaaccagcagatgagccccagccccatgagccacggccactacagcatgcactgcctgcacagcgccggccacagccagcccgacggcgcctacagcagcgccagcagcttcagcagacccctgggctacccctacgtgaacagcgtgagcagccacgccagcagcccctacatcagcagcgtgcagagctaccccggcagcgccagcctggcccagagcagactggaggaccccggcgccgacagcgagaagagcaccgtggtggagggcggcgaggtgagattcaacggcaagggcaagaagatcagaaagcccagaaccatctacagcagcctgcagctgcaggccctgaacagaagattccagcagacccagtacctggccctgcccgagagagccgagctggccgccagcctgggcctgacccagacccagtag

SEQ ID NO: 79433 - DNA, 768 bp, synthetic construct
  misc_feature 1..768: note = Description of Artificial Sequence: Synthetic coding sequence
  source 1..768: mol_type = other DNA
atgaccatgaccaccatgcccgagagcctgaacagccccgtgagcggcaaggccgtgttcatggagttcggcccccccaaccagcagatgagccccagccccatgagccacggccactacagcatgcactgcctgcacagcgccggccacagccagcccgacggcgcctacagcagcgccagcagcttcagcagacccctgggctacccctacgtgaacagcgtgagcagccacgccagcagcccctacatcagcagcgtgcagagctaccccggcagcgccagcctggcccagagcagactggaggaccccggcgccgacagcgagaagagcaccgtggtggagggcggcgaggtgagattcaacggcaagggcaagaagatcagaaagcccagaaccatctacagcagcctgcagctgcaggccctgaacagaagattccagcagacccagtacctggccctgcccgagagagccgagctggccgccagcctgggcctgacccagacccaggtgaagatctggttccagaacaagagaagcaagttcaagaagctgatgaagcagggcggcgccgccctggagggcagcgccctggccaacggcagagccctgagcgccggcagcccccccgtgccccccggctggaaccccaacagcagcagcggcaagggcagcggcggcaacgccggcagctacatccccagctacaccagctggtaccccagcgcccaccaggaggccatgcagcagccccagctgatgtag

SEQ ID NO: 79434 - DNA, 564 bp, synthetic construct
  misc_feature 1..564: note = Description of Artificial Sequence: Synthetic coding sequence
  source 1..564: mol_type = other DNA
atgaccatgaccaccatgcccgagagcctgaacagccccgtgagcggcaaggccgtgttcatggagttcggcccccccaaccagcagatgagccccagccccatgagccacggccactacagcatgcactgcctgcacagcgccggccacagccagcccgacggcgcctacagcagcgccagcagcttcagcagacccctgggctacccctacgtgaacagcgtgagcagccacgccagcagcccctacatcagcagcgtgcagagctaccccggcagcgccagcctggcccagagcagactggaggaccccggcgccgacagcgagaagagcaccgtggtggagggcggcgaggtgagattcaacggcaagggcaagaagatcagaaagcccagaaccatctacagcagcctgcagctgcaggccctgaacagaagattccagcagacccagtacctggccctgcccgagagagccgagctggccgccagcctgggcctgacccagacccaggtgaagatctggttccagaacaagagaagcaagttcaagaagctgatgtag

SEQ ID NO: 79435 - DNA, 1722 bp, synthetic construct
  misc_feature 1..1722: note = Description of Artificial Sequence: Synthetic coding sequence
  source 1..1722: mol_type = other DNA
atgggcaagtgcctgagctgctgcaaggaggaccagagcttccagagatgcagccccgaggaccaggtgagcaccgacgcccagcacagaggcgccagcagcatcagccagcccagcatcagcctgggccacaagaccagctacagccccgtgacccacaaggtgaacgccgccaaggccagcagaagactgctgagcgtgagcagccccagcttcagcgagagaagatacagcctgttcgtgggcttccagaagagaaacgccagcccctactggcagcagagcagagccaacttcgacagcgaggaggacaccggcttcaccgacatcaagagcagcagcgaccactgcggcagcttcatcagcagaagaagaagattcagcagcagaaagctgagcatcgtgagctactacaagagcgccatcttcttcgacccccaggccagcggccagaacgtgttcaacctgaacgagatcgagatcttcagcaagaccagcagcaacaccgacgccaagaagcacatcaccatcagcgcccccgagtacaacaccaagaacttcaagaacttcgagaccaacaccaccagccccgccttcggcaacaccatcgacaccgccagctaccagcagagcaccagcagcttcttcagcctggccagcgacatcagcagccccgaccagcagaacggcatcgccaacgacatccagcagagaggccagctgtgcaaggacctgaaggacttcctgcaccccagacccgagagctacagcaccggccacagccccatcatgatcccccagcaccccagccagagcggcaccttccccttcctgcacaaggccggcttcagcagcagctacaagaacagcggctgcttcatccccccccagagcgagctgaccagcggcctgttcgaggacgaggacttcgccgtgctgttccaggacgaggacagaagcagccccatcgagatccccaagatcagatacatcaccgccaacaccgacaccgaggagcagagcttccccgtgcccaaggccttcaacaccagagtggaggagctgaacctggacgtgctgctgcagaaggtggaccacctgagaatgagcgagagcggcaagagcgagagcttcgagctgctgagagaccacaaggagaagttcagagacgagatcgagttcatgtggagattcgccagagcctacggcgacatgtacgagctgagcaccaacacccaggagaagaagcactacgccaacatcggcaagaccctgagcgagagagccatcaacagagcccccatgaacggccactgccacctgtggtacgccgtgctgtgcggctacgtgagcgagttcgagggcctgcagaacaagatcaactacggccacctgttcaaggagcacctggacatcgccatcaagctgctgcccgaggagcccttcctgtactacctgaagggcagatactgctacaccgtgagcaagctgagctggatcgagaagaagatggccgccaccctgttcggcaagatccccagcagcaccgtgcaggaggccctgcacaacttcctgaaggccgaggagctgtgccccggctacagcaaccccaactacatgtacctggccaagtgctacaccgacctggaggagaaccagaacgccctgaagttctgcaacctggccctgctgctgcccaccgtgaccaaggaggagctgtag

SEQ ID NO: 79436 - DNA, 654 bp, synthetic construct
  misc_feature 1..654: note = Description of Artificial Sequence: Synthetic coding sequence
  source 1..654: mol_type = other DNA
atgaccggcgtgttcgacagcctggtggccgacatgcacagcacccagatcgccgccagcagcacctaccaccagcaccagcagccccccagcggcggcggcgccggccccggcggcaacagcagcagcagcagcagcctgcacaagccccaggagagccccaccctgcccgtgagcaccgccaccgacagcagctactacaccaaccagcagcaccccgccggcggcggcggcggcggcggcagcccctacgcccacatgggcagctaccagtaccaggccagcggcctgaacaacgtgccctacagcgccaagagcagctacgacctgggctacaccgccgcctacaccagctacgccccctacggcaccagcagcagccccgccaacaacgagcccgagaaggaggacctggagcccgagatcagaatcgtgaacggcaagcccaagaaggtgagaaagcccagaaccatctacagcagcttccagctggccgccctgcagagaagattccagaagacccagtacctggccctgcccgagagagccgagctggccgccagcctgggcctgacccagacccaggtgggcctggccccctgcagaggcgaggagagcgccggcctgagatggctgggcagcagaagagtgtag

SEQ ID NO: 79437 - DNA, 864 bp, synthetic construct
  misc_feature 1..864: note = Description of Artificial Sequence: Synthetic coding sequence
  source 1..864: mol_type = other DNA
atgagcggcagcttcgacagaaagctgagcagcatcctgaccgacatcagcagcagcctgagctgccacgccggcagcaaggacagccccaccctgcccgagagcagcgtgaccgacctgggctactacagcgccccccagcacgactactacagcggccagccctacggccagaccgtgaacccctacacctaccaccaccagttcaacctgaacggcctggccggcaccggcgcctacagccccaagagcgagtacacctacggcgccagctacagacagtacggcgcctacagagagcagcccctgcccgcccaggaccccgtgagcgtgaaggaggagcccgaggccgaggtgagaatggtgaacggcaagcccaagaaggtgagaaagcccagaaccatctacagcagctaccagctggccgccctgcagagaagattccagaaggcccagtacctggccctgcccgagagagccgagctggccgcccagctgggcctgacccagacccaggtgaagatctggttccagaacagaagaagcaagttcaagaagctgtacaagaacggcgaggtgcccctggagcacagccccaacaacagcgacagcatggcctgcaacagcccccccagccccgccctgtgggacaccagcagccacagcacccccgcccccgccagaagccagctgcccccccccctgccctacagcgccagccccagctacctggacgaccccaccaacagctggtaccacgcccagaacctgagcggcccccacctgcagcagcagcccccccagcccgccaccctgcaccacgccagccccggccccccccccaaccccggcgccgtgtactag

SEQ ID NO: 79438 - DNA, 723 bp, synthetic construct
  misc_feature 1..723: note = Description of Artificial Sequence: Synthetic coding sequence
  source 1..723: mol_type = other DNA
atgaccagcctgccctgccccctgcccggcagagacgccagcaaggccgtgttccccgacctggcccccgtgcccagcgtggccgccgcctaccccctgggcctgagccccaccaccgccgccagccccaacctgagctacagcagaccctacggccacctgctgagctacccctacaccgagcccgccaaccccggcgacagctacctgagctgccagcagcccgccgccctgagccagcccctgtgcggccccgccgagcacccccaggagctggaggccgacagcgagaagcccagactgagccccgagcccagcgagagaagaccccaggcccccgccaagaagctgagaaagcccagaaccatctacagcagcctgcagctgcagcacctgaaccagagattccagcacacccagtacctggccctgcccgagagagcccagctggccgcccagctgggcctgacccagacccaggtgaagatctggttccagaacaagagaagcaagtacaagaagctgctgaagcagaacagcggcggccaggagggcgacttccccggcagaaccttcagcgtgagcccctgcagcccccccctgcccagcctgtgggacctgcccaaggccggcaccctgcccaccagcggctacggcaacagcttcggcgcctggtaccagcaccacagcagcgacgtgctggccagcccccagatgatgtag

SEQ ID NO: 79439 - DNA, 507 bp, synthetic construct
  misc_feature 1..507: note = Description of Artificial Sequence: Synthetic coding sequence
  source 1..507: mol_type = other DNA
atgaagctgagcgtgctgccccccagaagcctgctggccccctacaccgtgctgtgctgcccccccgacagcgagaagcccagactgagccccgagcccagcgagagaagaccccaggcccccgccaagaagctgagaaagcccagaaccatctacagcagcctgcagctgcagcacctgaaccagagattccagcacacccagtacctggccctgcccgagagagcccagctggccgcccagctgggcctgacccagacccaggtgaagatctggttccagaacaagagaagcaagtacaagaagctgctgaagcagaacagcggcggccaggagggcgacttccccggcagaaccttcagcgtgagcccctgcagcccccccctgcccagcctgtgggacctgcccaaggccggcaccctgcccaccagcggctacggcaacagcttcggcgcctggtaccagcaccacagcagcgacgtgctggccagcccccagatgatgtag

SEQ ID NO: 79440 - DNA, 1473 bp, synthetic construct
  misc_feature 1..1473: note = Description of Artificial Sequence: Synthetic coding sequence
  source 1..1473: mol_type = other DNA
atggaccacaccgacaacgagctgcagggcaccaacagcagcggcagcctgggcggcctggacgtgagaagaagaatccccatcaagctgatcagcaagcaggccaacaaggccaagcccgcccccagaacccagagaaccatcaacagaatgcccgccaaggccccccccggcgacgagggcttcgactacaacgaggaggagagatacgactgcaagggcggcgagctgttcgccaaccagagaagattccccggccacctgttctgggacttccagatcaacatcctgggcgagaaggacgacacccccgtgcacttctgcgacaagtgcggcctgcccatcaagatctacggcagaatgatcccctgcaagcacgtgttctgctacgactgcgccatcctgcacgagaagaagggcgacaagatgtgccccggctgcagcgaccccgtgcagagaatcgagcagtgcaccagaggcagcctgttcatgtgcagcatcgtgcagggctgcaagagaacctacctgagccagagagacctgcaggcccacatcaaccacagacacatgagagccggcaagcccgtgaccagagccagcctggagaacgtgcacccccccatcgcccccccccccaccgagatccccgagagattcatcatgccccccgacaagcaccacatgagccacatcccccccaagcagcacatcatgatgccccccccccccctgcagcacgtgccccacgagcactacaaccagccccacgaggacatcagagccccccccgccgagctgagcatggccccccccccccccagaagcgtgagccaggagaccttcagaatcagcaccagaaagcacagcaacctgatcaccgtgcccatccaggacgacagcaacagcggcgccagagagccccccccccccgcccccgcccccgcccaccaccaccccgagtaccagggccagcccgtggtgagccacccccaccacatcatgcccccccagcagcactacgccccccccccccccccccccccccccatcagccaccccatgccccaccccccccaggccgccggcaccccccacctggtgtacagccaggccccccccccccccatgaccagcgcccccccccccatcacccccccccccggccacatcatcgcccagatgcccccctacatgaaccaccccccccccggccccccccccccccagcacggcggcccccccgtgaccgccccccccccccaccactacaaccccaacagcctgccccagttcaccgaggaccagggcaccctgagcccccccttcacccagcccggcggcatgagccccggcatctggcccgcccccagaggccccccccccccccccagactgcagggcccccccagccagacccccctgcccggcccccaccaccccgaccagaccagatacagaccctactaccagtag

SEQ ID NO: 79441 - DNA, 798 bp, synthetic construct
  misc_feature 1..798: note = Description of Artificial Sequence: Synthetic coding sequence
  source 1..798: mol_type = other DNA
atgatgaccatgaccaccatggccgacggcctggagggccaggacagcagcaagagcgccttcatggagttcggccagcagcagcagcagcagcacagccccgccatggccggcgcccactaccccctgcactgcctgcacagcgccgccgccgccgccgccgccggcagccaccaccaccaccaccaccagcaccaccaccacggcagcccctacgccagcggcggcggcaacagctacaaccacagaagcctggccgcctacccctacatgagccacagccagcacagcccctacctgcagagctaccacaacagcagcgccgccgcccagaccagaggcgacgacaccgaccagcagaagaccaccgtgatcgagaacggcgagatcagattcaacggcaagggcaagaagatcagaaagcccagaaccatctacagcagcctgcagctgcaggccctgaaccacagattccagcagacccagtacctggccctgcccgagagagccgagctggccgccagcctgggcctgacccagacccaggtgaagatctggttccagaacaagagaagcaagttcaagaagctgctgaagcagggcagcaacccccacgagagcgaccccctgcagggcagcgccgccctgagccccagaagccccgccctgccccccgtgtgggacgtgagcgccagcgccaagggcgtgagcatgccccccaacagctacatgcccggctacagccactggtacagcagcccccaccaggacaccatgcagagaccccagatgatgtag

SEQ ID NO: 79442 - DNA, 882 bp, synthetic construct
  misc_feature 1..882: note = Description of Artificial Sequence: Synthetic coding sequence
  source 1..882: mol_type = other DNA
atgatgaccatgaccaccatggccgacggcctggagggccaggacagcagcaagagcgccttcatggagttcggccagcagcagcagcagcagcagcagcagcagcagcagcagcagcagcagcagcagcagccccccccccccccccccccccccccccagccccacagccagcagagcagccccgccatggccggcgcccactaccccctgcactgcctgcacagcgccgccgccgccgccgccgccggcagccaccaccaccaccaccaccagcaccaccaccacggcagcccctacgccagcggcggcggcaacagctacaaccacagaagcctggccgcctacccctacatgagccacagccagcacagcccctacctgcagagctaccacaacagcagcgccgccgcccagaccagaggcgacgacaccgaccagcagaagaccaccgtgatcgagaacggcgagatcagattcaacggcaagggcaagaagatcagaaagcccagaaccatctacagcagcctgcagctgcaggccctgaaccacagattccagcagacccagtacctggccctgcccgagagagccgagctggccgccagcctgggcctgacccagacccaggtgaagatctggttccagaacaagagaagcaagttcaagaagctgctgaagcagggcagcaacccccacgagagcgaccccctgcagggcagcgccgccctgagccccagaagccccgccctgccccccgtgtgggacgtgagcgccagcgccaagggcgtgagcatgccccccaacagctacatgcccggctacagccactggtacagcagcccccaccaggacaccatgcagagaccccagatgatgtag

SEQ ID NO: 79443 - DNA, 9084 bp, synthetic construct
  misc_feature 1..9084: note = Description of Artificial Sequence: Synthetic coding sequence
  source 1..9084: mol_type = other DNA
atgaacctgcaccaggtgctgaccggcgccgtgaaccccggcgaccactgcttcagcgtgggcagcatcggcgaccagagattcaccgcctacgccagcggctgcgacatcgtgatcctgggcagcgacttcgagagactgcagatcatccccggcgccaagcacggcaacatccaggtgggctgcgtggactgcagcatgcagcagggcaagatcgccgccagctacggcaacgtgatcagcatcttcgagcccgtgaacctgcccaagcagaagaagaacctggagctgtacagccagtggcagaagagcggccagttcttcctggagagcatcgcccacaacatcacctgggaccccaccggcagcagactgctgaccggcagcagctacctgcagctgtggagcaacaccaacctggagaagcccaccgaggacgagaacctgaacaagaccgacctgaacttcggcgactggaagtgcatctggcactgcaagaccgccagccaggtgcacctgatgaagttcagccccgacggcgagttcttcgccaccgccggcaaggacgactgcctgctgaaggtgtggtacaacgtggagaactggagaaccgccgtgaccagccccgacggcagcagcgagaagcagagccagggcgagatcgacttcagcttcgtgtacctggcccaccccagagccgtgaacggcttcagctggagaaagaccagcaagtacatgcccagagccagcgtgtgcaacgtgctgctgacctgctgcaaggacaacgtgtgcagactgtgggtggagaccttcctgcccaacgactgcctgctgtacggcggcgactgcagccactggaccgagagcatcaacctgaccaacaacttcaagagaaacgccagcagcaaggagagagtgcagaacgccctggaggtgaacctgagacacttcagaagaggcagaagaagaagcctggccctggtggcccacaccggctacctgccccaccagcaggacccccaccacgtgcacagaaacacccccctgcacgccaacgccctgtgccacttccacatcgccgccagcatcaaccccgccaccgacatccccctgctgcccagcatcaccagcctgagcctgaacgagaacgaggagaagaccggccccttcgtggtgcactggctgaacaacaaggagctgcacttcaccctgagcatggaggtgttcctgcagcagctgagaaagagcttcgagcagcccagcagcgaggccagcgtggaggacagcaaccaggccgacgtgaagagcgacgaggagaccgacgacggcgtggacgacctgaagatcaaccccgagaagaaggagctgggctgcgacaagatggtgcccaacagcagcttcaccagcctgagcagcgccgccatcgaccaccagatcgaggtgctgctgagcgagtggagcaagaacgccgacatgctgttcagcatccaccccatggacggcagcctgctggtgtggcacgtggactggctggacgagtaccagcccggcatgttcagacaggtgcaggtgagcttcgtgagcagaatccccgtggccttccccaccggcgacgccaacagcctgtgcaagagcatcatgatgtacgcctgcaccaagaacgtggacctggccatccagcagggcaagcagaagcccagcggcctgaccagaagcaccagcatgctgatcagcagcggccacaacaagagcagcaacagcctgaagctgagcatcttcacccccaacgtgatgatgatcagcaagcacgccgacggcagcctgaaccagtggctggtgagcttcgccgaggagagcgccttcagcaccgtgctgagcatcagccacaagagcagatactgcggccacagattccacctgaacgacctggcctgccacagcgtgctgcccctgctgctgaccaccagccaccacaacgccctgagaacccccgacgtggacaaccccgagcagcccttcgacgccctgaacatcgaggagtgcagcctgacccagcagaacaagagcaccgtggacgtggccttccaggaccccagcgccgtgtacagcgagctgatcctgtggagagtggaccccgtgggccccctgagcttcagcggcggcgtgagcgagctggccagaatcaacagcctgcacgtgagcgccttcagcaacgtggcctggctgcccaccctgatccccagctactgcctgggcgcctactgcaacagccccagcgcctgcttcgtggccagcgacggccagtacctgagactgtacgaggccgtgatcgacgccaagaagctgctgagcgagctgagcaaccccgagatcagcaagtacgtgggcgaggtgttcaacatcgtgagccagcagagcaccgccagacccggctgcatcatcgccctggaccccatcaccaagctgcacggcagaaagacccagctgctgcacgtgttcgaggaggacttcatcctgaacaacctggagaagaagagcctgggcaaggacagcatcctgagcaacgccggcagcagccccaacggcttcagcgagaagttctacctgatcgtgatcgagtgcacccaggacaacagaagcctgctgcacatgtggaacctgcacctgaagagcatccccgtgagcctggacgagaaggtggacaccaagctgagcgaggccgtgtggcagcccgaggagcactacagcagcagccccgagaagatcctgagccccttcagccagaagtaccaggcctgcagagccaacctgcagagcaccagcagactgaccctgttcagcgagatggtgtacagccaggagctgcacctgcccgagggcgtggagatcatcagcatcaagcccagcgccggccacctgagcagcagcagcatctaccccgcctgcagcgccccctacctgctggccaccagctgcagcgacgagaaggtgagattctggagatgcagagtgaccgacggcgagagcgccaccagcaagaacggcaagatcgacctggcctacatctgggaggagtggcccctgctgatcgaggacggcctgcagagcaacagcagcatcaccgtgcccggcagacccgtggaggtgagctgcgcccacaccaacagactggccgtggcctacaagcagcccgccagcaacagcagaagcagccaggacttcgtgatgcacgtgagcatcttcgagtgcgagagcaccggcggcagctgctgggtgctggagcagaccatccacctggacgagctgagcaccgtgctggacagcggcatcagcgtggacagcaacctggtggcctacaacaagcaggacatgtacctgagcagcaaggagaacatcaccagcaacaccaagcacctggtgcacctggactggatgagcagagaggacggcagccacatcctgaccgtgggcatcggcagcaagctgttcatgtacggccccctggccggcaaggtgcaggaccagaccggcaaggagaccctggccttccccctgtgggagagcaccaaggtggtgcccctgagcaagttcgtgctgctgagaagcgtggacctggtgagcagcgtggacggcagcccccccttccccgtgagcctgagctgggtgagagacggcatcctggtggtgggcatggactgcgagatgcacgtgtactgccagtggcagcccagcagcaagcaggagcccgtgatcaccgacagctacagcggcagcacccccagcatcaccagcctgatcaagcagagcaacagcagcagcggcctgcacccccccaagaagaccctgaccagaagcatgaccagcctggcccagaagatctgcggcaagaagaccgccttcgaccccagcgtggacatggaggacagcggcctgttcgaggccgcccacgtgctgagccccaccctgccccagtaccaccccctgcagctgctggagctgatggacctgggcaaggtgagaagagccaaggccatcctgagccacctggtgaagtgcatcgccggcgaggtggtggccctgaacgaggccgagagcaaccacgagagaagactgagaagcctgaccatcagcgccagcggcagcaccaccagagacccccaggccttcaacaaggccgagaacaccgactacaccgagatcgacagcgtgccccccctgcccctgtacgccctgctggccgccgacgacgacagctgctacagcagcctggagaagagcagcaacgagagcaccctgagcaagagcaaccagctgagcaaggagagctacgacgagctgttccagacccagctgctgatgaccgacacccacatgctggagaccgacgaggagaacaccaagcccagagtgatcgacctgagccagtacagccccacctacttcggccccgagcacgcccaggtgctgagcggccacctgctgcacagcagcctgcccggcctgagcagaatggagcagatgagcctgatggccctggccgacaccatcgccaccaccagcaccgacatcggcgagagcagagacagaagccagggcggcgagaccctggacgagtgcggcctgaagttcctgctggccgtgagactgcacaccttcctgaccaccagcctgcccgcctacagagcccagctgctgcaccagggcctgagcaccagccacttcgcctgggccttccacagcgtggccgaggaggagctgctgaacatgctgcccgccatgcagaaggacgaccccacctggagcgagctgagagccatgggcgtgggctggtgggtgagaaacaccagaatcctgagaaagtgcatcgagaaggtggccaaggccgccttctacagaaagaacgaccccctggacgccgccatcttctacctggccatgaagaagaaggccgtgatctggggcctgtacagagccgagaagaacaccagaatgacccagttcttcggccacaacttcgaggacgagagatggagaaaggccgccctgaagaacgccttcagcctgctgggcaagcagagattcgagcacagcgccgccttcttcctgctggccggctgcctgagagacgccatcgaggtgtgcctggagaagctgaacgacatccagctggccctggtgatcgccagactgtacgagagcgagttcgacaccagcgccgcctacaagagcatcctgagaaagaaggtgctgggcatcgacagccccgtgagcgagctgtgcagcctgaacatcaacatgcaccacgaccccttcctgagaagcatggcctactggatcctggaggactacagcggcgccctggagaccctgatcaagcagcccatcagagagaacgacgaccaggtgctgagcgccagcaaccccaccgtgttcaacttctacaactacctgagaacccaccccctgctgctgagaagacacttcggcagcagcgacaccttcagcacccacatgagcctgaccggcaagagcggcctggccggcaccatcaacctgagcgagagaagactgttcttcaccaccgccagcgcccacctgaaggccggctgccccatgctggccctggaggtgctgagcaagatgcccaaggtgatcaagaagaccagacccttctacagagccagcagcttcctggacaccagcaaggactgcagccccagcagccccctgaagctggacgccagagaggacaagagcagcgccgtggactggagccagagcctgatcaacggcttcggcagcagcagcgagggcagcagcgagaagcagagcaacagcaccctgagcttcgactggagccagcccagcgtggtgttccaggacgacagcctggagctgaagtgggacagcgacaacgacgaggagaacgaggacgtgcccatcagcatgaaggagctgaagcccctgcagagaaagaccgacaagaagctggacgacatcagcagcaactacaccgagagcttcagcaccctggacgagaacgacctgctgaaccccagcgaggacatcatcgccgtgcagctgaagttcagagcctgcctgaagatcctgaccgtggagctgagaaccctgagcaccggctacgagatcgacggcggcaagctgagataccagctgtaccactggctggagaaggaggtgatcgccctgcagagaacctgcgacttctgcagcgacgccgaggagctgcagagcgccttcggcagaaacgaggacgagttcggcctgaacgaggacgccgaggacctgccccaccagaccaaggtgaagcagctgagagagaacttccaggagaagagacagtggctgctgaagtaccagagcctgctgagaatgttcctgagctactgcatcctgcacggcagccacggcggcggcctggccagcgtgagaatggagctgatcctgctgctgcaggagagccagcaggagaccagcgagcccctgttcagcagccccctgagcgagcagaccagcgtgcccctgctgttcgcctgcaccgccaacgccaagaccgtggtggccaaccccctgctgcacctgagcaacctgacccacgacatcctgcacgccatcatcaacttcgacagccccccccaccccgacatccagagcaacaaggtgtacgtgatgcacaccctggccgccagcctgagcgcctgcatctaccagtgcctgtgcggcagccacaactacagcagcttccagaccaaccagttcaccggcatggtgtaccagaccgtgctgctgccccacagacccagcctgaagaccggcagcctggacgaggccctgacccccaacaccagccccgcccagtggcccggcatcacctgcctgatcagactgctgaacagcagcggcgaggaggcccagagcggcctgaccgtgctgctgtgcgagatcctgaccgccgtgtacctgagcctgttcatccacggcctggccacccacagcagcaacgagctgttcagaatcgtggcccaccccctgaacgagaagatgtggagcgccgtgttcggcggcggcgcccacgtgcccagcaaggagcagacccacagcaagaccctgcccgtgagcagcctggtggaggagggcgagaagcagaacaagagattcagacccagcaagatgagctgcagagagagcgcccccctgacccccagcagcgcccccgtgagccaggagagcctggccgtgaaggagaagttcatcccccccgagctgagcatctgggactacttcatcgccaagcccttcctgcccagcagccagagcagagccgagtacgacagcgaggagagcctgggcagcgacgacgacgacaacgacgacgacgacgacgtgctggccagcgacttccacctgcaggagcacagcaacagcaacagctacagctggagcctgatgagactggccatggtgcagctggtgctgaacaacctgaagaccttctaccccttcgccggccacgacctggccgagctgcccgtgagcagccccctgtgccacgccgtgctgaagaccctgcagtgctgggagcaggtgctgctgagaagactggagatccacggcggccccccccagaactacatcgccagccacaccgccgaggagagcctgagcgccggccccgccatcctgagacacaaggccctgctggagcccaccaacacccccttcaagagcaagcaccacctggccctgagcgtgaagagactgtggcagtacctggtgaagcaggaggagatccaggagaccttcatcaagaacatcttcaccaagaagagatgcctgaacgagatcgaggccgacctgggctaccccggcggcaaggccagaatcatccacaaggagagcgacatcatcaccgccttcgccgtgaacaaggccaacagaaactgcatcgccatcgccagcagccacgacgtgcaggagctggacgtgagcggcatcctggccacccaggtgtacacctgggtggacgacgacatcgaggtggagaccaagggcagcgaggacttcctggtgatccacgccagagacgacctgaccgccgtgcagggcaccaccccctacacccacagcaaccccggcacccccatcaacatgccctggctgggcagcacccagaccggcagaggcgccagcgtgatgatcaagaaggccatcaacaacgtgagaagaatgaccagccaccccaccctgccctactacctgaccggcgcccaggacggcagcgtgagaatgttcgagtggggccacagccagcagatcacctgcttcagaagcggcggcaacagcagagtgaccagaatgagattcaactaccagggcaacaagttcggcatcgtggacgccgacggctacctgagcctgtaccagaccaactggaagtgctgccccgtgaccggcagcatgcccaagccctacctgacctggcagtgccacaacaagaccgccaacgacttcgtgttcgtgagcagcagcagcctgatcgccaccgccggcctgagcaccgacaacagaaacgtgtgcctgtgggacaccctggtggcccccgccaacagcctggtgcacgccttcacctgccacgacagcggcgccaccgtgctggcctacgcccccaagcaccagctgctgatcagcggcggcagaaagggcttcacctacgtgttcgacctgtgccagagacagcagagacagctgttccagagccacgacagccccgtgaaggccgtggccgtggaccccaccgaggagtacttcgtgaccggcagcgccgagggcaacatcaagatctggagcctgagcaccttcggcctgctgcacaccttcgtgagcgagcacgccagacagagcatcttcagaaacatcggcaccggcgtgatgcagatcgagaccggccccgccaaccacatcttcagctgcggcgccgacggcaccatgaagatgagaatcctgcccgaccagttcagccccctgaacgaggtgctgaagaacgacgtgaagttcatgctgtag

SEQ ID NO: 79444 - DNA, 1770 bp, synthetic construct
  misc_feature 1..1770: note = Description of Artificial Sequence: Synthetic coding sequence
  source 1..1770: mol_type = other DNA
atgaacctgcaccaggtgctgaccggcgccgtgaaccccggcgaccactgcttcagcgtgggcagcatcggcgaccagagattcaccgcctacgccagcggctgcgacatcgtgatcctgggcagcgacttcgagagactgcagatcatccccggcgccaagcacggcaacatccaggtgggctgcgtggactgcagcatgcagcagggcaagatcgccgccagctacggcaacgtgatcagcatcttcgagcccgtgaacctgcccaagcagaagaagaacctggagctgtacagccagtggcagaagagcggccagttcttcctggagagcatcgcccacaacatcacctgggaccccaccggcagcagactgctgaccggcagcagctacctgcagctgtggagcaacaccaacctggagaagcccaccgaggacgagaacctgaacaagaccgacctgaacttcggcgactggaagtgcatctggcactgcaagaccgccagccaggtgcacctgatgaagttcagccccgacggcgagttcttcgccaccgccggcaaggacgactgcctgctgaaggtgtggtacaacgtggagaactggagaaccgccgtgaccagccccgacggcagcagcgagaagcagagccagggcgagatcgacttcagcttcgtgtacctggcccaccccagagccgtgaacggcttcagctggagaaagaccagcaagtacatgcccagagccagcgtgtgcaacgtgctgctgacctgctgcaaggacaacgtgtgcagactgtgggtggagaccttcctgcccaacgactgcctgctgtacggcggcgactgcagccactggaccgagagcatcaacctgaccaacaacttcaagagaaacgccagcagcaaggagagagtgcagaacgccctggaggtgaacctgagacacttcagaagaggcagaagaagaagcctggccctggtggcccacaccggctacctgccccaccagcaggacccccaccacgtgcacagaaacacccccctgcacgccaacgccctgtgccacttccacatcgccgccagcatcaaccccgccaccgacatccccctgctgcccagcatcaccagcctgagcctgaacgagaacgaggagaagaccggccccttcgtggtgcactggctgaacaacaaggagctgcacttcaccctgagcatggaggtgttcctgcagcagctgagaaagagcttcgagcagcccagcagcgaggccagcgtggaggacagcaaccaggccgacgtgaagagcgacgaggagaccgacgacggcgtggacgacctgaagatcaaccccgagaagaaggagctgggctgcgacaagatggtgcccaacagcagcttcaccagcctgagcagcgccgccatcgaccaccagatcgaggtgctgctgagcgagtggagcaagaacgccgacatgctgttcagcatccaccccatggacggcagcctgctggtgtggcacgtggactggctggacgagtaccagcccggcatgttcagacaggtgcaggtgagcttcgtgagcagaatccccgtggccttccccaccggcgacgccaacagcctgtgcaagagcatcatgatgtacgcctgcaccaagaacgtggacctggccatccagcagggcaagcagaagcccagcggcctgaccagaagcaccagcatgctgatcagcagcggccacaacaagagcagcaacagcctgaagtag

SEQ ID NO: 79445 - DNA, 9147 bp, synthetic construct
  misc_feature 1..9147: note = Description of Artificial Sequence: Synthetic coding sequence
  source 1..9147: mol_type = other DNA
atgaacctgcaccaggtgctgaccggcgccgtgaaccccggcgaccactgcttcagcgtgggcagcatcggcgaccagagattcaccgcctacgccagcggctgcgacatcgtgatcctgggcagcgacttcgagagactgcagatcatccccggcgccaagcacggcaacatccaggtgggctgcgtggactgcagcatgcagcagggcaagatcgccgccagctacggcaacgtgatcagcatcttcgagcccgtgaacctgcccaagcagaagaagaacctggagctgtacagccagtggcagaagagcggccagttcttcctggagagcatcgcccacaacatcacctgggaccccaccggcagcagactgctgaccggcagcagctacctgcagctgtggagcaacaccaacctggagaagcccaccgaggacgagaacctgaacaagaccgacctgaacttcggcgactggaagtgcatctggcactgcaagaccgccagccaggtgcacctgatgaagttcagccccgacggcgagttcttcgccaccgccggcaaggacgactgcctgctgaaggtgtggtacaacgtggagaactggagaaccgccgtgaccagccccgacggcagcagcgagaagcagagccagggcgagatcgacttcagcttcgtgtacctggcccaccccagagccgtgaacggcttcagctggagaaagaccagcaagtacatgcccagagccagcgtgtgcaacgtgctgctgacctgctgcaaggacaacgtgtgcagactgtgggtggagaccttcctgcccaacgactgcctgctgtacggcggcgactgcagccactggaccgagagcatcaacctgaccaacaacttcaagagaaacgccagcagcaaggagagagtgcagaacgccctggaggtgaacctgagacacttcagaagaggcagaagaagaagcctggccctggtggcccacaccggctacctgccccaccagcaggacccccaccacgtgcacagaaacacccccctgcacgccaacgccctgtgccacttccacatcgccgccagcatcaaccccgccaccgacatccccctgctgcccagcatcaccagcctgagcctgaacgagaacgaggagaagaccggccccttcgtggtgcactggctgaacaacaaggagctgcacttcaccctgagcatggaggtgttcctgcagcagctgagaaagagcttcgagcagcccagcagcgaggccagcgtggaggacagcaaccaggccgacgtgaagagcgacgaggagaccgacgacggcgtggacgacctgaagatcaaccccgagaagaaggagctgggctgcgacaagatggtgcccaacagcagcttcaccagcctgagcagcgccgccatcgaccaccagatcgaggtgctgctgagcgagtggagcaagaacgccgacatgctgttcagcatccaccccatggacggcagcctgctggtgtggcacgtggactggctggacgagtaccagcccggcatgttcagacaggtgcaggtgagcttcgtgagcagaatccccgtggccttccccaccggcgacgccaacagcctgtgcaagagcatcatgatgtacgcctgcaccaagaacgtggacctggccatccagcagggcaagcagaagcccagcggcctgaccagaagcaccagcatgctgatcagcagcggccacaacaagagcagcaacagcctgaagctgagcatcttcacccccaacgtgatgatgatcagcaagcacgccgacggcagcctgaaccagtggctggtgagcttcgccgaggagagcgccttcagcaccgtgctgagcatcagccacaagagcagatactgcggccacagattccacctgaacgacctggcctgccacagcgtgctgcccctgctgctgaccaccagccaccacaacgccctgagaacccccgacgtggacaaccccgagcagcccttcgacgccctgaacatcgaggagtgcagcctgacccagcagaacaagagcaccgtggacgtggccttccaggaccccagcgccgtgtacagcgagctgatcctgtggagagtggaccccgtgggccccctgagcttcagcggcggcgtgagcgagctggccagaatcaacagcctgcacgtgagcgccttcagcaacgtggcctggctgcccaccctgatccccagctactgcctgggcgcctactgcaacagccccagcgcctgcttcgtggccagcgacggccagtacctgagactgtacgaggccgtgatcgacgccaagaagctgctgagcgagctgagcaaccccgagatcagcaagtacgtgggcgaggtgttcaacatcgtgagccagcagagcaccgccagacccggctgcatcatcgccctggaccccatcaccaagctgcacggcagaaagacccagctgctgcacgtgttcgaggaggacttcatcctgaacaacctggagaagaagagcctgggcaaggacagcatcctgagcaacgccggcagcagccccaacggcttcagcgagaagttctacctgatcgtgatcgagtgcacccaggacaacagaagcctgctgcacatgtggaacctgcacctgaagagcatccccgtgagcctggacgagaaggtggacaccaagctgagcgaggccgtgtggcagcccgaggagcactacagcagcagccccgagaagatcctgagccccttcagccagaagtaccaggcctgcagagccaacctgcagagcaccagcagactgaccctgttcagcgagatggtgtacagccaggagctgcacctgcccgagggcgtggagatcatcagcatcaagcccagcgccggccacctgagcagcagcagcatctaccccgcctgcagcgccccctacctgctggccaccagctgcagcgacgagaaggtgagattctggagatgcagagtgaccgacggcgagagcgccaccagcaagaacggcaagatcgacctggcctacatctgggaggagtggcccctgctgatcgaggacggcctgcagagcaacagcagcatcaccgtgcccggcagacccgtggaggtgagctgcgcccacaccaacagactggccgtggcctacaagcagcccgccagcaacagcagaagcagccaggacttcgtgatgcacgtgagcatcttcgagtgcgagagcaccggcggcagctgctgggtgctggagcagaccatccacctggacgagctgagcaccgtgctggacagcggcatcagcgtggacagcaacctggtggcctacaacaagcaggacatgtacctgagcagcaaggagaacatcaccagcaacaccaagcacctggtgcacctggactggatgagcagagaggacggcagccacatcctgaccgtgggcatcggcagcaagctgttcatgtacggccccctggccggcaaggtgcaggaccagaccggcaaggagaccctggccttccccctgtgggagagcaccaaggtggtgcccctgagcaagttcgtgctgctgagaagcgtggacctggtgagcagcgtggacggcagcccccccttccccgtgagcctgagctgggtgagagacggcatcctggtggtgggcatggactgcgagatgcacgtgtactgccagtggcagcccagcagcaagcaggagcccgtgatcaccgacagctacagcggcagcacccccagcatcaccagcctgatcaagcagagcaacagcagcagcggcctgcacccccccaagaagaccctgaccagaagcatgaccagcctggcccagaagatctgcggcaagaagaccgccttcgaccccagcgtggacatggaggacagcggcctgttcgaggccgcccacgtgctgagccccaccctgccccagtaccaccccctgcagctgctggagctgatggacctgggcaaggtgagaagagccaaggccatcctgagccacctggtgaagtgcatcgccggcgaggtggtggccctgaacgaggccgagagcaaccacgagagaagactgagaagcctgaccatcagcgccagcggcagcaccaccagagacccccaggccttcaacaaggccgagaacaccgactacaccgagatcgacagcgtgccccccctgcccctgtacgccctgctggccgccgacgacgacagctgctacagcagcctggagaagagcagcaacgagagcaccctgagcaagagcaaccagctgagcaaggagagctacgacgagctgttccagacccagctgctgatgaccgacacccacatgctggagaccgacgaggagaacaccaagcccagagtgatcgacctgagccagtacagccccacctacttcggccccgagcacgcccaggtgctgagcggccacctgctgcacagcagcctgcccggcctgagcagaatggagcagatgagcctgatggccctggccgacaccatcgccaccaccagcaccgacatcggcgagagcagagacagaagccagggcggcgagaccctggacgagtgcggcctgaagttcctgctggccgtgagactgcacaccttcctgaccaccagcctgcccgcctacagagcccagctgctgcaccagggcctgagcaccagccacttcgcctgggccttccacagcgtggccgaggaggagctgctgaacatgctgcccgccatgcagaaggacgaccccacctggagcgagctgagagccatgggcgtgggctggtgggtgagaaacaccagaatcctgagaaagtgcatcgagaaggtggccaaggccgccttctacagaaagaacgaccccctggacgccgccatcttctacctggccatgaagaagaaggccgtgatctggggcctgtacagagccgagaagaacaccagaatgacccagttcttcggccacaacttcgaggacgagagatggagaaaggccgccctgaagaacgccttcagcctgctgggcaagcagagattcgagcacagcgccgccttcttcctgctggccggctgcctgagagacgccatcgaggtgtgcctggagaagctgaacgacatccagctggccctggtgatcgccagactgtacgagagcgagttcgacaccagcgccgcctacaagagcatcctgagaaagaaggtgctgggcatcgacagccccgtgagcgagctgtgcagcctgaacatcaacatgcaccacgaccccttcctgagaagcatggcctactggatcctggaggactacagcggcgccctggagaccctgatcaagcagcccatcagagagaacgacgaccaggtgctgagcgccagcaaccccaccgtgttcaacttctacaactacctgagaacccaccccctgctgctgagaagacacttcggcagcagcgacaccttcagcacccacatgagcctgaccggcaagagcggcctggccggcaccatcaacctgagcgagagaagactgttcttcaccaccgccagcgcccacctgaaggccggctgccccatgctggccctggaggtgctgagcaagatgcccaaggtgatcaagaagaccagacccttctacagagccagcagcttcctggacaccagcaaggactgcagccccagcagccccctgaagctggacgccagagaggacaagagcagcgccgtggactggagccagagcctgatcaacggcttcggcagcagcagcgagggcagcagcgagaagcagagcaacagcaccctgagcttcgactggagccagcccagcgtggtgttccaggacgacagcctggagctgaagtgggacagcgacaacgacgaggagaacgaggacgtgcccatcagcatgaaggagctgaagcccctgcagagaaagaccgacaagaagctggacgacatcagcagcaactacaccgagagcttcagcaccctggacgagaacgacctgctgaaccccagcgaggacatcatcgccgtgcagctgaagttcagagcctgcctgaagatcctgaccgtggagctgagaaccctgagcaccggctacgagatcgacggcggcaagctgagataccagctgtaccactggctggagaaggaggtgatcgccctgcagagaacctgcgacttctgcagcgacgccgaggagctgcagagcgccttcggcagaaacgaggacgagttcggcctgaacgaggacgccgaggacctgccccaccagaccaaggtgaagcagctgagagagaacttccaggagaagagacagtggctgctgaagtaccagagcctgctgagaatgttcctgagctactgcatcctgcacggcagccacggcggcggcctggccagcgtgagaatggagctgatcctgctgctgcaggagagccagcaggagaccagcgagcccctgttcagcagccccctgagcgagcagaccagcgtgcccctgctgttcgcctgcaccgccaacgccaagaccgtggtggccaaccccctgctgcacctgagcaacctgacccacgacatcctgcacgccatcatcaacttcgacagccccccccaccccgacatccagagcaacaaggtgtacgtgatgcacaccctggccgccagcctgagcgcctgcatctaccagtgcctgtgcggcagccacaactacagcagcttccagaccaaccagttcaccggcatggtgtaccagaccgtgctgctgccccacagacccagcctgaagaccggcagcctggacgaggccctgacccccaacaccagccccgcccagtggcccggcatcacctgcctgatcagactgctgaacagcagcggcgaggaggcccagagcggcctgaccgtgctgctgtgcgagatcctgaccgccgtgtacctgagcctgttcatccacggcctggccacccacagcagcaacgagctgttcagaatcgtggcccaccccctgaacgagaagatgtggagcgccgtgttcggcggcggcgcccacgtgcccagcaaggagcagacccacagcaagaccctgcccgtgagcagcctggtggaggagggcgagaagcagaacaagagattcagacccagcaagatgagctgcagagagagcgcccccctgacccccagcagcgcccccgtgagccaggagagcctggccgtgaaggagaagttcatcccccccgagctgagcatctgggactacttcatcgccaagcccttcctgcccagcagccagagcagagccgagtacgacagcgaggagagcctgggcagcgacgacgacgacaacgacgacgacgacgacgtgctggccagcgacttccacctgcaggagcacagcaacagcaacagctacagctggagcctgatgagactggccatggtgcagctggtgctgaacaacctgaagaccttctaccccttcgccggccacgacctggccgagctgcccgtgagcagccccctgtgccacgccgtgctgaagaccctgcagtgctgggagcaggtgctgctgagaagactggagatccacggcggccccccccagaactacatcgccagccacaccgccgaggagagcctgagcgccggccccgccatcctgagacacaaggccctgctggagcccaccaacacccccttcaagagcaagcaccacctggccctgagcgtgaagagactgtggcagtacctggtgaagcaggaggagatccaggagaccttcatcaagaacatcttcaccaagaagagatgcctgaacgagagcctggaggacaacagcgagaccatcaagaacagcatgatggaggagcccaacatcaacaagatcgaggccgacctgggctaccccggcggcaaggccagaatcatccacaaggagagcgacatcatcaccgccttcgccgtgaacaaggccaacagaaactgcatcgccatcgccagcagccacgacgtgcaggagctggacgtgagcggcatcctggccacccaggtgtacacctgggtggacgacgacatcgaggtggagaccaagggcagcgaggacttcctggtgatccacgccagagacgacctgaccgccgtgcagggcaccaccccctacacccacagcaaccccggcacccccatcaacatgccctggctgggcagcacccagaccggcagaggcgccagcgtgatgatcaagaaggccatcaacaacgtgagaagaatgaccagccaccccaccctgccctactacctgaccggcgcccaggacggcagcgtgagaatgttcgagtggggccacagccagcagatcacctgcttcagaagcggcggcaacagcagagtgaccagaatgagattcaactaccagggcaacaagttcggcatcgtggacgccgacggctacctgagcctgtaccagaccaactggaagtgctgccccgtgaccggcagcatgcccaagccctacctgacctggcagtgccacaacaagaccgccaacgacttcgtgttcgtgagcagcagcagcctgatcgccaccgccggcctgagcaccgacaacagaaacgtgtgcctgtgggacaccctggtggcccccgccaacagcctggtgcacgccttcacctgccacgacagcggcgccaccgtgctggcctacgcccccaagcaccagctgctgatcagcggcggcagaaagggcttcacctacgtgttcgacctgtgccagagacagcagagacagctgttccagagccacgacagccccgtgaaggccgtggccgtggaccccaccgaggagtacttcgtgaccggcagcgccgagggcaacatcaagatctggagcctgagcaccttcggcctgctgcacaccttcgtgagcgagcacgccagacagagcatcttcagaaacatcggcaccggcgtgatgcagatcgagaccggccccgccaaccacatcttcagctgcggcgccgacggcaccatgaagatgagaatcctgcccgaccagttcagccccctgaacgaggtgctgaagaacgacgtgaagttcatgctgtag

SEQ ID NO: 79446 - DNA, 9111 bp, synthetic construct
  misc_feature 1..9111: note = Description of Artificial Sequence: Synthetic coding sequence
  source 1..9111: mol_type = other DNA
atgcacctgcaccaggtgctgaccggcgccgtgaaccccggcgacaactgctacagcgtgggcagcgtgggcgacgtgcccttcaccgcctacggcagcggctgcgacatcgtgatcctggccaacgacttcgagtgcgtgcagatcatccccggcgccaagcacggcaacatccaggtgagctgcgtggagtgcagcaaccagcagggcagaatcgccgccagctacggcaacgccgtgtgcatcttcgagcccctgggcatcaacagccacaagagaaactgccagctgaagtgccagtggctgaagaccggccagttcttcctgagcagcgtgacctacaacctggcctgggacccccaggacaacagactgctgaccgccaccgacagcatccagctgtgggccccccccggcgacgacatcctggaggaggaggaggagatcgacaacaccgtgccccccgtgctgaacgactggaagtgcgtgtggcagtgcaagaccagcgtgagcgtgcacctgatggagtggagccccgacggcgagtacttcgccaccgccggcaaggacgactgcctgctgaaggtgtggtaccccatgaccggctggaagagcagcatcatcccccaggaccaccacgaggtgaagagaagacagagcagcacccagttcagcttcgtgtacctggcccaccccagagccgtgaccggcttcagctggagaaagaccagcaagtacatgcccagaggcagcgtgtgcaacgtgctgctgaccagctgccacgacggcgtgtgcagactgtgggccgagaccctgctgcccgaggactgcctgctgggcgagcagatctgcgagaccaccaccagcagcatcgccagcagcctgagccacgccggcagacacaaggacagaatccagcacgccctggagaccatccaccacctgaagaacctgagaaagggccagagaagaagcagcgtgctggtgacccacgccgagctgatgcccgaccagaccgccatgcacgaggtgcagagacacatcagccaccacgccaacgccctgtgccacttccacatcgccgccagcatcaaccccgccaccgacatccccaacgtgctggtgggcaccgccttcaacgtggacgacggcaacggcggcttcgtggtgcactggctgaacaacaaggagttccacttcaccagcagcaccgaggtgttcatgcaccagctgagaaagctgagcgacaagcaggtggaccacgagaacgacgacgccgacagagaggacgaggagcacagccaggaggacagagagagaggcctgcacatgaagctggaccacgacctgagcctggacagagagagcgaggccggcaccggcagcagcgagcacgaggacggcgagagagagggcagccccagaacctacagcagactgagcgtgcccatgcccctgcccaccgtgctgctggacagaaagatcgagaccctgctgaccgagtggaacaagaaccccgacatgctgttcaccatccaccccgtggacggcaccttcctggtgtggcacgtgaagtacctggacgagtacaaccccggcatcttcagacaggtgcaggtgagcttcagcagcagaatccccgtggccttccccagcggcgacgccagcagcctgagcaagaacatcatgatgtacgcctgcatcaacgccaccaaggacagccaccacaccctgctgcaccaggagggcatgagcgtgggcagcccccacggcagccagccccacagcagaagccacagcacccacatgaacatcctggcccccaccgtgatgatgatcagcaagcacatcgacggcagcctgaaccagtgggccgtgaccttcgccgacaagagcgccttcaccaccgtgctgaccgtgagccacaagttcagatactgcggccacagattccacctgaacgacctggcctgccacagcgtgctgcccctgctgctgaccagcagccaccacaacgccctgctgacccccgagctggactgccagtgggacagcgacaacaagctgagcagactgatggaccccgtgaagcacatcaagggcagcagcaagcagcccctgagaaacgccgccaccagaaccttccacgaccccaacgccatctacagcgagctgatcctgtggagagtggaccccatcggccccctgagctacaccggcggcgtgagcgagctggccagaatcaacagcctgcacaccagcgccttcagcaacgtggcctggctgcccaccctgatccccagctactgcctgggcacctactgcaacagcgccagcgcctgcttcgtggccagcgacggcaagaacctgagactgtaccaggccgtggtggacgccagaaagctgctggacgagctgagcgaccccgagagcagcaagctgatcggcgaggtgttcaacatcgtgagccagcagagcaccgccagacccggctgcatcatcgagctggacgccatcaccaaccagtgcggcagcaacacccagctgctgcacgtgttccaggaggacttcatcatcggctacaagccccacaaggaggacatggagaagaaggagaccgagatcttcttccagcccagccagggctacagacccccccccttcagcgagaagttcttcctggtggtgatcgagaaggacagcaacaacaacagcatcctgcacatgtggcacctgcacctgaagagcgtgcaggcctgcctggccaaggccagcgagggcgccagcagcgagagcctgctgagcgtgcccggccagaagaacgtggacagcagccccgagaccagccccagcgtgagccccatgccccacagcagcagcatcgccaacctgcagaccgccagcaagctgatcctgagcagcagactggtgtacagccagcccctggacctgcccgagagcgtggaggtgatcagagccacccccagcgccggccacctgagcagcagcagcatctaccccgtgtgcctggccccctacctggtggtgaccacctgcagcgacaacaaggtgagattctggaagtgctgcatggaggccaaccccgagtgcaacaagagcgacgagaaggagatctaccactggaagagatggcccctgatgaacgacgagggcgaggacaacagcagcaccgtgagcatcgtgggcagacccgtggccgtgagctgcagctacaccggcagactggccgtggcctacaagcagcccatccaccacaacggcttcgtgagcaaggagttcagcatgcacgtgtgcatcttcgagtgcgagagcaccggcggcagcgagtgggtgctggagcagaccatccacctggacgacctggtgaaggtgggcagcgtgctggacagcagagtgagcgtggacagcaacctgttcgtgtacagcaagagcgacgccctgctgagcaaggacagatacctgatccccaacatcaagcacctggtgcacctggactgggtgagcaaggaggacggcagccacatcctgaccgtgggcgtgggcgccaacatcttcatgtacggcagactgagcggcatcgtgaccgagcagaccaacagcaaggacggcgtggccgtgatcaccctgcccctgggcggcagcatcaagcagggcgtgaagagcagatgggtgctgctgagaagcatcgacctggtgagcagcgtggacggcacccccagcctgcccgtgagcctgagctgggtgagagacggcatcctggtggtgggcatggactgcgagatgcacgtgtacgcccagtggaagcacgccgtgaagttcggcgacaccgaggccgacagcagcaacgccgaggaggccgccatgcaggaccacagcaccttcaagagcaacatgctggccagaaagagcgtggtggagggcaccgccatcagcgacgacgtgttctgcagccccaccgtgatccaggacggcggcctgttcgaggccgcccacgtgctgagccccaccctgccccagtaccaccccacccagctgctggagctgatggacctgggcaaggtgagaagagccaaggccatcctgagccacctggtgaagtgcatcgccggcgaggtggccatcgtgagagaccccgacgccggcgagggcaccaagagacacctgagcagaaccatcagcgtgagcggcagcaccgccaaggagaccgtgaccgtgggcaaggacggcaccagagactacaccgagatcgacagcatcccccccctgcccctgtacgccctgctggccgccgaccaggacaccagctacagaatcagcgaggagagcaccaagatcccccagagctacgaggaccagaccgtgagccagcccgaggaccagtacagcgagctgttccagatccaggacatccccaccgacgacatcgacctggagcccgagaagagagagaacaagagcaaggtgatcaacctgagccagtacggccccgcctacttcggccaggagcacgccagagtgctgagcagccacctgatgcacagcagcctgcccggcctgaccagactggagcagatgttcctggtggccctggccgacaccgtggccaccaccagcaccgagctggacgagagcagagacaagagctgcagcggcagagacaccctggacgagtgcggcctgagatacctgctggccatgagactgcacacctgcctgctgaccagcctgccccccctgtacagagtgcagctgctgcaccagggcgtgagcacctgccacttcgcctgggccttccacagcgaggccgaggaggagctgatcaacatgatccccgccatccagagaggcgacccccagtggagcgagctgagagccatgggcatcggctggtgggtgagaaacatcaacaccctgagaagatgcatcgagaaggtggccaaggccagcttccagagaaacaacgacgccctggacgccgccctgttctacctgagcatgaagaagaaggccgtggtgtggggcctgttcagaagccagcacgacgagaagatgaccaccttcttcagccacaacttcaacgaggacagatggagaaaggccgccctgaagaacgccttcagcctgctgggcaagcagagattcgagcagagcgccgccttcttcctgctggccggcagcctgaaggacgccatcgaggtgtgcctggagaagatggaggacatccagctggccatggtgatcgccagactgtacgagagcgagttcgagaccagcagcacctacatcagcatcctgaaccagaagatcctgggctgccagaaggacggcagcggcttcagctgcaagagactgcaccccgaccccttcctgagaagcctggcctactgggtgatgaaggactacaccagagccctggacaccctgctggagcagacccccaaggaggacgacgagcaccaggtgatcatcaagagctgcaaccccgtggccttcagcttctacaactacctgagaacccaccccctgctgatcagaagaaacctggccagccccgagggcaccctggccaccctgggcctgaagaccgagaagaacttcgtggacaagatcaacctgatcgagagaaagctgttcttcaccaccgccaacgcccacttcaaggtgggctgccccgtgctggccctggaggtgctgagcaagatccccaaggtgaccaagaccagcgccctgagcgccaagaaggaccagcccgacttcatcagccacagaatggacgacgtgcccagccacagcaaggccctgagcgacggcaacggcagcagcggcatcgagtggagcaacgtgaccagcagccagtacgactggagccagcccatcgtgaaggtggacgaggagcccctgaacctggactggggcgaggaccacgacagcgccctggacgaggaggaggacgacgccgtgggcctggtgatgaagagcaccgacgccagagagaaggacaagcagagcgaccagaaggccagcgaccccaacatgctgctgaccccccaggaggaggacgaccccgagggcgacaccgaggtggacgtgatcgccgagcagctgaagttcagagcctgcctgaagatcctgatgaccgagctgagaaccctggccaccggctacgaggtggacggcggcaagctgagattccagctgtacaactggctggagaaggagatcgccgccctgcacgagatctgcaaccacgagagcgtgatcaaggagtacagcagcaagacctacagcaaggtggagagcgacctgctggaccaggaggagatggtggacaagcccgacatcggcagctacgagagacaccagatcgagagaagaagactgcaggccaagagagagcacgccgagagaagaaagagctggctgcagaagaaccaggacctgctgagagtgttcctgagctactgcagcctgcacggcgcccagggcggcggcctggccagcgtgagaatggagctgaagttcctgctgcaggagagccagcaggagaccaccgtgaagcagctgcagagccccctgcccctgcccaccaccctgcccctgctgagcgccagcatcgccagcaccaagaccgtgatcgccaaccccgtgctgtacctgaacaaccacatccacgacatcctgtacaccatcgtgcagatgaagacccccccccaccccagcatcgaggacgtgaaggtgcacaccctgcacagcctggccgccagcctgagcgccagcatctaccaggccctgtgcgacagccacagctacagccagaccgagggcaaccagttcaccggcatggcctaccagggcctgctgctgagcgacagaagaagactgagaaccgagagcatcgaggagcacgccacccccaacagcagccccgcccagtggcccggcgtgagcagcctgatcaacctgctgagcagcgcccaggacgaggaccagcccaagctgaacatcctgctgtgcgaggccgtggtggccgtgtacctgagcctgctgatccacgccctggccaccaacagcagcagcgagctgttcagactggccgcccaccccctgaacaacagaatgtgggccgccgtgttcggcggcggcgtgaagctggtggtgaagcccagaagacagagcgagaacatcagcgccccccccgtgctgagcgaggacatcgacaagcacagaagaagattcaacatgagaatgctggtgcccggcagacccgtgaaggacgccacccccccccccgtgcccgccgagagacccagctacaaggagaagttcatcccccccgagctgagcatgtgggactacttcgtggccaagcccttcctgcccctgagcgacagcggcgtgatctacgacagcgacgagagcatccacagcgacgaggaggacgacgccttcttcagcgacacccagatccaggagcaccaggaccccaacagctacagctgggccctgctgcacctgaccatggtgaagctggccctgcacaacgtgaagaacttcttccccatcgccggcctggagttcagcgagctgcccgtgaccagccccctgggcatcgccgtgatcaagaacctggagaactgggagcagatcctgcaggagaagatggaccagttcgagggccccccccccaactacatcaacacctaccccaccgacctgagcgtgggcgccggccccgccatcctgagaaacaaggccatgctggagcccgagaacacccccttcaagagcagagacagcagcgccttccccgtgaagagactgtggcacttcctggtgaagcaggaggtgctgcaggagaccttcatcagatacatcttcaccaagaagagaaagcagagcgaggtggaggccgacctgggctaccccggcggcaaggccaaggtgatccacaaggagagcgacatgatcatggccttcagcgtgaacaaggccaactgcaacgagatcgtgctggccagcacccacgacgtgcaggagctggacgtgaccagcctgctggcctgccagagctacatctggatcggcgaggagtacgacagagagagcaagagcagcgacgacgtggactacagaggcagcaccaccaccctgtaccagcccagcgccaccagctacagcgccagccaggtgcacccccccagcagcctgccctggctgggcaccggccagaccagcaccggcgccagcgtgctgatgaagagaaacctgcacaacgtgaagagaatgaccagccaccccgtgcaccagtactacctgaccggcgcccaggacggcagcgtgagaatgttcgagtggaccagaccccagcagctggtgtgcttcagacaggccggcaacgccagagtgaccagactgtacttcaacagccagggcaacaagtgcggcgtggccgacggcgagggcttcctgagcatctggcaggtgaaccagaccgccagcaaccccaagccctacatgagctggcagtgccacagcaaggccaccagcgacttcgccttcatcaccagcagcagcctggtggccaccagcggccacagcaacgacaacagaaacgtgtgcctgtgggacaccctgatcagccccggcaacagcctgatccacggcttcacctgccacgaccacggcgccaccgtgctgcagtacgcccccaagcagcagctgctgatcagcggcggcagaaagggccacgtgtgcatcttcgacatcagacagagacagctgatccacaccttccaggcccacgacagcgccatcaaggccctggccctggacccctacgaggagtacttcaccaccggcagcgccgagggcaacatcaaggtgtggagactgaccggccacggcctgatccacagcttcaagagcgagcacgccaagcagagcatcttcagaaacatcggcgccggcgtgatgcagatcgacatcatccagggcaacagactgttcagctgcggcgccgacggcaccctgaagaccagagtgctgcccaacgccttcaacatccccaacagaatcctggacatcctgtag

SEQ ID NO: 79447 - DNA, 1809 bp, synthetic construct
  misc_feature 1..1809: note = Description of Artificial Sequence: Synthetic coding sequence
  source 1..1809: mol_type = other DNA
atgtgggactacttcgtggccaagcccttcctgcccctgagcgacagcggcgtgatctacgacagcgacgagagcatccacagcgacgaggaggacgacgccttcttcagcgacacccagatccaggagcaccaggaccccaacagctacagctgggccctgctgcacctgaccatggtgaagctggccctgcacaacgtgaagaacttcttccccatcgccggcctggagttcagcgagctgcccgtgaccagccccctgggcatcgccgtgatcaagaacctggagaactgggagcagatcctgcaggagaagatggaccagttcgagggccccccccccaactacatcaacacctaccccaccgacctgagcgtgggcgccggccccgccatcctgagaaacaaggccatgctggagcccgagaacacccccttcaagagcagagacagcagcgccttccccgtgaagagactgtggcacttcctggtgaagcaggaggtgctgcaggagaccttcatcagatacatcttcaccaagaagagaaagcagagcgagagcatcgaggagcacgtggagcaggtgaaccagaactgcatcgccgaggactgccacatcaaggtggaggccgacctgggctaccccggcggcaaggccaaggtgatccacaaggagagcgacatgatcatggccttcagcgtgaacaaggccaactgcaacgagatcgtgctggccagcacccacgacgtgcaggagctggacgtgaccagcctgctggcctgccagagctacatctggatcggcgaggagtacgacagagagagcaagagcagcgacgacgtggactacagaggcagcaccaccaccctgtaccagcccagcgccaccagctacagcgccagccaggtgcacccccccagcagcctgccctggctgggcaccggccagaccagcaccggcgccagcgtgctgatgaagagaaacctgcacaacgtgaagagaatgaccagccaccccgtgcaccagtactacctgaccggcgcccaggacggcagcgtgagaatgttcgagtggaccagaccccagcagctggtgtgcttcagacaggccggcaacgccagagtgaccagactgtacttcaacagccagggcaacaagtgcggcgtggccgacggcgagggcttcctgagcatctggcaggtgaaccagaccgccagcaaccccaagccctacatgagctggcagtgccacagcaaggccaccagcgacttcgccttcatcaccagcagcagcctggtggccaccagcggccacagcaacgacaacagaaacgtgtgcctgtgggacaccctgatcagccccggcaacagcctgatccacggcttcacctgccacgaccacggcgccaccgtgctgcagtacgcccccaagcagcagctgctgatcagcggcggcagaaagggccacgtgtgcatcttcgacatcagacagagacagctgatccacaccttccaggcccacgacagcgccatcaaggccctggccctggacccctacgaggagtacttcaccaccggcagcgccgagggcaacatcaaggtgtggagactgaccggccacggcctgatccacagcttcaagagcgagcacgccaagcagagcatcttcagaaacatcggcgccggcgtgatgcagatcgacatcatccagggcaacagactgttcagctgcggcgccgacggcaccctgaagaccagagtgctgcccaacgccttcaacatccccaacagaatcctggacatcctgtag

SEQ ID NO: 79448 - DNA, 7203 bp, synthetic construct
  misc_feature 1..7203: note = Description of Artificial Sequence: Synthetic coding sequence
  source 1..7203: mol_type = other DNA
atgcacctgcaccaggtgctgaccggcgccgtgaaccccggcgacaactgctacagcgtgggcagcgtgggcgacgtgcccttcaccgcctacggcagcggctgcgacatcgtgatcctggccaacgacttcgagtgcgtgcagatcatccccggcgccaagcacggcaacatccaggtgagctgcgtggagtgcagcaaccagcagggcagaatcgccgccagctacggcaacgccgtgtgcatcttcgagcccctgggcatcaacagccacaagagaaactgccagctgaagtgccagtggctgaagaccggccagttcttcctgagcagcgtgacctacaacctggcctgggacccccaggacaacagactgctgaccgccaccgacagcatccagctgtgggccccccccggcgacgacatcctggaggaggaggaggagatcgacaacaccgtgccccccgtgctgaacgactggaagtgcgtgtggcagtgcaagaccagcgtgagcgtgcacctgatggagtggagccccgacggcgagtacttcgccaccgccggcaaggacgactgcctgctgaaggtgtggtaccccatgaccggctggaagagcagcatcatcccccaggaccaccacgaggtgaagagaagacagagcagcacccagttcagcttcgtgtacctggcccaccccagagccgtgaccggcttcagctggagaaagaccagcaagtacatgcccagaggcagcgtgtgcaacgtgctgctgaccagctgccacgacggcgtgtgcagactgtgggccgagaccctgctgcccgaggactgcctgctgggcgagcagatctgcgagaccaccaccagcagcatcgccagcagcctgagccacgccggcagacacaaggacagaatccagcacgccctggagaccatccaccacctgaagaacctgagaaagggccagagaagaagcagcgtgctggtgacccacgccgagctgatgcccgaccagaccgccatgcacgaggtgcagagacacatcagccaccacgccaacgccctgtgccacttccacatcgccgccagcatcaaccccgccaccgacatccccaacgtgctggtgggcaccgccttcaacgtggacgacggcaacggcggcttcgtggtgcactggctgaacaacaaggagttccacttcaccagcagcaccgaggtgttcatgcaccagctgagaaagctgagcgacaagcaggtggaccacgagaacgacgacgccgacagagaggacgaggagcacagccaggaggacagagagagaggcctgcacatgaagctggaccacgacctgagcctggacagagagagcgaggccggcaccggcagcagcgagcacgaggacggcgagagagagggcagccccagaacctacagcagactgagcgtgcccatgcccctgcccaccgtgctgctggacagaaagatcgagaccctgctgaccgagtggaacaagaaccccgacatgctgttcaccatccaccccgtggacggcaccttcctggtgtggcacgtgaagtacctggacgagtacaaccccggcatcttcagacaggtgcaggtgagcttcagcagcagaatccccgtggccttccccagcggcgacgccagcagcctgagcaagaacatcatgatgtacgcctgcatcaacgccaccaaggacagccaccacaccctgctgcaccaggagggcatgagcgtgggcagcccccacggcagccagccccacagcagaagccacagcacccacatgaacatcctggcccccaccgtgatgatgatcagcaagcacatcgacggcagcctgaaccagtgggccgtgaccttcgccgacaagagcgccttcaccaccgtgctgaccgtgagccacaagttcagatactgcggccacagattccacctgaacgacctggcctgccacagcgtgctgcccctgctgctgaccagcagccaccacaacgccctgctgacccccgagctggactgccagtgggacagcgacaacaagctgagcagactgatggaccccgtgaagcacatcaagggcagcagcaagcagcccctgagaaacgccgccaccagaaccttccacgaccccaacgccatctacagcgagctgatcctgtggagagtggaccccatcggccccctgagctacaccggcggcgtgagcgagctggccagaatcaacagcctgcacaccagcgccttcagcaacgtggcctggctgcccaccctgatccccagctactgcctgggcacctactgcaacagcgccagcgcctgcttcgtggccagcgacggcaagaacctgagactgtaccaggccgtggtggacgccagaaagctgctggacgagctgagcgaccccgagagcagcaagctgatcggcgaggtgttcaacatcgtgagccagcagagcaccgccagacccggctgcatcatcgagctggacgccatcaccaaccagtgcggcagcaacacccagctgctgcacgtgttccaggaggacttcatcatcggctacaagccccacaaggaggacatggagaagaaggagaccgagatcttcttccagcccagccagggctacagacccccccccttcagcgagaagttcttcctggtggtgatcgagaaggacagcaacaacaacagcatcctgcacatgtggcacctgcacctgaagagcgtgcaggcctgcctgggcagagacaccctggacgagtgcggcctgagatacctgctggccatgagactgcacacctgcctgctgaccagcctgccccccctgtacagagtgcagctgctgcaccagggcgtgagcacctgccacttcgcctgggccttccacagcgaggccgaggaggagctgatcaacatgatccccgccatccagagaggcgacccccagtggagcgagctgagagccatgggcatcggctggtgggtgagaaacatcaacaccctgagaagatgcatcgagaaggtggccaaggccagcttccagagaaacaacgacgccctggacgccgccctgttctacctgagcatgaagaagaaggccgtggtgtggggcctgttcagaagccagcacgacgagaagatgaccaccttcttcagccacaacttcaacgaggacagatggagaaaggccgccctgaagaacgccttcagcctgctgggcaagcagagattcgagcagagcgccgccttcttcctgctggccggcagcctgaaggacgccatcgaggtgtgcctggagaagatggaggacatccagctggccatggtgatcgccagactgtacgagagcgagttcgagaccagcagcacctacatcagcatcctgaaccagaagatcctgggctgccagaaggacggcagcggcttcagctgcaagagactgcaccccgaccccttcctgagaagcctggcctactgggtgatgaaggactacaccagagccctggacaccctgctggagcagacccccaaggaggacgacgagcaccaggtgatcatcaagagctgcaaccccgtggccttcagcttctacaactacctgagaacccaccccctgctgatcagaagaaacctggccagccccgagggcaccctggccaccctgggcctgaagaccgagaagaacttcgtggacaagatcaacctgatcgagagaaagctgttcttcaccaccgccaacgcccacttcaaggtgggctgccccgtgctggccctggaggtgctgagcaagatccccaaggtgaccaagaccagcgccctgagcgccaagaaggaccagcccgacttcatcagccacagaatggacgacgtgcccagccacagcaaggccctgagcgacggcaacggcagcagcggcatcgagtggagcaacgtgaccagcagccagtacgactggagccagcccatcgtgaaggtggacgaggagcccctgaacctggactggggcgaggaccacgacagcgccctggacgaggaggaggacgacgccgtgggcctggtgatgaagagcaccgacgccagagagaaggacaagcagagcgaccagaaggccagcgaccccaacatgctgctgaccccccaggaggaggacgaccccgagggcgacaccgaggtggacgtgatcgccgagcagctgaagttcagagcctgcctgaagatcctgatgaccgagctgagaaccctggccaccggctacgaggtggacggcggcaagctgagattccagctgtacaactggctggagaaggagatcgccgccctgcacgagatctgcaaccacgagagcgtgatcaaggagtacagcagcaagacctacagcaaggtggagagcgacctgctggaccaggaggagatggtggacaagcccgacatcggcagctacgagagacaccagatcgagagaagaagactgcaggccaagagagagcacgccgagagaagaaagagctggctgcagaagaaccaggacctgctgagagtgttcctgagctactgcagcctgcacggcgcccagggcggcggcctggccagcgtgagaatggagctgaagttcctgctgcaggagagccagcaggagaccaccgtgaagcagctgcagagccccctgcccctgcccaccaccctgcccctgctgagcgccagcatcgccagcaccaagaccgtgatcgccaaccccgtgctgtacctgaacaaccacatccacgacatcctgtacaccatcgtgcagatgaagacccccccccaccccagcatcgaggacgtgaaggtgcacaccctgcacagcctggccgccagcctgagcgccagcatctaccaggccctgtgcgacagccacagctacagccagaccgagggcaaccagttcaccggcatggcctaccagggcctgctgctgagcgacagaagaagactgagaaccgagagcatcgaggagcacgccacccccaacagcagccccgcccagtggcccggcgtgagcagcctgatcaacctgctgagcagcgcccaggacgaggaccagcccaagctgaacatcctgctgtgcgaggccgtggtggccgtgtacctgagcctgctgatccacgccctggccaccaacagcagcagcgagctgttcagactggccgcccaccccctgaacaacagaatgtgggccgccgtgttcggcggcggcgtgaagctggtggtgaagcccagaagacagagcgagaacatcagcgccccccccgtgctgagcgaggacatcgacaagcacagaagaagattcaacatgagaatgctggtgcccggcagacccgtgaaggacgccacccccccccccgtgcccgccgagagacccagctacaaggagaagttcatcccccccgagctgagcatgtgggactacttcgtggccaagcccttcctgcccctgagcgacagcggcgtgatctacgacagcgacgagagcatccacagcgacgaggaggacgacgccttcttcagcgacacccagatccaggagcaccaggaccccaacagctacagctgggccctgctgcacctgaccatggtgaagctggccctgcacaacgtgaagaacttcttccccatcgccggcctggagttcagcgagctgcccgtgaccagccccctgggcatcgccgtgatcaagaacctggagaactgggagcagatcctgcaggagaagatggaccagttcgagggccccccccccaactacatcaacacctaccccaccgacctgagcgtgggcgccggccccgccatcctgagaaacaaggccatgctggagcccgagaacacccccttcaagagcagagacagcagcgccttccccgtgaagagactgtggcacttcctggtgaagcaggaggtgctgcaggagaccttcatcagatacatcttcaccaagaagagaaagcagagcgaggtggaggccgacctgggctaccccggcggcaaggccaaggtgatccacaaggagagcgacatgatcatggccttcagcgtgaacaaggccaactgcaacgagatcgtgctggccagcacccacgacgtgcaggagctggacgtgaccagcctgctggcctgccagagctacatctggatcggcgaggagtacgacagagagagcaagagcagcgacgacgtggactacagaggcagcaccaccaccctgtaccagcccagcgccaccagctacagcgccagccaggtgcacccccccagcagcctgccctggctgggcaccggccagaccagcaccggcgccagcgtgctgatgaagagaaacctgcacaacgtgaagagaatgaccagccaccccgtgcaccagtactacctgaccggcgcccaggacggcagcgtgagaatgttcgagtggaccagaccccagcagctggtgtgcttcagacaggccggcaacgccagagtgaccagactgtacttcaacagccagggcaacaagtgcggcgtggccgacggcgagggcttcctgagcatctggcaggtgaaccagaccgccagcaaccccaagccctacatgagctggcagtgccacagcaaggccaccagcgacttcgccttcatcaccagcagcagcctggtggccaccagcggccacagcaacgacaacagaaacgtgtgcctgtgggacaccctgatcagccccggcaacagcctgatccacggcttcacctgccacgaccacggcgccaccgtgctgcagtacgcccccaagcagcagctgctgatcagcggcggcagaaagggccacgtgtgcatcttcgacatcagacagagacagctgatccacaccttccaggcccacgacagcgccatcaaggccctggccctggacccctacgaggagtacttcaccaccggcagcgccgagggcaacatcaaggtgtggagactgaccggccacggcctgatccacagcttcaagagcgagcacgccaagcagagcatcttcagaaacatcggcgccggcgtgatgcagatcgacatcatccagggcaacagactgttcagctgcggcgccgacggcaccctgaagaccagagtgctgcccaacgccttcaacatccccaacagaatcctggacatcctgtag

SEQ ID NO: 79449 - DNA, 9114 bp, synthetic construct
  misc_feature 1..9114: note = Description of Artificial Sequence: Synthetic coding sequence
  source 1..9114: mol_type = other DNA
atgcacctgcaccaggtgctgaccggcgccgtgaaccccggcgacaactgctacagcgtgggcagcgtgggcgacgtgcccttcaccgcctacggcagcggctgcgacatcgtgatcctggccaacgacttcgagtgcgtgcagatcatccccggcgccaagcacggcaacatccaggtgagctgcgtggagtgcagcaaccagcagggcagaatcgccgccagctacggcaacgccgtgtgcatcttcgagcccctgggcatcaacagccacaagagaaactgccagctgaagtgccagtggctgaagaccggccagttcttcctgagcagcgtgacctacaacctggcctgggacccccaggacaacagactgctgaccgccaccgacagcatccagctgtgggccccccccggcgacgacatcctggaggaggaggaggagatcgacaacaccgtgccccccgtgctgaacgactggaagtgcgtgtggcagtgcaagaccagcgtgagcgtgcacctgatggagtggagccccgacggcgagtacttcgccaccgccggcaaggacgactgcctgctgaaggtgtggtaccccatgaccggctggaagagcagcatcatcccccaggaccaccacgaggtgaagagaagacagagcagcacccagttcagcttcgtgtacctggcccaccccagagccgtgaccggcttcagctggagaaagaccagcaagtacatgcccagaggcagcgtgtgcaacgtgctgctgaccagctgccacgacggcgtgtgcagactgtgggccgagaccctgctgcccgaggactgcctgctgggcgagcagatctgcgagaccaccaccagcagcatcgccagcagcctgagccacgccggcagacacaaggacagaatccagcacgccctggagaccatccaccacctgaagaacctgagaaagggccagagaagaagcagcgtgctggtgacccacgccgagctgatgcccgaccagaccgccatgcacgaggtgcagagacacatcagccaccacgccaacgccctgtgccacttccacatcgccgccagcatcaaccccgccaccgacatccccaacgtgctggtgggcaccgccttcaacgtggacgacggcaacggcggcttcgtggtgcactggctgaacaacaaggagttccacttcaccagcagcaccgaggtgttcatgcaccagctgagaaagctgagcgacaagcaggtggaccacgagaacgacgacgccgacagagaggacgaggagcacagccaggaggacagagagagaggcctgcacatgaagctggaccacgacctgagcctggacagagagagcgaggccggcaccggcagcagcgagcacgaggacggcgagagagagggcagccccagaacctacagcagactgagcgtgcccatgcccctgcccaccgtgctgctggacagaaagatcgagaccctgctgaccgagtggaacaagaaccccgacatgctgttcaccatccaccccgtggacggcaccttcctggtgtggcacgtgaagtacctggacgagtacaaccccggcatcttcagacaggtgcaggtgagcttcagcagcagaatccccgtggccttccccagcggcgacgccagcagcctgagcaagaacatcatgatgtacgcctgcatcaacgccaccaaggacagccaccacaccctgctgcaccaggagggcatgagcgtgggcagcccccacggcagccagccccacagcagaagccacagcacccacatgaacatcctggcccccaccgtgatgatgatcagcaagcacatcgacggcagcctgaaccagtgggccgtgaccttcgccgacaagagcgccttcaccaccgtgctgaccgtgagccacaagttcagatactgcggccacagattccacctgaacgacctggcctgccacagcgtgctgcccctgctgctgaccagcagccaccacaacgccctgctgacccccgagctggactgccagtgggacagcgacaacaagctgagcagactgatggaccccgtgaagcacatcaagggcagcagcaagcagcccctgagaaacgccgccaccagaaccttccacgaccccaacgccatctacagcgagctgatcctgtggagagtggaccccatcggccccctgagctacaccggcggcgtgagcgagctggccagaatcaacagcctgcacaccagcgccttcagcaacgtggcctggctgcccaccctgatccccagctactgcctgggcacctactgcaacagcgccagcgcctgcttcgtggccagcgacggcaagaacctgagactgtaccaggccgtggtggacgccagaaagctgctggacgagctgagcgaccccgagagcagcaagctgatcggcgaggtgttcaacatcgtgagccagcagagcaccgccagacccggctgcatcatcgagctggacgccatcaccaaccagtgcggcagcaacacccagctgctgcacgtgttccaggaggacttcatcatcggctacaagccccacaaggaggacatggagaagaaggagaccgagatcttcttccagcccagccagggctacagacccccccccttcagcgagaagttcttcctggtggtgatcgagaaggacagcaacaacaacagcatcctgcacatgtggcacctgcacctgaagagcgtgcaggcctgcctggccaaggccagcgagggcgccagcagcgagagcctgctgagcgtgcccggccagaagaacgtggacagcagccccgagaccagccccagcgtgagccccatgccccacagcagcagcatcgccaacctgcagaccgccagcaagctgatcctgagcagcagactggtgtacagccagcccctggacctgcccgagagcgtggaggtgatcagagccacccccagcgccggccacctgagcagcagcagcatctaccccgtgtgcctggccccctacctggtggtgaccacctgcagcgacaacaaggtgagattctggaagtgctgcatggaggccaaccccgagtgcaacaagagcgacgagaaggagatctaccactggaagagatggcccctgatgaacgacgagggcgaggacaacagcagcaccgtgagcatcgtgggcagacccgtggccgtgagctgcagctacaccggcagactggccgtggcctacaagcagcccatccaccacaacggcttcgtgagcaaggagttcagcatgcacgtgtgcatcttcgagtgcgagagcaccggcggcagcgagtgggtgctggagcagaccatccacctggacgacctggtgaaggtgggcagcgtgctggacagcagagtgagcgtggacagcaacctgttcgtgtacagcaagagcgacgccctgctgagcaaggacagatacctgatccccaacatcaagcacctggtgcacctggactgggtgagcaaggaggacggcagccacatcctgaccgtgggcgtgggcgccaacatcttcatgtacggcagactgagcggcatcgtgaccgagcagaccaacagcaaggacggcgtggccgtgatcaccctgcccctgggcggcagcatcaagcagggcgtgaagagcagatgggtgctgctgagaagcatcgacctggtgagcagcgtggacggcacccccagcctgcccgtgagcctgagctgggtgagagacggcatcctggtggtgggcatggactgcgagatgcacgtgtacgcccagtggaagcacgccgtgaagttcggcgacaccgaggccgacagcagcaacgccgaggaggccgccatgcaggaccacagcaccttcaagagcaacatgctggccagaaagagcgtggtggagggcaccgccatcagcgacgacgtgttctgcagccccaccgtgatccaggacggcggcctgttcgaggccgcccacgtgctgagccccaccctgccccagtaccaccccacccagctgctggagctgatggacctgggcaaggtgagaagagccaaggccatcctgagccacctggtgaagtgcatcgccggcgaggtggccatcgtgagagaccccgacgccggcgagggcaccaagagacacctgagcagaaccatcagcgtgagcggcagcaccgccaaggagaccgtgaccgtgggcaaggacggcaccagagactacaccgagatcgacagcatcccccccctgcccctgtacgccctgctggccgccgaccaggacaccagctacagaatcagcgaggagagcaccaagatcccccagagctacgaggaccagaccgtgagccagcccgaggaccagtacagcgagctgttccagatccaggacatccccaccgacgacatcgacctggagcccgagaagagagagaacaagagcaaggtgatcaacctgagccagtacggccccgcctacttcggccaggagcacgccagagtgctgagcagccacctgatgcacagcagcctgcccggcctgaccagactggagcagatgttcctggtggccctggccgacaccgtggccaccaccagcaccgagctggacgagagcagagacaagagctgcagcggcagagacaccctggacgagtgcggcctgagatacctgctggccatgagactgcacacctgcctgctgaccagcctgccccccctgtacagagtgcagctgctgcaccagggcgtgagcacctgccacttcgcctgggccttccacagcgaggccgaggaggagctgatcaacatgatccccgccatccagagaggcgacccccagtggagcgagctgagagccatgggcatcggctggtgggtgagaaacatcaacaccctgagaagatgcatcgagaaggtggccaaggccagcttccagagaaacaacgacgccctggacgccgccctgttctacctgagcatgaagaagaaggccgtggtgtggggcctgttcagaagccagcacgacgagaagatgaccaccttcttcagccacaacttcaacgaggacagatggagaaaggccgccctgaagaacgccttcagcctgctgggcaagcagagattcgagcagagcgccgccttcttcctgctggccggcagcctgaaggacgccatcgaggtgtgcctggagaagatggaggacatccagctggccatggtgatcgccagactgtacgagagcgagttcgagaccagcagcacctacatcagcatcctgaaccagaagatcctgggctgccagaaggacggcagcggcttcagctgcaagagactgcaccccgaccccttcctgagaagcctggcctactgggtgatgaaggactacaccagagccctggacaccctgctggagcagacccccaaggaggacgacgagcaccaggtgatcatcaagagctgcaaccccgtggccttcagcttctacaactacctgagaacccaccccctgctgatcagaagaaacctggccagccccgagggcaccctggccaccctgggcctgaagaccgagaagaacttcgtggacaagatcaacctgatcgagagaaagctgttcttcaccaccgccaacgcccacttcaaggtgggctgccccgtgctggccctggaggtgctgagcaagatccccaaggtgaccaagaccagcgccctgagcgccaagaaggaccagcccgacttcatcagccacagaatggacgacgtgcccagccacagcaaggccctgagcgacggcaacggcagcagcggcatcgagtggagcaacgtgaccagcagccagtacgactggagccagcccatcgtgaaggtggacgaggagcccctgaacctggactggggcgaggaccacgacagcgccctggacgaggaggaggacgacgccgtgggcctggtgatgaagagcaccgacgccagagagaaggacaagcagagcgaccagaaggccagcgaccccaacatgctgctgaccccccaggaggaggacgaccccgagggcgacaccgaggtggacgtgatcgccgagcagctgaagttcagagcctgcctgaagatcctgatgaccgagctgagaaccctggccaccggctacgaggtggacggcggcaagctgagattccagctgtacaactggctggagaaggagatcgccgccctgcacgagatctgcaaccacgagagcgtgatcaaggagtacagcagcaagacctacagcaaggtggagagcgacctgctggaccaggaggagatggtggacaagcccgacatcggcagctacgagagacaccagatcgagagaagaagactgcaggccaagagagagcacgccgagagaagaaagagctggctgcagaagaaccaggacctgctgagagtgttcctgagctactgcagcctgcacggcgcccagggcggcggcctggccagcgtgagaatggagctgaagttcctgctgcaggagagccagcaggagaccaccgtgaagcagctgcagagccccctgcccctgcccaccaccctgcccctgctgagcgccagcatcgccagcaccaagaccgtgatcgccaaccccgtgctgtacctgaacaaccacatccacgacatcctgtacaccatcgtgcagatgaagacccccccccaccccagcatcgaggacgtgaaggtgcacaccctgcacagcctggccgccagcctgagcgccagcatctaccaggccctgtgcgacagccacagctacagcagccagaccgagggcaaccagttcaccggcatggcctaccagggcctgctgctgagcgacagaagaagactgagaaccgagagcatcgaggagcacgccacccccaacagcagccccgcccagtggcccggcgtgagcagcctgatcaacctgctgagcagcgcccaggacgaggaccagcccaagctgaacatcctgctgtgcgaggccgtggtggccgtgtacctgagcctgctgatccacgccctggccaccaacagcagcagcgagctgttcagactggccgcccaccccctgaacaacagaatgtgggccgccgtgttcggcggcggcgtgaagctggtggtgaagcccagaagacagagcgagaacatcagcgccccccccgtgctgagcgaggacatcgacaagcacagaagaagattcaacatgagaatgctggtgcccggcagacccgtgaaggacgccacccccccccccgtgcccgccgagagacccagctacaaggagaagttcatcccccccgagctgagcatgtgggactacttcgtggccaagcccttcctgcccctgagcgacagcggcgtgatctacgacagcgacgagagcatccacagcgacgaggaggacgacgccttcttcagcgacacccagatccaggagcaccaggaccccaacagctacagctgggccctgctgcacctgaccatggtgaagctggccctgcacaacgtgaagaacttcttccccatcgccggcctggagttcagcgagctgcccgtgaccagccccctgggcatcgccgtgatcaagaacctggagaactgggagcagatcctgcaggagaagatggaccagttcgagggccccccccccaactacatcaacacctaccccaccgacctgagcgtgggcgccggccccgccatcctgagaaacaaggccatgctggagcccgagaacacccccttcaagagcagagacagcagcgccttccccgtgaagagactgtggcacttcctggtgaagcaggaggtgctgcaggagaccttcatcagatacatcttcaccaagaagagaaagcagagcgaggtggaggccgacctgggctaccccggcggcaaggccaaggtgatccacaaggagagcgacatgatcatggccttcagcgtgaacaaggccaactgcaacgagatcgtgctggccagcacccacgacgtgcaggagctggacgtgaccagcctgctggcctgccagagctacatctggatcggcgaggagtacgacagagagagcaagagcagcgacgacgtggactacagaggcagcaccaccaccctgtaccagcccagcgccaccagctacagcgccagccaggtgcacccccccagcagcctgccctggctgggcaccggccagaccagcaccggcgccagcgtgctgatgaagagaaacctgcacaacgtgaagagaatgaccagccaccccgtgcaccagtactacctgaccggcgcccaggacggcagcgtgagaatgttcgagtggaccagaccccagcagctggtgtgcttcagacaggccggcaacgccagagtgaccagactgtacttcaacagccagggcaacaagtgcggcgtggccgacggcgagggcttcctgagcatctggcaggtgaaccagaccgccagcaaccccaagccctacatgagctggcagtgccacagcaaggccaccagcgacttcgccttcatcaccagcagcagcctggtggccaccagcggccacagcaacgacaacagaaacgtgtgcctgtgggacaccctgatcagccccggcaacagcctgatccacggcttcacctgccacgaccacggcgccaccgtgctgcagtacgcccccaagcagcagctgctgatcagcggcggcagaaagggccacgtgtgcatcttcgacatcagacagagacagctgatccacaccttccaggcccacgacagcgccatcaaggccctggccctggacccctacgaggagtacttcaccaccggcagcgccgagggcaacatcaaggtgtggagactgaccggccacggcctgatccacagcttcaagagcgagcacgccaagcagagcatcttcagaaacatcggcgccggcgtgatgcagatcgacatcatccagggcaacagactgttcagctgcggcgccgacggcaccctgaagaccagagtgctgcccaacgccttcaacatccccaacagaatcctggacatcctgtag

SEQ ID NO: 79450 - DNA, 4851 bp, synthetic construct
  misc_feature 1..4851: note = Description of Artificial Sequence: Synthetic coding sequence
  source 1..4851: mol_type = other DNA
atgcccgccagaaccgcccccgccagagtgcccaccctggccgtgcccgccatcagcctgcccgacgacgtgagaagaagactgaaggacctggagagagacagcctgaccgagaaggagtgcgtgaaggagaagctgaacctgctgcacgagttcctgcagaccgagatcaagaaccagctgtgcgacctggagaccaagctgagaaaggaggagctgagcgaggagggctacctggccaaggtgaagagcctgctgaacaaggacctgagcctggagaacggcgcccacgcctacaacagagaggtgaacggcagactggagaacggcaaccaggccagaagcgaggccagaagagtgggcatggccgacgccaacagcccccccaagcccctgagcaagcccagaacccccagaagaagcaagagcgacggcgaggccaagcccgagcccagccccagccccagaatcaccagaaagagcaccagacagaccaccatcaccagccacttcgccaagggccccgccaagagaaagccccaggaggagagcgagagagccaagagcgacgagagcatcaaggaggaggacaaggaccaggacgagaagagaagaagagtgaccagcagagagagagtggccagacccctgcccgccgaggagcccgagagagccaagagcggcaccagaaccgagaaggaggaggagagagacgagaaggaggagaagagactgagaagccagaccaaggagcccacccccaagcagaagctgaaggaggagcccgacagagaggccagagccggcgtgcaggccgacgaggacgaggacggcgacgagaaggacgagaagaagcacagaagccagcccaaggacctggccgccaagagaagacccgaggagaaggagcccgagaaggtgaacccccagatcagcgacgagaaggacgaggacgagaaggaggagaagagaagaaagaccacccccaaggagcccaccgagaagaagatggccagagccaagaccgtgatgaacagcaagacccacccccccaagtgcatccagtgcggccagtacctggacgaccccgacctgaagtacggccagcacccccccgacgccgtggacgagccccagatgctgaccaacgagaagctgagcatcttcgacgccaacgagagcggcttcgagagctacgaggccctgccccagcacaagctgacctgcttcagcgtgtactgcaagcacggccacctgtgccccatcgacaccggcctgatcgagaagaacatcgagctgttcttcagcggcagcgccaagcccatctacgacgacgaccccagcctggagggcggcgtgaacggcaagaacctgggccccatcaacgagtggtggatcaccggcttcgacggcggcgagaaggccctgatcggcttcagcaccagcttcgccgagtacatcctgatggaccccagccccgagtacgcccccatcttcggcctgatgcaggagaagatctacatcagcaagatcgtggtggagttcctgcagagcaacagcgacagcacctacgaggacctgatcaacaagatcgagaccaccgtgccccccagcggcctgaacctgaacagattcaccgaggacagcctgctgagacacgcccagttcgtggtggagcaggtggagagctacgacgaggccggcgacagcgacgagcagcccatcttcctgaccccctgcatgagagacctgatcaagctggccggcgtgaccctgggccagagaagagcccaggccagaagacagaccatcagacacagcaccagagagaaggacagaggccccaccaaggccaccaccaccaagctggtgtaccagatcttcgacaccttcttcgccgagcagatcgagaaggacgacagagaggacaaggagaacgccttcaagagaagaagatgcggcgtgtgcgaggtgtgccagcagcccgagtgcggcaagtgcaaggcctgcaaggacatggtgaagttcggcggcagcggcagaagcaagcaggcctgccaggagagaagatgccccaacatggccatgaaggaggccgacgacgacgaggaggtggacgacaacatccccgagatgcccagccccaagaagatgcaccagggcaagaagaagaagcagaacaagaacagaatcagctgggtgggcgaggccgtgaagaccgacggcaagaagagctactacaagaaggtgtgcatcgacgccgagaccctggaggtgggcgactgcgtgagcgtgatccccgacgacagcagcaagcccctgtacctggccagagtgaccgccctgtgggaggacagcagcaacggccagatgttccacgcccactggttctgcgccggcaccgacaccgtgctgggcgccaccagcgaccccctggagctgttcctggtggacgagtgcgaggacatgcagctgagctacatccacagcaaggtgaaggtgatctacaaggcccccagcgagaactgggccatggagggcggcatggaccccgagagcctgctggagggcgacgacggcaagacctacttctaccagctgtggtacgaccaggactacgccagattcgagagcccccccaagacccagcccaccgaggacaacaagttcaagttctgcgtgagctgcgccagactggccgagatgagacagaaggagatccccagagtgctggagcagctggaggacctggacagcagagtgctgtactacagcgccaccaagaacggcatcctgtacagagtgggcgacggcgtgtacctgccccccgaggccttcaccttcaacatcaagctgagcagccccgtgaagagacccagaaaggagcccgtggacgaggacctgtaccccgagcactacagaaagtacagcgactacatcaagggcagcaacctggacgcccccgagccctacagaatcggcagaatcaaggagatcttctgccccaagaagagcaacggcagacccaacgagaccgacatcaagatcagagtgaacaagttctacagacccgagaacacccacaagagcacccccgccagctaccacgccgacatcaacctgctgtactggagcgacgaggaggccgtggtggacttcaaggccgtgcagggcagatgcaccgtggagtacggcgaggacctgcccgagtgcgtgcaggtgtacagcatgggcggccccaacagattctacttcctggaggcctacaacgccaagagcaagagcttcgaggacccccccaaccacgccagaagccccggcaacaagggcaagggcaagggcaagggcaagggcaagcccaagagccaggcctgcgagcccagcgagcccgagatcgagatcaagctgcccaagctgagaaccctggacgtgttcagcggctgcggcggcctgagcgagggcttccaccaggccggcatcagcgacaccctgtgggccatcgagatgtgggaccccgccgcccaggccttcagactgaacaaccccggcagcaccgtgttcaccgaggactgcaacatcctgctgaagctggtgatggccggcgagaccaccaacagcagaggccagagactgccccagaagggcgacgtggagatgctgtgcggcggccccccctgccagggcttcagcggcatgaacagattcaacagcagaacctacagcaagttcaagaacagcctggtggtgagcttcctgagctactgcgactactacagacccagattcttcctgctggagaacgtgagaaacttcgtgagcttcaagagaagcatggtgctgaagctgaccctgagatgcctggtgagaatgggctaccagtgcaccttcggcgtgctgcaggccggccagtacggcgtggcccagaccagaagaagagccatcatcctggccgccgcccccggcgagaagctgcccctgttccccgagcccctgcacgtgttcgcccccagagcctgccagctgagcgtggtggtggacgacaagaagttcgtgagcaacatcaccagactgagcagcggccccttcagaaccatcaccgtgagagacaccatgagcgacctgcccgaggtgagaaacggcgccagcgccctggagatcagctacaacggcgagccccagagctggttccagagacagctgagaggcgcccagtaccagcccatcctgagagaccacatctgcaaggacatgagcgccctggtggccgccagaatgagacacatccccctggcccccggcagcgactggagagacctgcccaacatcgaggtgagactgagcgacggcaccatggccagaaagctgagatacacccaccacgacagaaagaacggcagaagcagcagcggcgccctgagaggcgtgtgcagctgcgtggaggccggcaaggcctgcgaccccgccgccagacagttcaacaccctgatcccctggtgcctgccccacaccggcaacagacacaaccactgggccggcctgtacggcagactggagtgggacggcttcttcagcaccaccgtgaccaaccccgagcccatgggcaagcagggcagagtgctgcaccccgagcagcacagagtggtgagcgtgagagagtgcgccagaagccagggcttccccgacacctacagactgttcggcaacatcctggacaagcacagacaggtgggcaacgccgtgcccccccccctggccaaggccatcggcctggagatcaagctgtgcatgctggccaaggccagagagagcgccagcgccaagatcaaggaggaggaggccgccaaggactag

SEQ ID NO: 79451 - DNA, 4899 bp, synthetic construct
  misc_feature 1..4899: note = Description of Artificial Sequence: Synthetic coding sequence
  source 1..4899: mol_type = other DNA
atgcccgccagaaccgcccccgccagagtgcccaccctggccgtgcccgccatcagcctgcccgacgacgtgagaagaagactgaaggacctggagagagacagcctgaccgagaaggagtgcgtgaaggagaagctgaacctgctgcacgagttcctgcagaccgagatcaagaaccagctgtgcgacctggagaccaagctgagaaaggaggagctgagcgaggagggctacctggccaaggtgaagagcctgctgaacaaggacctgagcctggagaacggcgcccacgcctacaacagagaggtgaacggcagactggagaacggcaaccaggccagaagcgaggccagaagagtgggcatggccgacgccaacagcccccccaagcccctgagcaagcccagaacccccagaagaagcaagagcgacggcgaggccaagagaagcagagacccccccgccagcgccagccaggtgaccggcatcagagccgagcccagccccagccccagaatcaccagaaagagcaccagacagaccaccatcaccagccacttcgccaagggccccgccaagagaaagccccaggaggagagcgagagagccaagagcgacgagagcatcaaggaggaggacaaggaccaggacgagaagagaagaagagtgaccagcagagagagagtggccagacccctgcccgccgaggagcccgagagagccaagagcggcaccagaaccgagaaggaggaggagagagacgagaaggaggagaagagactgagaagccagaccaaggagcccacccccaagcagaagctgaaggaggagcccgacagagaggccagagccggcgtgcaggccgacgaggacgaggacggcgacgagaaggacgagaagaagcacagaagccagcccaaggacctggccgccaagagaagacccgaggagaaggagcccgagaaggtgaacccccagatcagcgacgagaaggacgaggacgagaaggaggagaagagaagaaagaccacccccaaggagcccaccgagaagaagatggccagagccaagaccgtgatgaacagcaagacccacccccccaagtgcatccagtgcggccagtacctggacgaccccgacctgaagtacggccagcacccccccgacgccgtggacgagccccagatgctgaccaacgagaagctgagcatcttcgacgccaacgagagcggcttcgagagctacgaggccctgccccagcacaagctgacctgcttcagcgtgtactgcaagcacggccacctgtgccccatcgacaccggcctgatcgagaagaacatcgagctgttcttcagcggcagcgccaagcccatctacgacgacgaccccagcctggagggcggcgtgaacggcaagaacctgggccccatcaacgagtggtggatcaccggcttcgacggcggcgagaaggccctgatcggcttcagcaccagcttcgccgagtacatcctgatggaccccagccccgagtacgcccccatcttcggcctgatgcaggagaagatctacatcagcaagatcgtggtggagttcctgcagagcaacagcgacagcacctacgaggacctgatcaacaagatcgagaccaccgtgccccccagcggcctgaacctgaacagattcaccgaggacagcctgctgagacacgcccagttcgtggtggagcaggtggagagctacgacgaggccggcgacagcgacgagcagcccatcttcctgaccccctgcatgagagacctgatcaagctggccggcgtgaccctgggccagagaagagcccaggccagaagacagaccatcagacacagcaccagagagaaggacagaggccccaccaaggccaccaccaccaagctggtgtaccagatcttcgacaccttcttcgccgagcagatcgagaaggacgacagagaggacaaggagaacgccttcaagagaagaagatgcggcgtgtgcgaggtgtgccagcagcccgagtgcggcaagtgcaaggcctgcaaggacatggtgaagttcggcggcagcggcagaagcaagcaggcctgccaggagagaagatgccccaacatggccatgaaggaggccgacgacgacgaggaggtggacgacaacatccccgagatgcccagccccaagaagatgcaccagggcaagaagaagaagcagaacaagaacagaatcagctgggtgggcgaggccgtgaagaccgacggcaagaagagctactacaagaaggtgtgcatcgacgccgagaccctggaggtgggcgactgcgtgagcgtgatccccgacgacagcagcaagcccctgtacctggccagagtgaccgccctgtgggaggacagcagcaacggccagatgttccacgcccactggttctgcgccggcaccgacaccgtgctgggcgccaccagcgaccccctggagctgttcctggtggacgagtgcgaggacatgcagctgagctacatccacagcaaggtgaaggtgatctacaaggcccccagcgagaactgggccatggagggcggcatggaccccgagagcctgctggagggcgacgacggcaagacctacttctaccagctgtggtacgaccaggactacgccagattcgagagcccccccaagacccagcccaccgaggacaacaagttcaagttctgcgtgagctgcgccagactggccgagatgagacagaaggagatccccagagtgctggagcagctggaggacctggacagcagagtgctgtactacagcgccaccaagaacggcatcctgtacagagtgggcgacggcgtgtacctgccccccgaggccttcaccttcaacatcaagctgagcagccccgtgaagagacccagaaaggagcccgtggacgaggacctgtaccccgagcactacagaaagtacagcgactacatcaagggcagcaacctggacgcccccgagccctacagaatcggcagaatcaaggagatcttctgccccaagaagagcaacggcagacccaacgagaccgacatcaagatcagagtgaacaagttctacagacccgagaacacccacaagagcacccccgccagctaccacgccgacatcaacctgctgtactggagcgacgaggaggccgtggtggacttcaaggccgtgcagggcagatgcaccgtggagtacggcgaggacctgcccgagtgcgtgcaggtgtacagcatgggcggccccaacagattctacttcctggaggcctacaacgccaagagcaagagcttcgaggacccccccaaccacgccagaagccccggcaacaagggcaagggcaagggcaagggcaagggcaagcccaagagccaggcctgcgagcccagcgagcccgagatcgagatcaagctgcccaagctgagaaccctggacgtgttcagcggctgcggcggcctgagcgagggcttccaccaggccggcatcagcgacaccctgtgggccatcgagatgtgggaccccgccgcccaggccttcagactgaacaaccccggcagcaccgtgttcaccgaggactgcaacatcctgctgaagctggtgatggccggcgagaccaccaacagcagaggccagagactgccccagaagggcgacgtggagatgctgtgcggcggccccccctgccagggcttcagcggcatgaacagattcaacagcagaacctacagcaagttcaagaacagcctggtggtgagcttcctgagctactgcgactactacagacccagattcttcctgctggagaacgtgagaaacttcgtgagcttcaagagaagcatggtgctgaagctgaccctgagatgcctggtgagaatgggctaccagtgcaccttcggcgtgctgcaggccggccagtacggcgtggcccagaccagaagaagagccatcatcctggccgccgcccccggcgagaagctgcccctgttccccgagcccctgcacgtgttcgcccccagagcctgccagctgagcgtggtggtggacgacaagaagttcgtgagcaacatcaccagactgagcagcggccccttcagaaccatcaccgtgagagacaccatgagcgacctgcccgaggtgagaaacggcgccagcgccctggagatcagctacaacggcgagccccagagctggttccagagacagctgagaggcgcccagtaccagcccatcctgagagaccacatctgcaaggacatgagcgccctggtggccgccagaatgagacacatccccctggcccccggcagcgactggagagacctgcccaacatcgaggtgagactgagcgacggcaccatggccagaaagctgagatacacccaccacgacagaaagaacggcagaagcagcagcggcgccctgagaggcgtgtgcagctgcgtggaggccggcaaggcctgcgaccccgccgccagacagttcaacaccctgatcccctggtgcctgccccacaccggcaacagacacaaccactgggccggcctgtacggcagactggagtgggacggcttcttcagcaccaccgtgaccaaccccgagcccatgggcaagcagggcagagtgctgcaccccgagcagcacagagtggtgagcgtgagagagtgcgccagaagccagggcttccccgacacctacagactgttcggcaacatcctggacaagcacagacaggtgggcaacgccgtgcccccccccctggccaaggccatcggcctggagatcaagctgtgcatgctggccaaggccagagagagcgccagcgccaagatcaaggaggaggaggccgccaaggactag

SEQ ID NO: 79452 - DNA, 4860 bp, synthetic construct
  misc_feature 1..4860: note = Description of Artificial Sequence: Synthetic coding sequence
  source 1..4860: mol_type = other DNA
atgcccgccagaaccgcccccgccagagtgcccaccctggccgtgcccgccatcagcctgcccgacgacgtgagaagaagactgaaggacctggagagagacagcctgaccgagaaggagtgcgtgaaggagaagctgaacctgctgcacgagttcctgcagaccgagatcaagaaccagctgtgcgacctggagaccaagctgagaaaggaggagctgagcgaggagggctacctggccaaggtgaagagcctgctgaacaaggacctgagcctggagaacggcgcccacgcctacaacagagaggtgaacggcagactggagaacggcaaccaggccagaagcgaggccagaagagtgggcatggccgacgccaacagcccccccaagcccctgagcaagcccagaacccccagaagaagcaagagcgacggcgaggccaagcccgagcccagccccagccccagaatcaccagaaagagcaccagacagaccaccatcaccagccacttcgccaagggccccgccaagagaaagccccaggaggagagcgagagagccaagagcgacgagagcatcaaggaggaggacaaggaccaggacgagaagagaagaagagtgaccagcagagagagagtggccagacccctgcccgccgaggagcccgagagagccaagagcggcaccagaaccgagaaggaggaggagagagacgagaaggaggagaagagactgagaagccagaccaaggagcccacccccaagcagaagctgaaggaggagcccgacagagaggccagagccggcgtgcaggccgacgaggacgaggacggcgacgagaaggacgagaagaagcacagaagccagcccaaggacctggccgccaagagaagacccgaggagaaggagcccgagaaggtgaacccccagatcagcgacgagaaggacgaggacgagaaggaggagaagagaagaaagaccacccccaaggagcccaccgagaagaagatggccagagccaagaccgtgatgaacagcaagacccacccccccaagtgcatccagtgcggccagtacctggacgaccccgacctgaagtacggccagcacccccccgacgccgtggacgagccccagatgctgaccaacgagaagctgagcatcttcgacgccaacgagagcggcttcgagagctacgaggccctgccccagcacaagctgacctgcttcagcgtgtactgcaagcacggccacctgtgccccatcgacaccggcctgatcgagaagaacatcgagctgttcttcagcggcagcgccaagcccatctacgacgacgaccccagcctggagggcggcgtgaacggcaagaacctgggccccatcaacgagtggtggatcaccggcttcgacggcggcgagaaggccctgatcggcttcagcaccagcttcgccgagtacatcctgatggaccccagccccgagtacgcccccatcttcggcctgatgcaggagaagatctacatcagcaagatcgtggtggagttcctgcagagcaacagcgacagcacctacgaggacctgatcaacaagatcgagaccaccgtgccccccagcggcctgaacctgaacagattcaccgaggacagcctgctgagacacgcccagttcgtggtggagcaggtggagagctacgacgaggccggcgacagcgacgagcagcccatcttcctgaccccctgcatgagagacctgatcaagctggccggcgtgaccctgggccagagaagagcccaggccagaagacagaccatcagacacagcaccagagagaaggacagaggccccaccaaggccaccaccaccaagctggtgtaccagatcttcgacaccttcttcgccgagcagatcgagaaggacgacagagaggacaaggagaacgccttcaagagaagaagatgcggcgtgtgcgaggtgtgccagcagcccgagtgcggcaagtgcaaggcctgcaaggacatggtgaagttcggcggcagcggcagaagcaagcaggcctgccaggagagaagatgccccaacatggccatgaaggaggccgacgacgacgaggaggtggacgacaacatccccgagatgcccagccccaagaagatgcaccagggcaagaagaagaagcagaacaagaacagaatcagctgggtgggcgaggccgtgaagaccgacggcaagaagagctactacaagaaggtgtgcatcgacgccgagaccctggaggtgggcgactgcgtgagcgtgatccccgacgacagcagcaagcccctgtacctggccagagtgaccgccctgtgggaggacagcagcaacggccagatgttccacgcccactggttctgcgccggcaccgacaccgtgctgggcgccaccagcgaccccctggagctgttcctggtggacgagtgcgaggacatgcagctgagctacatccacagcaaggtgaaggtgatctacaaggcccccagcgagaactgggccatggagggcggcatggaccccgagagcctgctggagggcgacgacggcaagacctacttctaccagctgtggtacgaccaggactacgccagattcgagagcccccccaagacccagcccaccgaggacaacaagttcaagttctgcgtgagctgcgccagactggccgagatgagacagaaggagatccccagagtgctggagcagctggaggacctggacagcagagtgctgtactacagcgccaccaagaacggcatcctgtacagagtgggcgacggcgtgtacctgccccccgaggccttcaccttcaacatcaagctgagcagccccgtgaagagacccagaaaggagcccgtggacgaggacctgtaccccgagcactacagaaagtacagcgactacatcaagggcagcaacctggacgcccccgagccctacagaatcggcagaatcaaggagatcttctgccccaagaagagcaacggcagacccaacgagaccgacatcaagatcagagtgaacaagttctacagacccgagaacacccacaagagcacccccgccagctaccacgccgacatcaacctgctgtactggagcgacgaggaggccgtggtggacttcaaggccgtgcagggcagatgcaccgtggagtacggcgaggacctgcccgagtgcgtgcaggtgtacagcatgggcggccccaacagattctacttcctggaggcctacaacgccaagagcaagagcttcgaggacccccccaaccacgccagaagccccggcaacaagggcaagggcaagggcaagggcaagggcaagcccaagagccaggcctgcgagcccagcgagcccgagatcgagatcaagctgcccaagctgagaaccctggacgtgttcagcggctgcggcggcctgagcgagggcttccaccaggccggcatcagcgacaccctgtgggccatcgagatgtgggaccccgccgcccaggccttcagactgaacaaccccggcagcaccgtgttcaccgaggactgcaacatcctgctgaagctggtgatggccggcgagaccaccaacagcagaggccagagactgccccagaagggcgacgtggagatgctgtgcggcggccccccctgccagggcttcagcggcatgaacagattcaacagcagaacctacagcaagttcaagaacagcctggtggtgagcttcctgagctactgcgactactacagacccagattcttcctgctggagaacgtgagaaacttcgtgagcttcaagagaagcatggtgctgaagctgaccctgagatgcctggtgagaatgggctaccagtgcaccttcggcgtgctgcaggccggccagtacggcgtggcccagaccagaagaagagccatcatcctggccgccgcccccggcgagaagctgcccctgttccccgagcccctgcacgtgttcgcccccagagcctgccagctgagcgtggtggtggacgacaagaagttcgtgagcaacatcaccagactgagcagcggccccttcagaaccatcaccgtgagagacaccatgagcgacctgcccgaggtgagaaacggcgccagcgccctggagatcagctacaacggcgagccccagagctggttccagagacagctgagaggcgcccagtaccagcccatcctgagagaccacatctgcaaggacatgagcgccctggtggccgccagaatgagacacatccccctggcccccggcagcgactggagagacctgcccaacatcgaggtgagactgagcgacggcaccatggccagaaagctgagatacacccaccacgacagaaagaacggcagaagcagcagcggcgccctgagaggcgtgtgcagctgcgtggagggcggcagcagcggcaaggcctgcgaccccgccgccagacagttcaacaccctgatcccctggtgcctgccccacaccggcaacagacacaaccactgggccggcctgtacggcagactggagtgggacggcttcttcagcaccaccgtgaccaaccccgagcccatgggcaagcagggcagagtgctgcaccccgagcagcacagagtggtgagcgtgagagagtgcgccagaagccagggcttccccgacacctacagactgttcggcaacatcctggacaagcacagacaggtgggcaacgccgtgcccccccccctggccaaggccatcggcctggagatcaagctgtgcatgctggccaaggccagagagagcgccagcgccaagatcaaggaggaggaggccgccaaggactag

SEQ ID NO: 79453 - DNA, 4455 bp, synthetic construct
  misc_feature 1..4455: note = Description of Artificial Sequence: Synthetic coding sequence
  source 1..4455: mol_type = other DNA
ggcagctgccacagccccgccagcgccagccaggtggccggcaccaccgccgagcccagccccagccccagaatcaccagaaagagcaccagacagaccaccatcaccagccacttcgccaagggccccgccaagagaaagccccaggaggagagcgagagagccaagagcgacgagagcatcaaggaggaggacaaggaccaggacgagaagagaagaagagtgaccagcagagagagagtggccagacccctgcccgccgaggagcccgagagagccaagagcggcaccagaaccgagaaggaggaggagagagacgagaaggaggagaagagactgagaagccagaccaaggagcccacccccaagcagaagctgaaggaggagcccgacagagaggccagagccggcgtgcaggccgacgaggacgaggacggcgacgagaaggacgagaagaagcacagaagccagcccaaggacctggccgccaagagaagacccgaggagaaggagcccgagaaggtgaacccccagatcagcgacgagaaggacgaggacgagaaggaggagaagagaagaaagaccacccccaaggagcccaccgagaagaagatggccagagccaagaccgtgatgaacagcaagacccacccccccaagtgcatccagtgcggccagtacctggacgaccccgacctgaagtacggccagcacccccccgacgccgtggacgagccccagatgctgaccaacgagaagctgagcatcttcgacgccaacgagagcggcttcgagagctacgaggccctgccccagcacaagctgacctgcttcagcgtgtactgcaagcacggccacctgtgccccatcgacaccggcctgatcgagaagaacatcgagctgttcttcagcggcagcgccaagcccatctacgacgacgaccccagcctggagggcggcgtgaacggcaagaacctgggccccatcaacgagtggtggatcaccggcttcgacggcggcgagaaggccctgatcggcttcagcaccagcttcgccgagtacatcctgatggaccccagccccgagtacgcccccatcttcggcctgatgcaggagaagatctacatcagcaagatcgtggtggagttcctgcagagcaacagcgacagcacctacgaggacctgatcaacaagatcgagaccaccgtgccccccagcggcctgaacctgaacagattcaccgaggacagcctgctgagacacgcccagttcgtggtggagcaggtggagagctacgacgaggccggcgacagcgacgagcagcccatcttcctgaccccctgcatgagagacctgatcaagctggccggcgtgaccctgggccagagaagagcccaggccagaagacagaccatcagacacagcaccagagagaaggacagaggccccaccaaggccaccaccaccaagctggtgtaccagatcttcgacaccttcttcgccgagcagatcgagaaggacgacagagaggacaaggagaacgccttcaagagaagaagatgcggcgtgtgcgaggtgtgccagcagcccgagtgcggcaagtgcaaggcctgcaaggacatggtgaagttcggcggcagcggcagaagcaagcaggcctgccaggagagaagatgccccaacatggccatgaaggaggccgacgacgacgaggaggtggacgacaacatccccgagatgcccagccccaagaagatgcaccagggcaagaagaagaagcagaacaagaacagaatcagctgggtgggcgaggccgtgaagaccgacggcaagaagagctactacaagaaggtgtgcatcgacgccgagaccctggaggtgggcgactgcgtgagcgtgatccccgacgacagcagcaagcccctgtacctggccagagtgaccgccctgtgggaggacagcagcaacggccagatgttccacgcccactggttctgcgccggcaccgacaccgtgctgggcgccaccagcgaccccctggagctgttcctggtggacgagtgcgaggacatgcagctgagctacatccacagcaaggtgaaggtgatctacaaggcccccagcgagaactgggccatggagggcggcatggaccccgagagcctgctggagggcgacgacggcaagacctacttctaccagctgtggtacgaccaggactacgccagattcgagagcccccccaagacccagcccaccgaggacaacaagttcaagttctgcgtgagctgcgccagactggccgagatgagacagaaggagatccccagagtgctggagcagctggaggacctggacagcagagtgctgtactacagcgccaccaagaacggcatcctgtacagagtgggcgacggcgtgtacctgccccccgaggccttcaccttcaacatcaagctgagcagccccgtgaagagacccagaaaggagcccgtggacgaggacctgtaccccgagcactacagaaagtacagcgactacatcaagggcagcaacctggacgcccccgagccctacagaatcggcagaatcaaggagatcttctgccccaagaagagcaacggcagacccaacgagaccgacatcaagatcagagtgaacaagttctacagacccgagaacacccacaagagcacccccgccagctaccacgccgacatcaacctgctgtactggagcgacgaggaggccgtggtggacttcaaggccgtgcagggcagatgcaccgtggagtacggcgaggacctgcccgagtgcgtgcaggtgtacagcatgggcggccccaacagattctacttcctggaggcctacaacgccaagagcaagagcttcgaggacccccccaaccacgccagaagccccggcaacaagggcaagggcaagggcaagggcaagggcaagcccaagagccaggcctgcgagcccagcgagcccgagatcgagatcaagctgcccaagctgagaaccctggacgtgttcagcggctgcggcggcctgagcgagggcttccaccaggccggcatcagcgacaccctgtgggccatcgagatgtgggaccccgccgcccaggccttcagactgaacaaccccggcagcaccgtgttcaccgaggactgcaacatcctgctgaagctggtgatggccggcgagaccaccaacagcagaggccagagactgccccagaagggcgacgtggagatgctgtgcggcggccccccctgccagggcttcagcggcatgaacagattcaacagcagaacctacagcaagttcaagaacagcctggtggtgagcttcctgagctactgcgactactacagacccagattcttcctgctggagaacgtgagaaacttcgtgagcttcaagagaagcatggtgctgaagctgaccctgagatgcctggtgagaatgggctaccagtgcaccttcggcgtgctgcaggccggccagtacggcgtggcccagaccagaagaagagccatcatcctggccgccgcccccggcgagaagctgcccctgttccccgagcccctgcacgtgttcgcccccagagcctgccagctgagcgtggtggtggacgacaagaagttcgtgagcaacatcaccagactgagcagcggccccttcagaaccatcaccgtgagagacaccatgagcgacctgcccgaggtgagaaacggcgccagcgccctggagatcagctacaacggcgagccccagagctggttccagagacagctgagaggcgcccagtaccagcccatcctgagagaccacatctgcaaggacatgagcgccctggtggccgccagaatgagacacatccccctggcccccggcagcgactggagagacctgcccaacatcgaggtgagactgagcgacggcaccatggccagaaagctgagatacacccaccacgacagaaagaacggcagaagcagcagcggcgccctgagaggcgtgtgcagctgcgtggaggccggcaaggcctgcgaccccgccgccagacagttcaacaccctgatcccctggtgcctgccccacaccggcaacagacacaaccactgggccggcctgtacggcagactggagtgggacggcttcttcagcaccaccgtgaccaaccccgagcccatgggcaagcagggcagagtgctgcaccccgagcagcacagagtggtgagcgtgagagagtgcgccagaagccagggcttccccgacacctacagactgttcggcaacatcctggacaagcacagacaggtgggcaacgccgtgcccccccccctggccaaggccatcggcctggagatcaagctgtgcatgctggccaaggccagagagagcgccagcgccaagatcaaggaggaggaggccgccaaggactag

SEQ ID NO: 79454 - DNA, 2739 bp, synthetic construct
  misc_feature 1..2739: note = Description of Artificial Sequence: Synthetic coding sequence
  source 1..2739: mol_type = other DNA
atgcccgccatgcccagcagcggccccggcgacaccagcagcagcgccgccgagagagaggaggacagaaaggacggcgaggagcaggaggagcccagaggcaaggaggagagacaggagcccagcaccaccgccagaaaggtgggcagacccggcagaaagagaaagcacccccccgtggagagcggcgacacccccaaggaccccgccgtgatcagcaagagccccagcatggcccaggacagcggcgccagcgagctgctgcccaacggcgacctggagaagagaagcgagccccagcccgaggagggcagccccgccggcggccagaagggcggcgcccccgccgagggcgagggcgccgccgagaccctgcccgaggccagcagagccgtggagaacggctgctgcacccccaaggagggcagaggcgcccccgccgaggccggcaaggagcagaaggagaccaacatcgagagcatgaagatggagggcagcagaggcagactgagaggcggcctgggctgggagagcagcctgagacagagacccatgcccagactgaccttccaggccggcgacccctactacatcagcaagagaaagagagacgagtggctggccagatggaagagagaggccgagaagaaggccaaggtgatcgccggcatgaacgccgtggaggagaaccagggccccggcgagagccagaaggtggaggaggccagcccccccgccgtgcagcagcccaccgaccccgccagccccaccgtggccaccacccccgagcccgtgggcagcgacgccggcgacaagaacgccaccaaggccggcgacgacgagcccgagtacgaggacggcagaggcttcggcatcggcgagctggtgtggggcaagctgagaggcttcagctggtggcccggcagaatcgtgagctggtggatgaccggcagaagcagagccgccgagggcaccagatgggtgatgtggttcggcgacggcaagttcagcgtggtgtgcgtggagaagctgatgcccctgagcagcttctgcagcgccttccaccaggccacctacaacaagcagcccatgtacagaaaggccatctacgaggtgctgcaggtggccagcagcagagccggcaagctgttccccgtgtgccacgacagcgacgagagcgacaccgccaaggccgtggaggtgcagaacaagcccatgatcgagtgggccctgggcggcttccagcccagcggccccaagggcctggagccccccgaggaggagaagaacccctacaaggaggtgtacaccgacatgtgggtggagcccgaggccgccgcctacgccccccccccccccgccaagaagcccagaaagagcaccgccgagaagcccaaggtgaaggagatcatcgacgagagaaccagagagagactggtgtacgaggtgagacagaagtgcagaaacatcgaggacatctgcatcagctgcggcagcctgaacgtgaccctggagcaccccctgttcgtgggcggcatgtgccagaactgcaagaactgcttcctggagtgcgcctaccagtacgacgacgacggctaccagagctactgcaccatctgctgcggcggcagagaggtgctgatgtgcggcaacaacaactgctgcagatgcttctgcgtggagtgcgtggacctgctggtgggccccggcgccgcccaggccgccatcaaggaggacccctggaactgctacatgtgcggccacaagggcacctacggcctgctgagaagaagagaggactggcccagcagactgcagatgttcttcgccaacaaccacgaccaggagttcgacccccccaaggtgtacccccccgtgcccgccgagaagagaaagcccatcagagtgctgagcctgttcgacggcatcgccaccggcctgctggtgctgaaggacctgggcatccaggtggacagatacatcgccagcgaggtgtgcgaggacagcatcaccgtgggcatggtgagacaccagggcaagatcatgtacgtgggcgacgtgagaagcgtgacccagaagcacatccaggagtggggccccttcgacctggtgatcggcggcagcccctgcaacgacctgagcatcgtgaaccccgccagaaagggcctgtacgagggcaccggcagactgttcttcgagttctacagactgctgcacgacgccagacccaaggagggcgacgacagacccttcttctggctgttcgagaacgtggtggccatgggcgtgagcgacaagagagacatcagcagattcctggagagcaaccccgtgatgatcgacgccaaggaggtgagcgccgcccacagagccagatacttctggggcaacctgcccggcatgaacagacccctggccagcaccgtgaacgacaagctggagctgcaggagtgcctggagcacggcagaatcgccaagttcagcaaggtgagaaccatcaccaccagaagcaacagcatcaagcagggcaaggaccagcacttccccgtgttcatgaacgagaaggaggacatcctgtggtgcaccgagatggagagagtgttcggcttccccgtgcactacaccgacgtgagcaacatgagcagactggccagacagagactgctgggcagaagctggagcgtgcccgtgatcagacacctgttcgcccccctgaaggagtacttcgcctgcgtgtag

SEQ ID NO: 79455 - DNA, 2739 bp, synthetic construct; identical to SEQ ID NO: 79454
  misc_feature 1..2739: note = Description of Artificial Sequence: Synthetic coding sequence
  source 1..2739: mol_type = other DNA

SEQ ID NO: 79456 - DNA, 2172 bp, synthetic construct
  misc_feature 1..2172: note = Description of Artificial Sequence: Synthetic coding sequence
  source 1..2172: mol_type = other DNA
atgggcatcctggagagagtggtgagaagaaacggcagagtggacagaagcctgaaggacgagtgcgacaccgccgagaagaaggccaaggtgatcgccggcatgaacgccgtggaggagaaccagggccccggcgagagccagaaggtggaggaggccagcccccccgccgtgcagcagcccaccgaccccgccagccccaccgtggccaccacccccgagcccgtgggcagcgacgccggcgacaagaacgccaccaaggccggcgacgacgagcccgagtacgaggacggcagaggcttcggcatcggcgagctggtgtggggcaagctgagaggcttcagctggtggcccggcagaatcgtgagctggtggatgaccggcagaagcagagccgccgagggcaccagatgggtgatgtggttcggcgacggcaagttcagcgtggtgtgcgtggagaagctgatgcccctgagcagcttctgcagcgccttccaccaggccacctacaacaagcagcccatgtacagaaaggccatctacgaggtgctgcaggtggccagcagcagagccggcaagctgttccccgtgtgccacgacagcgacgagagcgacaccgccaaggccgtggaggtgcagaacaagcccatgatcgagtgggccctgggcggcttccagcccagcggccccaagggcctggagccccccgaggaggagaagaacccctacaaggaggtgtacaccgacatgtgggtggagcccgaggccgccgcctacgccccccccccccccgccaagaagcccagaaagagcaccgccgagaagcccaaggtgaaggagatcatcgacgagagaaccagagagagactggtgtacgaggtgagacagaagtgcagaaacatcgaggacatctgcatcagctgcggcagcctgaacgtgaccctggagcaccccctgttcgtgggcggcatgtgccagaactgcaagaactgcttcctggagtgcgcctaccagtacgacgacgacggctaccagagctactgcaccatctgctgcggcggcagagaggtgctgatgtgcggcaacaacaactgctgcagatgcttctgcgtggagtgcgtggacctgctggtgggccccggcgccgcccaggccgccatcaaggaggacccctggaactgctacatgtgcggccacaagggcacctacggcctgctgagaagaagagaggactggcccagcagactgcagatgttcttcgccaacaaccacgaccaggagttcgacccccccaaggtgtacccccccgtgcccgccgagaagagaaagcccatcagagtgctgagcctgttcgacggcatcgccaccggcctgctggtgctgaaggacctgggcatccaggtggacagatacatcgccagcgaggtgtgcgaggacagcatcaccgtgggcatggtgagacaccagggcaagatcatgtacgtgggcgacgtgagaagcgtgacccagaagcacatccaggagtggggccccttcgacctggtgatcggcggcagcccctgcaacgacctgagcatcgtgaaccccgccagaaagggcctgtacgagggcaccggcagactgttcttcgagttctacagactgctgcacgacgccagacccaaggagggcgacgacagacccttcttctggctgttcgagaacgtggtggccatgggcgtgagcgacaagagagacatcagcagattcctggagagcaaccccgtgatgatcgacgccaaggaggtgagcgccgcccacagagccagatacttctggggcaacctgcccggcatgaacagacccctggccagcaccgtgaacgacaagctggagctgcaggagtgcctggagcacggcagaatcgccaagttcagcaaggtgagaaccatcaccaccagaagcaacagcatcaagcagggcaaggaccagcacttccccgtgttcatgaacgagaaggaggacatcctgtggtgcaccgagatggagagagtgttcggcttccccgtgcactacaccgacgtgagcaacatgagcagactggccagacagagactgctgggcagaagctggagcgtgcccgtgatcagacacctgttcgcccccctgaaggagtacttcgcctgcgtgtag

SEQ ID NO: 79457 - DNA, 2070 bp, synthetic construct
  misc_feature 1..2070: note = Description of Artificial Sequence: Synthetic coding sequence
  source 1..2070: mol_type = other DNA
atgaacgccgtggaggagaaccagggccccggcgagagccagaaggtggaggaggccagcccccccgccgtgcagcagcccaccgaccccgccagccccaccgtggccaccacccccgagcccgtgggcagcgacgccggcgacaagaacgccaccaaggccggcgacgacgagcccgagtacgaggacggcagaggcttcggcatcggcgagctggtgtggggcaagctgagaggcttcagctggtggcccggcagaatcgtgagctggtggatgaccggcagaagcagagccgccgagggcaccagatgggtgatgtggttcggcgacggcaagttcagcgtggtgtgcgtggagaagctgatgcccctgagcagcttctgcagcgccttccaccaggccacctacaacaagcagcccatgtacagaaaggccatctacgaggtgctgcaggtggccagcagcagagccggcaagctgttccccgtgtgccacgacagcgacgagagcgacaccgccaaggccgtggaggtgcagaacaagcccatgatcgagtgggccctgggcggcttccagcccagcggccccaagggcctggagccccccgaggaggagaagaacccctacaaggaggtgtacaccgacatgtgggtggagcccgaggccgccgcctacgccccccccccccccgccaagaagcccagaaagagcaccgccgagaagcccaaggtgaaggagatcatcgacgagagaaccagagagagactggtgtacgaggtgagacagaagtgcagaaacatcgaggacatctgcatcagctgcggcagcctgaacgtgaccctggagcaccccctgttcgtgggcggcatgtgccagaactgcaagaactgcttcctggagtgcgcctaccagtacgacgacgacggctaccagagctactgcaccatctgctgcggcggcagagaggtgctgatgtgcggcaacaacaactgctgcagatgcttctgcgtggagtgcgtggacctgctggtgggccccggcgccgcccaggccgccatcaaggaggacccctggaactgctacatgtgcggccacaagggcacctacggcctgctgagaagaagagaggactggcccagcagactgcagatgttcttcgccaacaaccacgaccaggagttcgacccccccaaggtgtacccccccgtgcccgccgagaagagaaagcccatcagagtgctgagcctgttcgacggcatcgccaccggcctgctggtgctgaaggacctgggcatccaggtggacagatacatcgccagcgaggtgtgcgaggacagcatcaccgtgggcatggtgagacaccagggcaagatcatgtacgtgggcgacgtgagaagcgtgacccagaagcacatccaggagtggggccccttcgacctggtgatcggcggcagcccctgcaacgacctgagcatcgtgaaccccgccagaaagggcctgtacgagggcaccggcagactgttcttcgagttctacagactgctgcacgacgccagacccaaggagggcgacgacagacccttcttctggctgttcgagaacgtggtggccatgggcgtgagcgacaagagagacatcagcagattcctggagagcaaccccgtgatgatcgacgccaaggaggtgagcgccgcccacagagccagatacttctggggcaacctgcccggcatgaacagacccctggccagcaccgtgaacgacaagctggagctgcaggagtgcctggagcacggcagaatcgccaagttcagcaaggtgagaaccatcaccaccagaagcaacagcatcaagcagggcaaggaccagcacttccccgtgttcatgaacgagaaggaggacatcctgtggtgcaccgagatggagagagtgttcggcttccccgtgcactacaccgacgtgagcaacatgagcagactggccagacagagactgctgggcagaagctggagcgtgcccgtgatcagacacctgttcgcccccctgaaggagtacttcgcctgcgtgtag

SEQ ID NO: 79458 - DNA, 501 bp, synthetic construct
  misc_feature 1..501: note = Description of Artificial Sequence: Synthetic coding sequence
  source 1..501: mol_type = other DNA
atgcccgccatgcccagcagcggccccggcgacaccagcagcagcgccgccgagagagaggaggacagaaaggacggcgaggagcaggaggagcccagaggcaaggaggagagacaggagcccagcaccaccgccagaaaggtgggcagacccggcagaaagagaaagcacccccccgtggagagcggcgacacccccaaggaccccgccgtgatcagcaagagccccagcatggcccaggacagcggcgccagcgagctgctgcccaacggcgacctggagaagagaagcgagccccagcccgaggagggcagccccgccggcggccagaagggcggcgcccccgccgagggcgagggcgccgccgagaccctgcccgaggccagcagagccgtggagaacggctgctgcacccccaaggagggcagaggcgcccccgccgaggccggcgagagcagcgcccccggcgccgccagcagcggccccaccagcatcccctag

SEQ ID NO: 79459 - DNA, 2538 bp, synthetic construct
  misc_feature 1..2538: note = Description of Artificial Sequence: Synthetic coding sequence
  source 1..2538: mol_type = other DNA
atggagcccagccccgagccccccagcctggagagcatgaagggcgacaccagacacctgaacggcgaggaggacgccggcggcagagaggacagcatcctggtgaacggcgcctgcagcgaccagagcagcgacagcccccccatcctggaggccatcagaacccccgagatcagaggcagaagaagcagcagcagactgagcaagagagaggtgagcagcctgctgagctacacccaggacctgaccggcgacggcgacggcgaggacggcgacggcagcgacacccccgtgatgcccaagctgttcagagagaccagaaccagaagcgagagccccgccgtgagaaccagaaacaacaacagcgtgagcagcagagagagacacagacccagccccagaagcaccagaggcagacagggcagaaaccacgtggacgagagccccgtggagttccccgccaccagaagcctgagaagaagagccaccgccagcgccggcaccccctggcccagcccccccagcagctacctgaccatcgacctgaccgacgacaccgaggacacccacggcaccccccagagcagcagcaccccctacgccagactggcccaggacagccagcagggcggcatggagagcccccaggtggaggccgacagcggcgacggcgacagcagcgagtaccaggacggcaaggagttcggcatcggcgacctggtgtggggcaagatcaagggcttcagctggtggcccgccatggtggtgagctggaaggccaccagcaagagacaggccatgagcggcatgagatgggtgcagtggttcggcgacggcaagttcagcgaggtgagcgccgacaagctggtggccctgggcctgttcagccagcacttcaacctggccaccttcaacaagctggtgagctacagaaaggccatgtaccacgccctggagaaggccagagtgagagccggcaagaccttccccagcagccccggcgacagcctggaggaccagctgaagcccatgctggagtgggcccacggcggcttcaagcccaccggcatcgagggcctgaagcccaacaacacccagcccgagaacaagaccagaagaagaaccgccgacgacagcgccaccagcgactactgccccgcccccaagagactgaagaccaactgctacaacaacggcaaggacagaggcgacgaggaccagagcagagagcagatggccagcgacgtggccaacaacaagagcagcctggaggacggctgcctgagctgcggcagaaagaaccccgtgagcttccaccccctgttcgagggcggcctgtgccagacctgcagagacagattcctggagctgttctacatgtacgacgacgacggctaccagagctactgcaccgtgtgctgcgagggcagagagctgctgctgtgcagcaacaccagctgctgcagatgcttctgcgtggagtgcctggaggtgctggtgggcaccggcaccgccgccgaggccaagctgcaggagccctggagctgctacatgtgcctgccccagagatgccacggcgtgctgagaagaagaaaggactggaacgtgagactgcaggccttcttcaccagcgacaccggcctggagtacgaggcccccaagctgtaccccgccatccccgccgccagaagaagacccatcagagtgctgagcctgttcgacggcatcgccaccggctacctggtgctgaaggagctgggcatcaaggtgggcaagtacgtggccagcgaggtgtgcgaggagagcatcgccgtgggcaccgtgaagcacgagggcaacatcaagtacgtgaacgacgtgagaaacatcaccaagaagaacatcgaggagtggggccccttcgacctggtgatcggcggcagcccctgcaacgacctgagcaacgtgaaccccgccagaaagggcctgtacgagggcaccggcagactgttcttcgagttctaccacctgctgaactacagcagacccaaggagggcgacgacagacccttcttctggatgttcgagaacgtggtggccatgaaggtgggcgacaagagagacatcagcagattcctggagtgcaaccccgtgatgatcgacgccatcaaggtgagcgccgcccacagagccagatacttctggggcaacctgcccggcatgaacagacccgtgatcgccagcaagaacgacaagctggagctgcaggactgcctggagtacaacagaatcgccaagctgaagaaggtgcagaccatcaccaccaagagcaacagcatcaagcagggcaagaaccagctgttccccgtggtgatgaacggcaaggaggacgtgctgtggtgcaccgagctggagagaatcttcggcttccccgtgcactacaccgacgtgagcaacatgggcagaggcgccagacagaagctgctgggcagaagctggagcgtgcccgtgatcagacacctgttcgcccccctgaaggactacttcgcctgcgagtag

SEQ ID NO: 79460 - DNA, 2562 bp, synthetic construct
  misc_feature 1..2562: note = Description of Artificial Sequence: Synthetic coding sequence
  source 1..2562: mol_type = other DNA
atgaagggcgacaccagacacctgaacggcgaggaggacgccggcggcagagaggacagcatcctggtgaacggcgcctgcagcgaccagagcagcgacagcccccccatcctggaggccatcagaacccccgagatcagaggcagaagaagcagcagcagactgagcaagagagaggtgagcagcctgctgagctacacccaggacctgaccggcgacggcgacggcgaggacggcgacggcagcgacacccccgtgatgcccaagctgttcagagagaccagaaccagaagcgagagccccgccgtgagaaccagaaacaacaacagcgtgagcagcagagagagacacagacccagccccagaagcaccagaggcagacagggcagaaaccacgtggacgagagccccgtggagttccccgccaccagaagcctgagaagaagagccaccgccagcgccggcaccccctggcccagcccccccagcagctacctgaccatcgacctgaccgacgacaccgaggacacccacggcaccccccagagcagcagcaccccctacgccagactggcccaggacagccagcagggcggcatggagagcccccaggtggaggccgacagcggcgacggcgacagcagcgagtaccaggacggcaaggagttcggcatcggcgacctggtgtggggcaagatcaagggcttcagctggtggcccgccatggtggtgagctggaaggccaccagcaagagacaggccatgagcggcatgagatgggtgcagtggttcggcgacggcaagttcagcgaggtgagcgccgacaagctggtggccctgggcctgttcagccagcacttcaacctggccaccttcaacaagctggtgagctacagaaaggccatgtaccacgccctggagaaggccagagtgagagccggcaagaccttccccagcagccccggcgacagcctggaggaccagctgaagcccatgctggagtgggcccacggcggcttcaagcccaccggcatcgagggcctgaagcccaacaacacccagcccgtggtgaacaagagcaaggtgagaagagccggcagcagaaagctggagagcagaaagtacgagaacaagaccagaagaagaaccgccgacgacagcgccaccagcgactactgccccgcccccaagagactgaagaccaactgctacaacaacggcaaggacagaggcgacgaggaccagagcagagagcagatggccagcgacgtggccaacaacaagagcagcctggaggacggctgcctgagctgcggcagaaagaaccccgtgagcttccaccccctgttcgagggcggcctgtgccagacctgcagagacagattcctggagctgttctacatgtacgacgacgacggctaccagagctactgcaccgtgtgctgcgagggcagagagctgctgctgtgcagcaacaccagctgctgcagatgcttctgcgtggagtgcctggaggtgctggtgggcaccggcaccgccgccgaggccaagctgcaggagccctggagctgctacatgtgcctgccccagagatgccacggcgtgctgagaagaagaaaggactggaacgtgagactgcaggccttcttcaccagcgacaccggcctggagtacgaggcccccaagctgtaccccgccatccccgccgccagaagaagacccatcagagtgctgagcctgttcgacggcatcgccaccggctacctggtgctgaaggagctgggcatcaaggtgggcaagtacgtggccagcgaggtgtgcgaggagagcatcgccgtgggcaccgtgaagcacgagggcaacatcaagtacgtgaacgacgtgagaaacatcaccaagaagaacatcgaggagtggggccccttcgacctggtgatcggcggcagcccctgcaacgacctgagcaacgtgaaccccgccagaaagggcctgtacgagggcaccggcagactgttcttcgagttctaccacctgctgaactacagcagacccaaggagggcgacgacagacccttcttctggatgttcgagaacgtggtggccatgaaggtgggcgacaagagagacatcagcagattcctggagtgcaaccccgtgatgatcgacgccatcaaggtgagcgccgcccacagagccagatacttctggggcaacctgcccggcatgaacagacccgtgatcgccagcaagaacgacaagctggagctgcaggactgcctggagtacaacagaatcgccaagctgaagaaggtgcagaccatcaccaccaagagcaacagcatcaagcagggcaagaaccagctgttccccgtggtgatgaacggcaaggaggacgtgctgtggtgcaccgagctggagagaatcttcggcttccccgtgcactacaccgacgtgagcaacatgggcagaggcgccagacagaagctgctgggcagaagctggagcgtgcccgtgatcagacacctgttcgcccccctgaaggactacttcgcctgcgagtag

SEQ ID NO: 79461 - DNA, 2379 bp, synthetic construct
  misc_feature 1..2379: note = Description of Artificial Sequence: Synthetic coding sequence
  source 1..2379: mol_type = other DNA
atgaagggcgacaccagacacctgaacggcgaggaggacgccggcggcagagaggacagcatcctggtgaacggcgcctgcagcgaccagagcagcgacagcccccccatcctggaggccatcagaacccccgagatcagaggcagaagaagcagcagcagactgagcaagagagaggtgagcagcctgctgagctacacccaggacctgaccggcgacggcgacggcgaggacggcgacggcagcgacacccccgtgatgcccaagctgttcagagagaccagaaccagaagcgagagccccgccgtgagaaccagaaacaacaacagcgtgagcagcagagagagacacagacccagccccagaagcaccagaggcagacagggcagaaaccacgtggacgagagccccgtggagttccccgccaccagaagcctgagaagaagagccaccgccagcgccggcaccccctggcccagcccccccagcagctacctgaccatcgacctgaccgacgacaccgaggacacccacggcaccccccagagcagcagcaccccctacgccagactggcccaggacagccagcagggcggcatggagagcccccaggtggaggccgacagcggcgacggcgacagcagcgagtaccaggacggcaaggagttcggcatcggcgacctggtgtggggcaagatcaagggcttcagctggtggcccgccatggtggtgagctggaaggccaccagcaagagacaggccatgagcggcatgagatgggtgcagtggttcggcgacggcaagttcagcgaggtgagcgccgacaagctggtggccctgggcctgttcagccagcacttcaacctggccaccttcaacaagctggtgagctacagaaaggccatgtaccacgccctggagaaggccagagtgagagccggcaagaccttccccagcagccccggcgacagcctggaggaccagctgaagcccatgctggagtgggcccacggcggcttcaagcccaccggcatcgagggcctgaagcccaacaacacccagcccgagaacaagaccagaagaagaaccgccgacgacagcgccaccagcgactactgccccgcccccaagagactgaagaccaactgctacaacaacggcaaggacagaggcgacgaggaccagagcagagagcagatggccagcgacgtggccaacaacaagagcagcctggaggacggctgcctgagctgcggcagaaagaaccccgtgagcttccaccccctgttcgagggcggcctgtgccagacctgcagagacagattcctggagctgttctacatgtacgacgacgacggctaccagagctactgcaccgtgtgctgcgagggcagagagctgctgctgtgcagcaacaccagctgctgcagatgcttctgcgtggagtgcctggaggtgctggtgggcaccggcaccgccgccgaggccaagctgcaggagccctggagctgctacatgtgcctgccccagagatgccacggcgtgctgagaagaagaaaggactggaacgtgagactgcaggccttcttcaccagcgacaccggcctggagtacgaggcccccaagctgtaccccgccatccccgccgccagaagaagacccatcagagtgctgagcctgttcgacggcatcgccaccggctacctggtgctgaaggagctgggcatcaaggtgggcaagtacgtggccagcgaggtgtgcgaggagagcatcgccgtgggcaccgtgaagcacgagggcaacatcaagtacgtgaacgacgtgagaaacatcaccaagaagaacatcgaggagtggggccccttcgacctggtgatcggcggcagcccctgcaacgacctgagcaacgtgaaccccgccagaaagggcctgtacgagggcaccggcagactgttcttcgagttctaccacctgctgaactacagcagacccaaggagggcgacgacagacccttcttctggatgttcgagaacgtggtggccatgaaggtgggcgacaagagagacatcagcagattcctggagtgcaaccccgtgatgatcgacgccatcaaggtgagcgccgcccacagagccagatacttctggggcaacctgcccggcatgaacagacccgtgatcgccagcaagaacgacaagctggagctgcaggactgcctggagtacaacagaatcgccaaggacctgtggctgagctgcgccctgcacagaagagtgcagcacggcccctggtgcccccccgaggccgccggcaaggtgctggagagagcctgccaccccacccccctgagacccagcgagggcctgctgtgcatgtag

SEQ ID NO: 79462 - DNA, 2313 bp, synthetic construct
  misc_feature 1..2313: note = Description of Artificial Sequence: Synthetic coding sequence
  source 1..2313: mol_type = other DNA
atgaagggcgacaccagacacctgaacggcgaggaggacgccggcggcagagaggacagcatcctggtgaacggcgcctgcagcgaccagagcagcgacagcccccccatcctggaggccatcagaacccccgagatcagaggcagaagaagcagcagcagactgagcaagagagaggtgagcagcctgctgagctacacccaggacctgaccggcgacggcgacggcgaggacggcgacggcagcgacacccccgtgatgcccaagctgttcagagagaccagaaccagaagcgagagccccgccgtgagaaccagaaacaacaacagcgtgagcagcagagagagacacagacccagccccagaagcaccagaggcagacagggcagaaaccacgtggacgagagccccgtggagttccccgccaccagaagcctgagaagaagagccaccgccagcgccggcaccccctggcccagcccccccagcagctacctgaccatcgacctgaccgacgacaccgaggacacccacggcaccccccagagcagcagcaccccctacgccagactggcccaggacagccagcagggcggcatggagagcccccaggtggaggccgacagcggcgacggcgacagcagcgagtaccaggacggcaaggagttcggcatcggcgacctggtgtggggcaagatcaagggcttcagctggtggcccgccatggtggtgagctggaaggccaccagcaagagacaggccatgagcggcatgagatgggtgcagtggttcggcgacggcaagttcagcgaggtgagcgccgacaagctggtggccctgggcctgttcagccagcacttcaacctggccaccttcaacaagctggtgagctacagaaaggccatgtaccacgccctggagaaggccagagtgagagccggcaagaccttccccagcagccccggcgacagcctggaggaccagctgaagcccatgctggagtgggcccacggcggcttcaagcccaccggcatcgagggcctgaagcccaacaacacccagcccgagaacaagaccagaagaagaaccgccgacgacagcgccaccagcgactactgccccgcccccaagagactgaagaccaactgctacaacaacggcaaggacagaggcgacgaggaccagagcagagagcagatggccagcgacgtggccaacaacaagagcagcctggaggacggctgcctgagctgcggcagaaagaaccccgtgagcttccaccccctgttcgagggcggcctgtgccagacctgcagagacagattcctggagctgttctacatgtacgacgacgacggctaccagagctactgcaccgtgtgctgcgagggcagagagctgctgctgtgcagcaacaccagctgctgcagatgcttctgcgtggagtgcctggaggtgctggtgggcaccggcaccgccgccgaggccaagctgcaggagccctggagctgctacatgtgcctgccccagagatgccacggcgtgctgagaagaagaaaggactggaacgtgagactgcaggccttcttcaccagcgacaccggcctggagtacgaggcccccaagctgtaccccgccatccccgccgccagaagaagacccatcagagtgctgagcctgttcgacggcatcgccaccggctacctggtgctgaaggagctgggcatcaaggtgggcaagtacgtggccagcgaggtgtgcgaggagagcatcgccgtgggcaccgtgaagcacgagggcaacatcaagtacgtgaacgacgtgagaaacatcaccaagaagaacatcgaggagtggggccccttcgacctggtgatcggcggcagcccctgcaacgacctgagcaacgtgaaccccgccagaaagggcctgtacgagggcaccggcagactgttcttcgagttctaccacctgctgaactacagcagacccaaggagggcgacgacagacccttcttctggatgttcgagaacgtggtggccatgaaggtgggcgacaagagagacatcagcagattcctggagtgcaaccccgtgatgatcgacgccatcaaggtgagcgccgcccacagagccagatacttctggggcaacctgcccggcatgaacagaatcttcggcttccccgtgcactacaccgacgtgagcaacatgggcagaggcgccagacagaagctgctgggcagaagctggagcgtgcccgtgatcagacacctgttcgcccccctgaaggactacttcgcctgcgagtag

SEQ ID NO: 79463 - DNA, 2502 bp, synthetic construct
  misc_feature 1..2502: note = Description of Artificial Sequence: Synthetic coding sequence
  source 1..2502: mol_type = other DNA
atgaagggcgacaccagacacctgaacggcgaggaggacgccggcggcagagaggacagcatcctggtgaacggcgcctgcagcgaccagagcagcgacagcccccccatcctggaggccatcagaacccccgagatcagaggcagaagaagcagcagcagactgagcaagagagaggtgagcagcctgctgagctacacccaggacctgaccggcgacggcgacggcgaggacggcgacggcagcgacacccccgtgatgcccaagctgttcagagagaccagaaccagaagcgagagccccgccgtgagaaccagaaacaacaacagcgtgagcagcagagagagacacagacccagccccagaagcaccagaggcagacagggcagaaaccacgtggacgagagccccgtggagttccccgccaccagaagcctgagaagaagagccaccgccagcgccggcaccccctggcccagcccccccagcagctacctgaccatcgacctgaccgacgacaccgaggacacccacggcaccccccagagcagcagcaccccctacgccagactggcccaggacagccagcagggcggcatggagagcccccaggtggaggccgacagcggcgacggcgacagcagcgagtaccaggacggcaaggagttcggcatcggcgacctggtgtggggcaagatcaagggcttcagctggtggcccgccatggtggtgagctggaaggccaccagcaagagacaggccatgagcggcatgagatgggtgcagtggttcggcgacggcaagttcagcgaggtgagcgccgacaagctggtggccctgggcctgttcagccagcacttcaacctggccaccttcaacaagctggtgagctacagaaaggccatgtaccacgccctggagaaggccagagtgagagccggcaagaccttccccagcagccccggcgacagcctggaggaccagctgaagcccatgctggagtgggcccacggcggcttcaagcccaccggcatcgagggcctgaagcccaacaacacccagcccgagaacaagaccagaagaagaaccgccgacgacagcgccaccagcgactactgccccgcccccaagagactgaagaccaactgctacaacaacggcaaggacagaggcgacgaggaccagagcagagagcagatggccagcgacgtggccaacaacaagagcagcctggaggacggctgcctgagctgcggcagaaagaaccccgtgagcttccaccccctgttcgagggcggcctgtgccagacctgcagagacagattcctggagctgttctacatgtacgacgacgacggctaccagagctactgcaccgtgtgctgcgagggcagagagctgctgctgtgcagcaacaccagctgctgcagatgcttctgcgtggagtgcctggaggtgctggtgggcaccggcaccgccgccgaggccaagctgcaggagccctggagctgctacatgtgcctgccccagagatgccacggcgtgctgagaagaagaaaggactggaacgtgagactgcaggccttcttcaccagcgacaccggcctggagtacgaggcccccaagctgtaccccgccatccccgccgccagaagaagacccatcagagtgctgagcctgttcgacggcatcgccaccggctacctggtgctgaaggagctgggcatcaaggtgggcaagtacgtggccagcgaggtgtgcgaggagagcatcgccgtgggcaccgtgaagcacgagggcaacatcaagtacgtgaacgacgtgagaaacatcaccaagaagaacatcgaggagtggggccccttcgacctggtgatcggcggcagcccctgcaacgacctgagcaacgtgaaccccgccagaaagggcctgtacgagggcaccggcagactgttcttcgagttctaccacctgctgaactacagcagacccaaggagggcgacgacagacccttcttctggatgttcgagaacgtggtggccatgaaggtgggcgacaagagagacatcagcagattcctggagtgcaaccccgtgatgatcgacgccatcaaggtgagcgccgcccacagagccagatacttctggggcaacctgcccggcatgaacagacccgtgatcgccagcaagaacgacaagctggagctgcaggactgcctggagtacaacagaatcgccaagctgaagaaggtgcagaccatcaccaccaagagcaacagcatcaagcagggcaagaaccagctgttccccgtggtgatgaacggcaaggaggacgtgctgtggtgcaccgagctggagagaatcttcggcttccccgtgcactacaccgacgtgagcaacatgggcagaggcgccagacagaagctgctgggcagaagctggagcgtgcccgtgatcagacacctgttcgcccccctgaaggactacttcgcctgcgagtag

SEQ ID NO: 79464 - DNA, 999 bp, synthetic construct
  misc_feature 1..999: note = Description of Artificial Sequence: Synthetic coding sequence
  source 1..999: mol_type = other DNA
atgaagggcgacaccagacacctgaacggcgaggaggacgccggcggcagagaggacagcatcctggtgaacggcgcctgcagcgaccagagcagcgacagcccccccatcctggaggccatcagaacccccgagatcagaggcagaagaagcagcagcagactgagcaagagagaggtgagcagcctgctgagctacacccaggacctgaccggcgacggcgacggcgaggacggcgacggcagcgacacccccgtgatgcccaagctgttcagagagaccagaaccagaagcgagagccccgccagcctgagaagaagagccaccgccagcgccggcaccccctggcccagcccccccagcagctacctgaccatcgacctgaccgacgacaccgaggacacccacggcaccccccagagcagcagcaccccctacgccagactggcccaggacagccagcagggcggcatggagagcccccaggtggaggccgacagcggcgacggcgacagcagcgagtaccaggacggcaaggagttcggcatcggcgacctggtgtggggcaagatcaagggcttcagctggtggcccgccatggtggtgagctggaaggccaccagcaagagacaggccatgagcggcatgagatgggtgcagtggttcggcgacggcaagttcagcgaggtgagcgccgacaagctggtggccctgggcctgttcagccagcacttcaacctggccaccttcaacaagctggtgagctacagaaaggccatgtaccacgccctggagagaaccagactggaggacgcccagctgaccacccagccccccctgaccaccgccccccaccccagcgccagcagacagatcgccatcaccaccgccaagaccgagggcatgaagatcagagccgagaacaagtggctgcagatgctgcccaccaccagagccgcctggaaggagaagcccagagtgctgccccccagcctgtag

SEQ ID NO: 79465 - DNA, 2187 bp, synthetic construct
  misc_feature 1..2187: note = Description of Artificial Sequence: Synthetic coding sequence
  source 1..2187: mol_type = other DNA
atgaagggcgacaccagacacctgaacggcgaggaggacgccggcggcagagaggacagcatcctggtgaacggcgcctgcagcgaccagagcagcgacagcccccccatcctggaggccatcagaacccccgagatcagaggcagaagaagcagcagcagactgagcaagagagaggtgagcagcctgctgagctacacccaggacctgaccggcgacggcgacggcgaggacggcgacggcagcgacacccccgtgatgcccaagctgttcagagagaccagaaccagaagcgagagccccgccagcctgagaagaagagccaccgccagcgccggcaccccctggcccagcccccccagcagctacctgaccatcgacctgaccgacgacaccgaggacacccacggcaccccccagagcagcagcaccccctacgccagactggcccaggacagccagcagggcggcatggagagcccccaggtggaggccgacagcggcgacggcgacagcagcgagtaccaggacggcaaggagttcggcatcggcgacctggtgtggggcaagatcaagggcttcagctggtggcccgccatggtggtgagctggaaggccaccagcaagagacaggccatgagcggcatgagatgggtgcagtggttcggcgacggcaagttcagcgaggtgagcgccgacaagctggtggccctgggcctgttcagccagcacttcaacctggccaccttcaacaagctggtgagctacagaaaggccatgtaccacgccctggagaaggccagagtgagagccggcaagaccttccccagcagccccggcgacagcctggaggaccagctgaagcccatgctggagtgggcccacggcggcttcaagcccaccggcatcgagggcctgaagcccaacaacacccagcccgagaacaagaccagaagaagaaccgccgacgacagcgccaccagcgactactgccccgcccccaagagactgaagaccaactgctacaacaacggcaaggacagaggcgacgaggaccagagcagagagcagatggccagcgacgtggccaacaacaagagcagcctggaggacggctgcctgagctgcggcagaaagaaccccgtgagcttccaccccctgttcgagggcggcctgtgccagacctgcagagacagattcctggagctgttctacatgtacgacgacgacggctaccagagctactgcaccgtgtgctgcgagggcagagagctgctgctgtgcagcaacaccagctgctgcagatgcttctgcgtggagtgcctggaggtgctggtgggcaccggcaccgccgccgaggccaagctgcaggagccctggagctgctacatgtgcctgccccagagatgccacggcgtgctgagaagaagaaaggactggaacgtgagactgcaggccttcttcaccagcgacaccggcctggagtacgaggcccccaagctgtaccccgccatccccgccgccagaagaagacccatcagagtgctgagcctgttcgacggcatcgccaccggctacctggtgctgaaggagctgggcatcaaggtgggcaagtacgtggccagcgaggtgtgcgaggagagcatcgccgtgggcaccgtgaagcacgagggcaacatcaagtacgtgaacgacgtgagaaacatcaccaagaagaacatcgaggagtggggccccttcgacctggtgatcggcggcagcccctgcaacgacctgagcaacgtgaaccccgccagaaagggcctgtacgagggcaccggcagactgttcttcgagttctaccacctgctgaactacagcagacccaaggagggcgacgacagacccttcttctggatgttcgagaacgtggtggccatgaaggtgggcgacaagagagacatcagcagattcctggagtgcaaccccgtgatgatcgacgccatcaaggtgagcgccgcccacagagccagatacttctggggcaacctgcccggcatgaacagaatcttcggcttccccgtgcactacaccgacgtgagcaacatgggcagaggcgccagacagaagctgctgggcagaagctggagcgtgcccgtgatcagacacctgttcgcccccctgaaggactacttcgcctgcgagtag

SEQ ID NO: 79466 - DNA, 2085 bp, synthetic construct
  misc_feature 1..2085: note = Description of Artificial Sequence: Synthetic coding sequence
  source 1..2085: mol_type = other DNA
atgaagggcgacaccagacacctgaacggcgaggaggacgccggcggcagagaggacagcatcctggtgaacggcgcctgcagcgaccagagcagcgacagcccccccatcctggaggccatcagaacccccgagatcagaggcagaagaagcagcagcagactgagcaagagagaggtgagcagcctgctgagctacacccagagcctgagaagaagagccaccgccagcgccggcaccccctggcccagcccccccagcagctacctgaccatcgacctgaccgacgacaccgaggacacccacggcaccccccagagcagcagcaccccctacgccagactggcccaggacagccagcagggcggcatggagagcccccaggtggaggccgacagcggcgacggcgacagcagcgagtaccaggacggcaaggagttcggcatcggcgacctggtgtggggcaagatcaagggcttcagctggtggcccgccatggtggtgagctggaaggccaccagcaagagacaggccatgagcggcatgagatgggtgcagtggttcggcgacggcaagttcagcgaggtgagcgccgacaagctggtggccctgggcctgttcagccagcacttcaacctggccaccttcaacaagctggtgagctacagaaaggccatgtaccacgccctggagaaggccagagtgagagccggcaagaccttccccagcagccccggcgacagcctggaggaccagctgaagcccatgctggagtgggcccacggcggcttcaagcccaccggcatcgagggcctgaagcccaacaacacccagcccgagaacaagaccagaagaagaaccgccgacgacagcgccaccagcgactactgccccgcccccaagagactgaagaccaactgctacaacaacggcaaggacagaggcgacgaggaccagagcagagagcagatggccagcgacgtggccaacaacaagagcagcctggaggacggctgcctgagctgcggcagaaagaaccccgtgagcttccaccccctgttcgagggcggcctgtgccagacctgcagagacagattcctggagctgttctacatgtacgacgacgacggctaccagagctactgcaccgtgtgctgcgagggcagagagctgctgctgtgcagcaacaccagctgctgcagatgcttctgcgtggagtgcctggaggtgctggtgggcaccggcaccgccgccgaggccaagctgcaggagccctggagctgctacatgtgcctgccccagagatgccacggcgtgctgagaagaagaaaggactggaacgtgagactgcaggccttcttcaccagcgacaccggcctggagtacgaggcccccaagctgtaccccgccatccccgccgccagaagaagacccatcagagtgctgagcctgttcgacggcatcgccaccggctacctggtgctgaaggagctgggcatcaaggtgggcaagtacgtggccagcgaggtgtgcgaggagagcatcgccgtgggcaccgtgaagcacgagggcaacatcaagtacgtgaacgacgtgagaaacatcaccaagaagaacatcgaggagtggggccccttcgacctggtgatcggcggcagcccctgcaacgacctgagcaacgtgaaccccgccagaaagggcctgtacgagggcaccggcagactgttcttcgagttctaccacctgctgaactacagcagacccaaggagggcgacgacagacccttcttctggatgttcgagaacgtggtggccatgaaggtgggcgacaagagagacatcagcagattcctggagtgcaaccccgtgatgatcgacgccatcaaggtgagcgccgcccacagagccagatacttctggggcaacctgcccggcatgaacagaatcttcggcttccccgtgcactacaccgacgtgagcaacatgggcagaggcgccagacagaagctgctgggcagaagctggagcgtgcccgtgatcagacacctgttcgcccccctgaaggactacttcgcctgcgagtag

SEQ ID NO: 79467 - DNA, 1701 bp, synthetic construct
  misc_feature 1..1701: note = Description of Artificial Sequence: Synthetic coding sequence
  source 1..1701: mol_type = other DNA
ggcagaagccccagaggcagaagcgagagaccccccaccgacggcaccggcagcctggccgtgggcagagccggcggcaacgccgccagacccgccgccctgggcctgagcggccccagcaagcccagcagcgccatcggcgccggcgacagcagagcccagagacccgccagaccccccgccggcctgccccccgccagccccgaccccagactgagaagacccgccgccccccagcccgccctgagacaggagagcatgaagggcgacaccagacacctgaacggcgaggaggacgccggcggcagagaggacagcatcctggtgaacggcgcctgcagcgaccagagcagcgacagcccccccatcctggaggccatcagaacccccgagatcagaggcagaagaagcagcagcagactgagcaagagagaggtgagcagcctgctgagctacacccaggacctgaccggcgacggcgacggcgaggacggcgacggcagcgacacccccgtgatgcccaagctgttcagagagaccagaaccagaagcgagagccccgccgtgagaaccagaaacaacaacagcgtgagcagcagagagagacacagacccagccccagaagcaccagaggcagacagggcagaaaccacgtggacgagagccccgtggagttccccgccaccagaagcctgagaagaagagccaccgccagcgccggcaccccctggcccagcccccccagcagctacctgaccatcgacctgaccgacgacaccgaggacacccacggcaccccccagagcagcagcaccccctacgccagactggcccaggacagccagcagggcggcatggagagcccccaggtggaggccgacagcggcgacggcgacagcagcgagtaccaggacggcaaggagttcggcatcggcgacctggtgtggggcaagatcaagggcttcagctggtggcccgccatggtggtgagctggaaggccaccagcaagagacaggccatgagcggcatgagatgggtgcagtggttcggcgacggcaagttcagcgaggtgagcgccgacaagctggtggccctgggcctgttcagccagcacttcaacctggccaccttcaacaagctggtgagctacagaaaggccatgtaccacgccctggagaaggccagagtgagagccggcaagaccttccccagcagccccggcgacagcctggaggaccagctgaagcccatgctggagtgggcccacggcggcttcaagcccaccggcatcgagggcctgaagcccaacaacacccagcccgagaacaagaccagaagaagaaccgccgacgacagcgccaccagcgactactgccccgcccccaagagactgaagaccaactgctacaacaacggcaaggacagaggcgacgaggaccagagcagagagcagatggccagcgacgtggccaacaacaagagcagcctggaggacggctgcctgagctgcggcagaaagaaccccgtgagcttccaccccctgttcgagggcggcctgtgccagacctgcagacacctgtgcggcgacagcgtgaagcccacccaccccagctgcctggccctgtgcctgtggggcagaatgggcgacagctgccacagaggccagtggcacgccggccacagccagctgagcttctag

SEQ ID NO: 79468 - DNA, 1164 bp, synthetic construct
  misc_feature 1..1164: note = Description of Artificial Sequence: Synthetic coding sequence
  source 1..1164: mol_type = other DNA
atggccgccatccccgccctggaccccgaggccgagcccagcatggacgtgatcctggtgggcagcagcgagctgagcagcagcgtgagccccggcaccggcagagacctgatcgcctacgaggtgaaggccaaccagagaaacatcgaggacatctgcatctgctgcggcagcctgcaggtgcacacccagcaccccctgttcgagggcggcatctgcgccccctgcaaggacaagttcctggacgccctgttcctgtacgacgacgacggctaccagagctactgcagcatctgctgcagcggcgagaccctgctgatctgcggcaaccccgactgcaccagatgctactgcttcgagtgcgtggacagcctggtgggccccggcaccagcggcaaggtgcacgccatgagcaactgggtgtgctacctgtgcctgcccagcagcagaagcggcctgctgcagagaagaagaaagtggagaagccagctgaaggccttctacgacagagagagcgagaaccccctggagatgttcgagaccgtgcccgtgtggagaagacagcccgtgagagtgctgagcctgttcgaggacatcaagaaggagctgaccagcctgggcttcctggagagcggcagcgaccccggccagctgaagcacgtggtggacgtgaccgacaccgtgagaaaggacgtggaggagtggggccccttcgacctggtgtacggcgccaccccccccctgggccacacctgcgacagaccccccagctggtacctgttccagttccacagactgctgcagtacgccagacccaagcccggcagccccagacccttcttctggatgttcgtggacaacctggtgctgaacaaggaggacctggacgtggccagcagattcctggagatggagcccgtgaccatccccgacgtgcacggcggcagcctgcagaacgccgtgagagtgtggagcaacatccccgccatcagaagcagcagacactgggccctggtgagcgaggaggagctgagcctgctggcccagaacaagcagagcagcaagctggccgccaagtggcccaccaagctggtgaagaactgcttcctgcccctgagagagtacttcaagtacttcagcaccgagctgaccagcagcctgtag

SEQ ID NO: 79469 - DNA, 1161 bp, synthetic construct
  misc_feature 1..1161: note = Description of Artificial Sequence: Synthetic coding sequence
  source 1..1161: mol_type = other DNA
atggccgccatccccgccctggaccccgaggccgagcccagcatggacgtgatcctggtgggcagcagcgagctgagcagcagcgtgagccccggcaccggcagagacctgatcgcctacgaggtgaaggccaaccagagaaacatcgaggacatctgcatctgctgcggcagcctgcaggtgcacacccagcaccccctgttcgagggcggcatctgcgccccctgcaaggacaagttcctggacgccctgttcctgtacgacgacgacggctaccagagctactgcagcatctgctgcagcggcgagaccctgctgatctgcggcaaccccgactgcaccagatgctactgcttcgagtgcgtggacagcctggtgggccccggcaccagcggcaaggtgcacgccatgagcaactgggtgtgctacctgtgcctgcccagcagcagaagcggcctgctgcagagaagaagaaagtggagaagccagctgaaggccttctacgacagagagagcgagaaccccctggagatgttcgagaccgtgcccgtgtggagaagacagcccgtgagagtgctgagcctgttcgaggacatcaagaaggagctgaccagcctgggcttcctggagagcggcagcgaccccggccagctgaagcacgtggtggacgtgaccgacaccgtgagaaaggacgtggaggagtggggccccttcgacctggtgtacggcgccaccccccccctgggccacacctgcgacagaccccccagctggtacctgttccagttccacagactgctgcagtacgccagacccaagcccggcagccccagacccttcttctggatgttcgtggacaacctggtgctgaacaaggaggacctggacgtggccagcagattcctggagatggagcccgtgaccatccccgacgtgcacggcggcagcctgcagaacgccgtgagagtgtggagcaacatccccgccatcagaagcagacactgggccctggtgagcgaggaggagctgagcctgctggcccagaacaagcagagcagcaagctggccgccaagtggcccaccaagctggtgaagaactgcttcctgcccctgagagagtacttcaagtacttcagcaccgagctgaccagcagcctgtag

SEQ ID NO: 79470 - DNA, 3123 bp, synthetic construct
  misc_feature 1..3123: note = Description of Artificial Sequence: Synthetic coding sequence
  source 1..3123: mol_type = other DNA
atgctggaggacatcagcgaggaggacatctgggagtacaagagcaagagaaagcccaagagagtggaccccaacaacggcagcaagaacatcctgaagagcgtggagaaggccaccgacggcaagtaccagagcaagagaagcagaaacagaaagagagccgccgaggccaaggaggtgaaggaccacgaggtgcccctgggcaacgccggctgccagaccagcgtggccagcagccagaacagcagctgcggcgacggcatccagcagacccaggacaaggagaccacccccggcaagctgtgcagaacccagaagagccagcacgtgagccccaagatcagacccgtgtacgacggctactgccccaactgccagatgcccttcagcagcctgatcggccagacccccagatggcacgtgttcgagtgcctggacagcccccccagaagcgagaccgagtgccccgacggcctgctgtgcaccagcaccatccccttccactacaagagatacacccacttcctgctggcccagagcagagccggcgaccaccccttcagcagccccagccccgccagcggcggcagcttcagcgagaccaagagcggcgtgctgtgcagcctggaggagagatggagcagctaccagaaccagaccgacaacagcgtgagcaacgaccccctgctgatgacccagtacttcaagaagagccccagcctgaccgaggccagcgagaagatcagcacccacatccagaccagccagcaggccctgcagttcaccgacttcgtggagaacgacaagctggtgggcgtggccctgagactggccaacaacagcgagcacatcaacctgcccctgcccgagaacgacttcagcgactgcgagatcagctacagccccctgcagagcgacgaggacacccacgacatcgacgagaagcccgacgacagccaggagcagctgttcttcaccgagagcagcaaggacggcagcctggaggaggacgacgacagctgcggcttcttcaagaagagacacggccccctgctgaaggaccaggacgagagctgccccaaggtgaacagcttcctgaccagagacaagtacgacgagggcctgtacagattcaacagcctgaacgacctgagccagcccatcagccagaacaacgagagcaccctgccctacgacctggcctgcaccggcggcgacttcgtgctgttcccccccgccctggccggcaagctggccgccagcgtgcaccaggccaccaaggccaagcccgacgagcccgagttccacagcgcccagagcaacaagcagaagcaggtgatcgaggagagcagcgtgtacaaccaggtgagcctgcccctggtgaagagcctgatgctgaagcccttcgagagccaggtggagggctacctgagcagccagcccacccagaacaccatcagaaagctgagcagcgagaacctgaacgccaagaacaacaccaacagcgcctgcttctgcagaaaggccctggagggcgtgcccgtgggcaaggccaccatcctgaacaccgagaacctgagcagcacccccgcccccaagtacctgaagatcctgcccagcggcctgaagtacaacgccagacaccccagcaccaaggtgatgaagcagatggacatcggcgtgtacttcggcctgccccccaagagaaaggaggagaagctgctgggcgagagcgccctggagggcatcaacctgaaccccgtgcccagccccaaccagaagagaagcagccagtgcaagagaaaggccgagaagagcctgagcgacctggagttcgacgccagcaccctgcacgagagccagctgagcgtggagctgagcagcgagagaagccagagacagaagaagagatgcagaaagagcaacagcctgcaggagggcgcctgccagaagagaagcgaccacctgatcaacaccgagagcgaggccgtgaacctgagcaaggtgaaggtgttcaccaagagcgcccacggcggcctgcagagaggcaacaagaagatccccgagagcagcaacgtgggcggcagcagaaagaagacctgccccttctacaagaagatccccggcaccggcttcaccgtggacgccttccagtacggcgtggtggagggctgcaccgcctacttcctgacccacttccacagcgaccactacgccggcctgagcaagcacttcaccttccccgtgtactgcagcgagatcaccggcaacctgctgaagaacaagctgcacgtgcaggagcagtacatccaccccctgcccctggacaccgagtgcatcgtgaacggcgtgaaggtggtgctgctggacgccaaccactgccccggcgccgtgatgatcctgttctacctgcccaacggcaccgtgatcctgcacaccggcgacttcagagccgaccccagcatggagagaagcctgctggccgaccagaaggtgcacatgctgtacctggacaccacctactgcagccccgagtacaccttccccagccagcaggaggtgatcagattcgccatcaacaccgccttcgaggccgtgaccctgaacccccacgccctggtggtgtgcggcacctacagcatcggcaaggagaaggtgttcctggccatcgccgacgtgctgggcagcaaggtgggcatgagccaggagaagtacaagaccctgcagtgcctgaacatccccgagatcaacagcctgatcaccaccgacatgtgcagcagcctggtgcacctgctgcccatgatgcagatcaacttcaagggcctgcagagccacctgaagaagtgcggcggcaagtacaaccagatcctggccttcagacccaccggctggacccacagcaacaagttcaccagaatcgccgacgtgatcccccagaccaagggcaacatcagcatctacggcatcccctacagcgagcacagcagctacctggagatgaagagattcgtgcagtggctgaagccccagaagatcatccccaccgtgaacgtgggcacctggaagagcagaagcaccatggagaagtacttcagagagtggaagctggaggccggctactag

SEQ ID NO: 79471 - DNA, 3123 bp, synthetic construct; identical to SEQ ID NO: 79470
  misc_feature 1..3123: note = Description of Artificial Sequence: Synthetic coding sequence
  source 1..3123: mol_type = other DNA

SEQ ID NO: 79472 - DNA, 813 bp, synthetic construct
  misc_feature 1..813: note = Description of Artificial Sequence: Synthetic coding sequence
  source 1..813: mol_type = other DNA
atgctgcagaagcccaagagcgtgaagctgagagccctgagaagccccagaaagttcggcgtggccggcagaagctgccaggaggtgctgagaaagggctgcctgagattccagctgcccgagagaggcagcagactgtgcctgtacgaggacggcaccgagctgaccgaggactacttccccagcgtgcccgacaacgccgagctggtgctgctgaccctgggccaggcctggcagggctacgtgagcgacatcagaagattcctgagcgccttccacgagccccaggtgggcctgatccaggccgcccagcagctgctgtgcgacgagcaggccccccagagacagagactgctggccgacctgctgcacaacgtgagccagaacatcgccgccgagaccagagccgaggaccccccctggttcgagggcctggagagcagattccagagcaagagcggctacctgagatacagctgcgagagcagaatcagaagctacctgagagaggtgagcagctaccccagcaccgtgggcgccgaggcccaggaggagttcctgagagtgctgggcagcatgtgccagagactgagaagcatgcagtacaacggcagctacttcgacagaggcgccaagggcggcagcagactgtgcacccccgagggctggttcagctgccagggccccttcgacatggacagctgcctgagcagacacagcatcaacccctacagcaacagagagagcagaatcctgttcagcacctggaacctggaccacatcgacggcgtgctgctgtgcggccccggctag

SEQ ID NO: 79473 - DNA, 825 bp, synthetic construct
  misc_feature 1..825: note = Description of Artificial Sequence: Synthetic coding sequence
  source 1..825: mol_type = other DNA
atgtgcctgctgctggacagacacctgctgttcgtgcccctggtggccgacgtgagcgacatcagaagattcctgagcgccttccacgagccccaggtgggcctgatccaggccgcccagcagctgctgtgcgacgagcaggccccccagagacagagactgctggccgacctgctgcacaacgtgagccagaacatcgccgccgagaccagagccgaggaccccccctggttcgagggcctggagagcagattccagagcaagagcggctacctgagatacagctgcgagagcagaatcagaagctacctgagagaggtgagcagctaccccagcaccgtgggcgccgaggcccaggaggagttcctgagagtgctgggcagcatgtgccagagactgagaagcatgcagtacaacggcagctacttcgacagaggcgccaagggcggcagcagactgtgcacccccgagggctggttcagctgccagggccccttcgacatggacagctgcctgagcagacacagcatcaacccctacagcaacagagagagcagaatcctgttcagcacctggaacctggaccacatcatcgagaagaagagaaccatcatccccaccctggtggaggccatcaaggagcaggacggcagagaggtggactgggagtacttctacggcctgctgttcaccagcgagaacctgaagctggtgcacatcgtgtgccacaagaagaccacccacaagctgaactgcgaccccagcagaatctacaagccccagaccagactgaagagaaagcagcccgtgagaaagagacagtag

SEQ ID NO: 79474 - DNA, 312 bp, synthetic construct
  misc_feature 1..312: note = Description of Artificial Sequence: Synthetic coding sequence
  source 1..312: mol_type = other DNA
atgctgcagaagcccaagagcgtgaagctgagagccctgagaagccccagaaagttcggcgtggccggcagaagctgccaggaggtgctgagaaagggctgcctgagattccagctgcccgagagaggcagcagactgtgcctgtacgaggacggcaccgagctgaccgaggactacttccccagcgtgcccgacaacgccgagctggtgctgctgaccctgggccaggcctggcagggctggttcagacacgtgagccaggacagcctgaccctgctgggcagcagctgcccccccgccctggtgagctag

SEQ ID NO: 79475 - DNA, 825 bp, synthetic construct; identical to SEQ ID NO: 79473
  misc_feature 1..825: note = Description of Artificial Sequence: Synthetic coding sequence
  source 1..825: mol_type = other DNA

SEQ ID NO: 79476 - DNA, 1017 bp, synthetic construct
  misc_feature 1..1017: note = Description of Artificial Sequence: Synthetic coding sequence
  source 1..1017: mol_type = other DNA
atgctgcagaagcccaagagcgtgaagctgagagccctgagaagccccagaaagttcggcgtggccggcagaagctgccaggaggtgctgagaaagggctgcctgagattccagctgcccgagagaggcagcagactgtgcctgtacgaggacggcaccgagctgaccgaggactacttccccagcgtgcccgacaacgccgagctggtgctgctgaccctgggccaggcctggcagggctacgtgagcgacatcagaagattcctgagcgccttccacgagccccaggtgggcctgatccaggccgcccagcagctgctgtgcgacgagcaggccccccagagacagagactgctggccgacctgctgcacaacgtgagccagaacatcgccgccgagaccagagccgaggaccccccctggttcgagggcctggagagcagattccagagcaagagcggctacctgagatacagctgcgagagcagaatcagaagctacctgagagaggtgagcagctaccccagcaccgtgggcgccgaggcccaggaggagttcctgagagtgctgggcagcatgtgccagagactgagaagcatgcagtacaacggcagctacttcgacagaggcgccaagggcggcagcagactgtgcacccccgagggctggttcagctgccagggccccttcgacatggacagctgcctgagcagacacagcatcaacccctacagcaacagagagagcagaatcctgttcagcacctggaacctggaccacatcatcgagaagaagagaaccatcatccccaccctggtggaggccatcaaggagcaggacggcagagaggtggactgggagtacttctacggcctgctgttcaccagcgagaacctgaagctggtgcacatcgtgtgccacaagaagaccacccacaagctgaactgcgaccccagcagaatctacaagccccagaccagactgaagagaaagcagcccgtgagaaagagacagtag

SEQ ID NO: 79477 - DNA, 351 bp, synthetic construct
  misc_feature 1..351: note = Description of Artificial Sequence: Synthetic coding sequence
  source 1..351: mol_type = other DNA
atgctgcagaagcccaagagcgtgaagctgagagccctgagaagccccagaaagttcggcgtggccggcagaagctgccaggaggtgctgagaaagggctgcctgagattccagctgcccgagagaggcagcagactgtgcctgtacgaggacggcaccgagctgaccgaggactacttccccagcgtgcccgacaacgccgagctggtgctgctgaccctgggccaggcctggcagggcagcgtgggcgtgagagccagaaccaagaccagagacaccagcagcctgagccccggcgactgccaggccctgggcaacggcggcagatgcggccagagactgttcctgtag

SEQ ID NO: 79478 - DNA, 261 bp, synthetic construct
  misc_feature 1..261: note = Description of Artificial Sequence: Synthetic coding sequence
  source 1..261: mol_type = other DNA
atgctgcagaagcccaagagcgtgaagctgagagccctgagaagccccagaaagttcggcgtggccggcagaagctgccaggaggtgctgagaaagggctgcctgagattccagctgcccgagagaggcagcagactgtgcctgtacgaggacggcaccgagctgaccgaggactacttccccagcgtgcccgacaacgccgagctggtgctgctgaccctgggccaggcctggcagggctgctggagcgccgtggcctag

SEQ ID NO: 79479 - DNA, 249 bp, synthetic construct
  misc_feature 1..249: note = Description of Artificial Sequence: Synthetic coding sequence
  source 1..249: mol_type = other DNA
atgctgcagaagcccaagagcgtgaagctgagagccctgagaagccccagaaagttcggcgtggccggcagaagctgccaggaggtgctgagaaagggctgcctgagattccagctgcccgagagaggcagcagactgtgcctgtacgaggacggcaccgagctgaccgaggactacttccccagcgtgcccgacaacgccgagctggtgctgctgaccctgggccaggcctggcagggctgcgagtag

SEQ ID NO: 79480 - DNA, 813 bp, synthetic construct; identical to SEQ ID NO: 79472
  misc_feature 1..813: note = Description of Artificial Sequence: Synthetic coding sequence
  source 1..813: mol_type = other DNA

SEQ ID NO: 79481 - DNA, 3183 bp, synthetic construct
  misc_feature 1..3183: note = Description of Artificial Sequence: Synthetic coding sequence
  source 1..3183: mol_type = other DNA
atggagcagctgaacgagctggagctgctgatggagaagagcttctgggaggaggccgagctgcccgccgagctgttccagaagaaggtggtggccagcttccccagaaccgtgctgagcaccggcatggacaacagatacctggtgctggccgtgaacaccgtgcagaacaaggagggcaactgcgagaagagactggtgatcaccgccagccagagcctggagaacaaggagctgtgcatcctgagaaacgactggtgcagcgtgcccgtggagcccggcgacatcatccacctggagggcgactgcaccagcgacacctggatcatcgacaaggacttcggctacctgatcctgtaccccgacatgctgatcagcggcaccagcatcgccagcagcatcagatgcatgagaagagccgtgctgagcgagaccttcagaagcagcgaccccgccaccagacagatgctgatcggcaccgtgctgcacgaggtgttccagaaggccatcaacaacagcttcgcccccgagaagctgcaggagctggccttccagaccatccaggagatcagacacctgaaggagatgtacagactgaacctgagccaggacgagatcaagcaggaggtggaggactacctgcccagcttctgcaagtgggccggcgacttcatgcacaagaacaccagcaccgacttcccccagatgcagctgagcctgcccagcgacaacagcaaggacaacagcacctgcaacatcgaggtggtgaagcccatggacatcgaggagagcatctggagccccagattcggcctgaagggcaagatcgacgtgaccgtgggcgtgaagatccacagaggctacaagaccaagtacaagatcatgcccctggagctgaagaccggcaaggagagcaacagcatcgagcacagaagccaggtggtgctgtacaccctgctgagccaggagagaagagccgaccccgaggccggcctgctgctgtacctgaagaccggccagatgtaccccgtgcccgccaaccacctggacaagagagagctgctgaagctgagaaaccagatggccttcagcctgttccacagaatcagcaagagcgccaccagacagaagacccagctggccagcctgccccagatcatcgaggaggagaagacctgcaagtactgcagccagatcggcaactgcgccctgtacagcagagccgtggagcagcagatggactgcagcagcgtgcccatcgtgatgctgcccaagatcgaggaggagacccagcacctgaagcagacccacctggagtacttcagcctgtggtgcctgatgctgaccctggagagccagagcaaggacaacaagaagaaccaccagaacatctggctgatgcccgccagcgagatggagaagagcggcagctgcatcggcaacctgatcagaatggagcacgtgaagatcgtgtgcgacggccagtacctgcacaacttccagtgcaagcacggcgccatccccgtgaccaacctgatggccggcgacagagtgatcgtgagcggcgaggagagaagcctgttcgccctgagcagaggctacgtgaaggagatcaacatgaccaccgtgacctgcctgctggacagaaacctgagcgtgctgcccgagagcaccctgttcagactggaccaggaggagaagaactgcgacatcgacacccccctgggcaacctgagcaagctgatggagaacaccttcgtgagcaagaagctgagagacctgatcatcgacttcagagagccccagttcatcagctacctgagcagcgtgctgccccacgacgccaaggacaccgtggcctgcatcctgaagggcctgaacaagccccagagacaggccatgaagaaggtgctgctgagcaaggactacaccctgatcgtgggcatgcccggcaccggcaagaccaccaccatctgcaccctggtgagaatcctgtacgcctgcggcttcagcgtgctgctgaccagctacacccacagcgccgtggacaacatcctgctgaagctggccaagttcaagatcggcttcctgagactgggccagatccagaaggtgcaccccgccatccagcagttcaccgagcaggagatctgcagaagcaagagcatcaagagcctggccctgctggaggagctgtacaacagccagctgatcgtggccaccacctgcatgggcatcaaccaccccatcttcagcagaaagatcttcgacttctgcatcgtggacgaggccagccagatcagccagcccatctgcctgggccccctgttcttcagcagaagattcgtgctggtgggcgaccaccagcagctgccccccctggtgctgaacagagaggccagagccctgggcatgagcgagagcctgttcaagagactggagcagaacaagagcgccgtggtgcagctgaccgtgcagtacagaatgaacagcaagatcatgagcctgagcaacaagctgacctacgagggcaagctggagtgcggcagcgacaaggtggccaacgccgtgatcaacctgagacacttcaaggacgtgaagctggagctggagttctacgccgactacagcgacaacccctggctgatgggcgtgttcgagcccaacaaccccgtgtgcttcctgaacaccgacaaggtgcccgcccccgagcaggtggagaagggcggcgtgagcaacgtgaccgaggccaagctgatcgtgttcctgaccagcatcttcgtgaaggccggctgcagccccagcgacatcggcatcatcgccccctacagacagcagctgaagatcatcaacgacctgctggccagaagcatcggcatggtggaggtgaacaccgtggacaagtaccagggcagagacaagagcatcgtgctggtgagcttcgtgagaagcaacaaggacggcaccgtgggcgagctgctgaaggactggagaagactgaacgtggccatcaccagagccaagcacaagctgatcctgctgggctgcgtgcccagcctgaactgctacccccccctggagaagctgctgaaccacctgaacagcgagaagctgatcatcgacctgcccagcagagagcacgagagcctgtgccacatcctgggcgacttccagagagagtag

SEQ ID NO: 79482 - DNA, 2469 bp, synthetic construct
  misc_feature 1..2469: note = Description of Artificial Sequence: Synthetic coding sequence
  source 1..2469: mol_type = other DNA
atggagcagctgaacgagctggagctgctgatggagaagagcttctgggaggaggccgagctgcccgccgagctgttccagaagaaggtggtggccagcttccccagaaccgtgctgagcaccggcatggacaacagatacctggtgctggccgtgaacaccgtgcagaacaaggagggcaactgcgagaagagactggtgatcaccgccagccagagcctggagaacaaggagctgtgcatcctgagaaacgactggtgcagcgtgcccgtggagcccggcgacatcatccacctggagggcgactgcaccagcgacacctggatcatcgacaaggacttcggctacctgatcctgtaccccgacatgctgatcagcggcaccagcatcgccagcagcatcagatgcatgagaagagccgtgctgagcgagaccttcagaagcagcgaccccgccaccagacagatgctgatcggcaccgtgctgcacgaggtgttccagaaggccatcaacaacagcttcgcccccgagaagctgcaggagctggccttccagaccatccaggagatcagacacctgaaggagatgtacagactgaacctgagccaggacgagatcaagcaggaggtggaggactacctgcccagcttctgcaagtgggccggcgacttcatgcacaagaacaccagcaccgacttcccccagatgcagctgagcctgcccagcgacaacagcaaggacaacagcacctgcaacatcgaggtggtgaagcccatggacatcgaggagagcatctggagccccagattcggcctgaagggcaagatcgacgtgaccgtgggcgtgaagatccacagaggctacaagaccaagtacaagatcatgcccctggagctgaagaccggcaaggagagcaacagcatcgagcacagaagccaggtggtgctgtacaccctgctgagccaggagagaagagccgaccccgaggccggcctgctgctgtacctgaagaccggccagatgtaccccgtgcccgccaaccacctggacaagagagagctgctgaagctgagaaaccagatggccttcagcctgttccacagaatcagcaagagcgccaccagacagaagacccagctggccagcctgccccagatcatcgaggaggagaagacctgcaagtactgcagccagatcggcaactgcgccctgtacagcagagccgtggagcagcagatggactgcagcagcgtgcccatcgtgatgctgcccaagatcgaggaggagacccagcacctgaagcagacccacctggagtacttcagcctgtggtgcctgatgctgaccctggagagccagagcaaggacaacaagaagaaccaccagaacatctggctgatgcccgccagcgagatggagaagagcggcagctgcatcggcaacctgatcagaatggagcacgtgaagatcgtgtgcgacggccagtacctgcacaacttccagtgcaagcacggcgccatccccgtgaccaacctgatggccggcgacagagtgatcgtgagcggcgaggagagaagcctgttcgccctgagcagaggctacgtgaaggagatcaacatgaccaccgtgacctgcctgctggacagaaacctgagcgtgctgcccgagagcaccctgttcagactggaccaggaggagaagaactgcgacatcgacacccccctgggcaacctgagcaagctgatggagaacaccttcgtgagcaagaagctgagagacctgatcatcgacttcagagagccccagttcatcagctacctgagcagcgtgctgccccacgacgccaaggacaccgtggcctgcatcctgaagggcctgaacaagccccagagacaggccatgaagaaggtgctgctgagcaaggactacaccctgatcgtgggcatgcccggcaccggcaagaccaccaccatctgcaccctggtgcccgcccccgagcaggtggagaagggcggcgtgagcaacgtgaccgaggccaagctgatcgtgttcctgaccagcatcttcgtgaaggccggctgcagccccagcgacatcggcatcatcgccccctacagacagcagctgaagatcatcaacgacctgctggccagaagcatcggcatggtggaggtgaacaccgtggacaagtaccagggcagagacaagagcatcgtgctggtgagcttcgtgagaagcaacaaggacggcaccgtgggcgagctgctgaaggactggagaagactgaacgtggccatcaccagagccaagcacaagctgatcctgctgggctgcgtgcccagcctgaactgctacccccccctggagaagctgctgaaccacctgaacagcgagaagctgatcatcgacctgcccagcagagagcacgagagcctgtgccacatcctgggcgacttccagagagagtag

SEQ ID NO: 79483 - DNA, 3441 bp, synthetic construct
  misc_feature 1..3441: note = Description of Artificial Sequence: Synthetic coding sequence
  source 1..3441: mol_type = other DNA
atgaagaccccctgcatccccagccccaagcagggcagcaagggcagaggccagagccccgccgcccaggtgagaggccccacctggaacgcccccgccagagagggcagacccggcgccggccacctgggccacctgagagtgggcgcctgcgccagaggcgcccaggccagagccttcttccccttcctgagcttcctgtgctaccccagattcagatgcctgttctgcctgcagttcgccatccccgccagcagaatggagcagctgaacgagctggagctgctgatggagaagagcttctgggaggaggccgagctgcccgccgagctgttccagaagaaggtggtggccagcttccccagaaccgtgctgagcaccggcatggacaacagatacctggtgctggccgtgaacaccgtgcagaacaaggagggcaactgcgagaagagactggtgatcaccgccagccagagcctggagaacaaggagctgtgcatcctgagaaacgactggtgcagcgtgcccgtggagcccggcgacatcatccacctggagggcgactgcaccagcgacacctggatcatcgacaaggacttcggctacctgatcctgtaccccgacatgctgatcagcggcaccagcatcgccagcagcatcagatgcatgagaagagccgtgctgagcgagaccttcagaagcagcgaccccgccaccagacagatgctgatcggcaccgtgctgcacgaggtgttccagaaggccatcaacaacagcttcgcccccgagaagctgcaggagctggccttccagaccatccaggagatcagacacctgaaggagatgtacagactgaacctgagccaggacgagatcaagcaggaggtggaggactacctgcccagcttctgcaagtgggccggcgacttcatgcacaagaacaccagcaccgacttcccccagatgcagctgagcctgcccagcgacaacagcaaggacaacagcacctgcaacatcgaggtggtgaagcccatggacatcgaggagagcatctggagccccagattcggcctgaagggcaagatcgacgtgaccgtgggcgtgaagatccacagaggctacaagaccaagtacaagatcatgcccctggagctgaagaccggcaaggagagcaacagcatcgagcacagaagccaggtggtgctgtacaccctgctgagccaggagagaagagccgaccccgaggccggcctgctgctgtacctgaagaccggccagatgtaccccgtgcccgccaaccacctggacaagagagagctgctgaagctgagaaaccagatggccttcagcctgttccacagaatcagcaagagcgccaccagacagaagacccagctggccagcctgccccagatcatcgaggaggagaagacctgcaagtactgcagccagatcggcaactgcgccctgtacagcagagccgtggagcagcagatggactgcagcagcgtgcccatcgtgatgctgcccaagatcgaggaggagacccagcacctgaagcagacccacctggagtacttcagcctgtggtgcctgatgctgaccctggagagccagagcaaggacaacaagaagaaccaccagaacatctggctgatgcccgccagcgagatggagaagagcggcagctgcatcggcaacctgatcagaatggagcacgtgaagatcgtgtgcgacggccagtacctgcacaacttccagtgcaagcacggcgccatccccgtgaccaacctgatggccggcgacagagtgatcgtgagcggcgaggagagaagcctgttcgccctgagcagaggctacgtgaaggagatcaacatgaccaccgtgacctgcctgctggacagaaacctgagcgtgctgcccgagagcaccctgttcagactggaccaggaggagaagaactgcgacatcgacacccccctgggcaacctgagcaagctgatggagaacaccttcgtgagcaagaagctgagagacctgatcatcgacttcagagagccccagttcatcagctacctgagcagcgtgctgccccacgacgccaaggacaccgtggcctgcatcctgaagggcctgaacaagccccagagacaggccatgaagaaggtgctgctgagcaaggactacaccctgatcgtgggcatgcccggcaccggcaagaccaccaccatctgcaccctggtgagaatcctgtacgcctgcggcttcagcgtgctgctgaccagctacacccacagcgccgtggacaacatcctgctgaagctggccaagttcaagatcggcttcctgagactgggccagatccagaaggtgcaccccgccatccagcagttcaccgagcaggagatctgcagaagcaagagcatcaagagcctggccctgctggaggagctgtacaacagccagctgatcgtggccaccacctgcatgggcatcaaccaccccatcttcagcagaaagatcttcgacttctgcatcgtggacgaggccagccagatcagccagcccatctgcctgggccccctgttcttcagcagaagattcgtgctggtgggcgaccaccagcagctgccccccctggtgctgaacagagaggccagagccctgggcatgagcgagagcctgttcaagagactggagcagaacaagagcgccgtggtgcagctgaccgtgcagtacagaatgaacagcaagatcatgagcctgagcaacaagctgacctacgagggcaagctggagtgcggcagcgacaaggtggccaacgccgtgatcaacctgagacacttcaaggacgtgaagctggagctggagttctacgccgactacagcgacaacccctggctgatgggcgtgttcgagcccaacaaccccgtgtgcttcctgaacaccgacaaggtgcccgcccccgagcaggtggagaagggcggcgtgagcaacgtgaccgaggccaagctgatcgtgttcctgaccagcatcttcgtgaaggccggctgcagccccagcgacatcggcatcatcgccccctacagacagcagctgaagatcatcaacgacctgctggccagaagcatcggcatggtggaggtgaacaccgtggacaagtaccagggcagagacaagagcatcgtgctggtgagcttcgtgagaagcaacaaggacggcaccgtgggcgagctgctgaaggactggagaagactgaacgtggccatcaccagagccaagcacaagctgatcctgctgggctgcgtgcccagcctgaactgctacccccccctggagaagctgctgaaccacctgaacagcgagaagctgatcatcgacctgcccagcagagagcacgagagcctgtgccacatcctgggcgacttccagagagagtag

SEQ ID NO: 79484 - DNA, 717 bp, synthetic construct
  misc_feature 1..717: note = Description of Artificial Sequence: Synthetic coding sequence
  source 1..717: mol_type = other DNA
atgctgtgcttcctgagaggcatggccttcgtgcccttcctgctggtgacctggagcagcgccgccttcatcatcagctacgtggtggccgtgctgagcggccacgtgaaccccttcctgccctacatcagcgacaccggcaccaccccccccgagagcggcatcttcggcttcatgatcaacttcagcgccttcctgggcgccgccaccatgtacaccagatacaagatcgtgcagaagcagaaccagacctgctacttcagcacccccgtgttcaacctggtgagcctggtgctgggcctggtgggctgcttcggcatgggcatcgtggccaacttccaggagctggccgtgcccgtggtgcacgacggcggcgccctgctggccttcgtgtgcggcgtggtgtacaccctgctgcagagcatcatcagctacaagagctgcccccagtggaacagcctgagcacctgccacatcagaatggtgatcagcgccgtgagctgcgccgccgtgatccccatgatcgtgtgcgccagcctgatcagcatcaccaagctggagtggaaccccagagagaaggactacgtgtaccacgtggtgagcgccatctgcgagtggaccgtggccttcggcttcatcttctacttcctgaccttcatccaggacttccagagcgtgaccctgagaatcagcaccgagatcaacggcgacatctag

SEQ ID NO: 79485 - DNA, 801 bp, synthetic construct
  misc_feature 1..801: note = Description of Artificial Sequence: Synthetic coding sequence
  source 1..801: mol_type = other DNA
atgtggtggttccagcagggcctgagcttcctgcccagcgccctggtgatctggaccagcgccgccttcatcttcagctacatcaccgccgtgaccctgcaccacatcgaccccgccctgccctacatcagcgacaccggcaccgtggcccccgagaagtgcctgttcggcgccatgctgaacatcgccgccgtgctgtgcatcgccaccatctacgtgagatacaagcaggtgcacgccctgagccccgaggagaacgtgatcatcaagctgaacaaggccggcctggtgctgggcatcctgagctgcctgggcctgagcatcgtggccaacttccagaagaccaccctgttcgccgcccacgtgagcggcgccgtgctgaccttcggcatgggcagcctgtacatgttcgtgcagaccatcctgagctaccagatgcagcccaagatccacggcaagcaggtgttctggatcagactgctgctggtgatctggtgcggcgtgagcgccctgagcatgctgacctgcagcagcgtgctgcacagcggcaacttcggcaccgacctggagcagaagctgcactggaaccccgaggacaagggctacgtgctgcacatgatcaccaccgccgccgagtggagcatgagcttcagcttcttcggcttcttcctgacctacatcagagacttccagaagatcagcctgagagtggaggccaacctgcacggcctgaccctgtacgacaccgccccctgccccatcaacaacgagagaaccagactgctgagcagagacatctag

SEQ ID NO: 79486 - DNA, 801 bp, synthetic construct; identical to SEQ ID NO: 79485
  misc_feature 1..801: note = Description of Artificial Sequence: Synthetic coding sequence
  source 1..801: mol_type = other DNA

SEQ ID NO: 79487 - DNA, 699 bp, synthetic construct
  misc_feature 1..699: note = Description of Artificial Sequence: Synthetic coding sequence
  source 1..699: mol_type = other DNA
atgcccagcctgtgggacagattcagcagcagcagcaccagcagcagccccagcagcctgcccagaacccccacccccgacagaccccccagaagcgcctggggcagcgccaccagagaggagggcttcgacagaagcaccagcctggagagcagcgactgcgagagcctggacagcagcaacagcggcttcggccccgaggaggacaccgcctacctggacggcgtgagcctgcccgacttcgagctgctgagcgaccccgaggacgagcacctgtgcgccaacctgatgcagctgctgcaggagagcctggcccaggccagactgggcagcagaagacccgccagactgctgatgcccagccagctggtgagccaggtgggcaaggagctgctgagactggcctacagcgagccctgcggcctgagaggcgccctgctggacgtgtgcgtggagcagggcaagagctgccacagcgtgggccagctggccctggaccccagcctggtgcccaccttccagctgaccctggtgctgagactggacagcagactgtggcccaagatccagggcctgttcagcagcgccaacagccccttcctgcccggcttcagccagagcctgaccctgagcaccggcttcagagtgatcaagaagaagctgtacagcagcgagcagctgctgatcgaggagtgctag

SEQ ID NO: 79488 - DNA, 582 bp, synthetic construct
  misc_feature 1..582: note = Description of Artificial Sequence: Synthetic coding sequence
  source 1..582: mol_type = other DNA
atggtggccaccggcagcctgagcagcaagaaccccgccagcatcagcgagctgctggactgcggctaccaccccgagagcctgctgagcgacttcgactactgggactacgtggtgcccgagcccaacctgaacgaggtgatcttcgaggagagcacctgccagaacctggtgaagatgctggagaactgcctgagcaagagcaagcagaccaagctgggctgcagcaaggtgctggtgcccgagaagctgacccagagaatcgcccaggacgtgctgagactgagcagcaccgagccctgcggcctgagaggctgcgtgatgcacgtgaacctggagatcgagaacgtgtgcaagaagctggacagaatcgtgtgcgacagcagcgtggtgcccaccttcgagctgaccctggtgttcaagcaggagaactgcagctggaccagcttcagagacttcttcttcagcagaggcagattcagcagcggcttcagaagaaccctgatcctgagcagcggcttcagactggtgaagaagaagctgtacagcctgatcggcaccaccgtgatcgagggcagctag

SEQ ID NO: 79489 - DNA, 534 bp, synthetic construct
  misc_feature 1..534: note = Description of Artificial Sequence: Synthetic coding sequence
  source 1..534: mol_type = other DNA
atggtggccaccggcagcctgagcagcaagaaccccgccagcatcagcgagctgctggactgcggctaccaccccgagagcctgctgagcgacttcgactactgggactacgtggtgcccgagcccaacctgaacgaggtgatcttcgaggagagcacctgccagaacctggtgaagatgctggagaactgcctgagcaagagcaagcagaccaagctgggctgcagcaaggtgctggtgcccgagaagctgacccagagaatcgcccaggacgtgctgagactgagcagcaccgagccctgcggcctgagaggctgcgtgatgcacgtgaacctggagatcgagaacgtgtgcaagaagctggacagaatcgtgtgcgacagcagcgtggtgcccaccttcgagctgaccctggtgttcaagcaggagaactgcagctggaccagcttcagagacttcttcttcagcagaggcagattcagcagcggcttcagaagaaccctgatcctgagcagcggcttcagactggtgtag

SEQ ID NO: 79490 - DNA, 387 bp, synthetic construct
  misc_feature 1..387: note = Description of Artificial Sequence: Synthetic coding sequence
  source 1..387: mol_type = other DNA
atggtggccaccggcagcctgagcagcaagaaccccgccagcatcagcgagctgctggactgcggctaccaccccgagagcctgctgagcgacttcgactactgggactacgtggtgcccgagcccaacctgaacgaggtgatcttcgaggagagcacctgccagaacctggtgaagatgctggagaactgcctgagcaagagcaagcagaccaagctgggctgcagcaaggtgctggtgcccgagaagctgacccagagaatcgcccaggacgtgctgagactgagcagcaccgagccctgcggcctgagaggctgcgtgatgcacgtgaacctggagatcgagaacgtgtgcaagaagctggacagaatcgtgtgcgacagctag

SEQ ID NO: 79491 - DNA, 1239 bp, synthetic construct
  misc_feature 1..1239: note = Description of Artificial Sequence: Synthetic coding sequence
  source 1..1239: mol_type = other DNA
atggccaacgtggccgacaccaagctgtacgacatcctgggcgtgccccccggcgccagcgagaacgagctgaagaaggcctacagaaagctggccaaggagtaccaccccgacaagaaccccaacgccggcgacaagttcaaggagatcagcttcgcctacgaggtgctgagcaaccccgagaagagagagctgtacgacagatacggcgagcagggcctgagagagggcagcggcggcggcggcggcatggacgacatcttcagccacatcttcggcggcggcctgttcggcttcatgggcaaccagagcagaagcagaaacggcagaagaagaggcgaggacatgatgcaccccctgaaggtgagcctggaggacctgtacaacggcaagaccaccaagctgcagctgagcaagaacgtgctgtgcagcgcctgcagcggccagggcggcaagagcggcgccgtgcagaagtgcagcgcctgcagaggcagaggcgtgagaatcatgatcagacagctggcccccggcatggtgcagcagatgcagagcgtgtgcagcgactgcaacggcgagggcgaggtgatcaacgagaaggacagatgcaagaagtgcgagggcaagaaggtgatcaaggaggtgaagatcctggaggtgcacgtggacaagggcatgaagcacggccagagaatcaccttcaccggcgaggccgaccaggcccccggcgtggagcccggcgacatcgtgctgctgctgcaggagaaggagcacgaggtgttccagagagacggcaacgacctgcacatgacctacaagatcggcctggtggaggccctgtgcggcttccagttcaccttcaagcacctggacggcagacagatcgtggtgaagtacccccccggcaaggtgatcgagcccggctgcgtgagagtggtgagaggcgagggcatgccccagtacagaaaccccttcgagaagggcgacctgtacatcaagttcgacgtgcagttccccgagaacaactggatcaaccccgacaagctgagcgagctggaggacctgctgcccagcagacccgaggtgcccaacatcatcggcgagaccgaggaggtggagctgcaggagttcgacagcaccagaggcagcggcggcggccagagaagagaggcctacaacgacagcagcgacgaggagagcagcagccaccacggccccggcgtgcagtgcgcccaccagtag

SEQ ID NO: 79492 - DNA, 1443 bp, synthetic construct
  misc_feature 1..1443: note = Description of Artificial Sequence: Synthetic coding sequence
  source 1..1443: mol_type = other DNA
atggccgccagatgcagcaccagatggctgctggtggtggtgggcacccccagactgcccgccatcagcggcagaggcgccagaccccccagagagggcgtggtgggcgcctggctgagcagaaagctgagcgtgcccgccttcgccagcagcctgaccagctgcggccccagagccctgctgaccctgagacccggcgtgagcctgaccggcaccaagcacaaccccttcatctgcaccgccagcttccacaccagcgcccccctggccaaggaggactactaccagatcctgggcgtgcccagaaacgccagccagaaggagatcaagaaggcctactaccagctggccaagaagtaccaccccgacaccaacaaggacgaccccaaggccaaggagaagttcagccagctggccgaggcctacgaggtgctgagcgacgaggtgaagagaaagcagtacgacgcctacggcagcgccggcttcgaccccggcgccagcggcagccagcacagctactggaagggcggccccaccgtggaccccgaggagctgttcagaaagatcttcggcgagttcagcagcagcagcttcggcgacttccagaccgtgttcgaccagccccaggagtacttcatggagctgaccttcaaccaggccgccaagggcgtgaacaaggagttcaccgtgaacatcatggacacctgcgagagatgcaacggcaagggcaacgagcccggcaccaaggtgcagcactgccactactgcggcggcagcggcatggagaccatcaacaccggccccttcgtgatgagaagcacctgcagaagatgcggcggcagaggcagcatcatcatcagcccctgcgtggtgtgcagaggcgccggccaggccaagcagaagaagagagtgatgatccccgtgcccgccggcgtggaggacggccagaccgtgagaatgcccgtgggcaagagagagatcttcatcaccttcagagtgcagaagagccccgtgttcagaagagacggcgccgacatccacagcgacctgttcatcagcatcgcccaggccctgctgggcggcaccgccagagcccagggcctgtacgagaccatcaacgtgaccatcccccccggcacccagaccgaccagaagatcagaatgggcggcaagggcatccccagaatcaacagctacggctacggcgaccactacatccacatcaagatcagagtgcccaagagactgaccagcagacagcagagcctgatcctgagctacgccgaggacgagaccgacgtggagggcaccgtgaacggcgtgaccctgaccagcagcggcggcagcaccatggacagcagcgccggcagcaaggccagaagagaggccggcgaggacgaggagggcttcctgagcaagctgaagaagatgttcaccagctag

SEQ ID NO: 79493 - DNA, 1362 bp, synthetic construct
  misc_feature 1..1362: note = Description of Artificial Sequence: Synthetic coding sequence
  source 1..1362: mol_type = other DNA
atggccgccagatgcagcaccagatggctgctggtggtggtgggcacccccagactgcccgccatcagcggcagaggcgccagaccccccagagagggcgtggtgggcgcctggctgagcagaaagctgagcgtgcccgccttcgccagcagcctgaccagctgcggccccagagccctgctgaccctgagacccggcgtgagcctgaccggcaccaagcacaaccccttcatctgcaccgccagcttccacaccagcgcccccctggccaaggaggactactaccagatcctgggcgtgcccagaaacgccagccagaaggagatcaagaaggcctactaccagctggccaagaagtaccaccccgacaccaacaaggacgaccccaaggccaaggagaagttcagccagctggccgaggcctacgaggtgctgagcgacgaggtgaagagaaagcagtacgacgcctacggcagcgccggcttcgaccccggcgccagcggcagccagcacagctactggaagggcggccccaccgtggaccccgaggagctgttcagaaagatcttcggcgagttcagcagcagcagcttcggcgacttccagaccgtgttcgaccagccccaggagtacttcatggagctgaccttcaaccaggccgccaagggcgtgaacaaggagttcaccgtgaacatcatggacacctgcgagagatgcaacggcaagggcaacgagcccggcaccaaggtgcagcactgccactactgcggcggcagcggcatggagaccatcaacaccggccccttcgtgatgagaagcacctgcagaagatgcggcggcagaggcagcatcatcatcagcccctgcgtggtgtgcagaggcgccggccaggccaagcagaagaagagagtgatgatccccgtgcccgccggcgtggaggacggccagaccgtgagaatgcccgtgggcaagagagagatcttcatcaccttcagagtgcagaagagccccgtgttcagaagagacggcgccgacatccacagcgacctgttcatcagcatcgcccaggccctgctgggcggcaccgccagagcccagggcctgtacgagaccatcaacgtgaccatcccccccggcacccagaccgaccagaagatcagaatgggcggcaagggcatccccagaatcaacagctacggctacggcgaccactacatccacatcaagatcagagtgcccaagagactgaccagcagacagcagagcctgatcctgagctacgccgaggacgagaccgacgtggagggcaccgtgaacggcgtgaccctgaccagcagcggcaagagaagcaccggcaactag

SEQ ID NO: 79494 - DNA, 903 bp, synthetic construct
  misc_feature 1..903: note = Description of Artificial Sequence: Synthetic coding sequence
  source 1..903: mol_type = other DNA
atggccgagccccaggccgagagacccagactgtgcgtgttccccgacctgctgagaccccccagcgccgccgacatcgagacctggtgccagccctacagaaagatcttcggcgagttcagcagcagcagcttcggcgacttccagaccgtgttcgaccagccccaggagtacttcatggagctgaccttcaaccaggccgccaagggcgtgaacaaggagttcaccgtgaacatcatggacacctgcgagagatgcaacggcaagggcaacgagcccggcaccaaggtgcagcactgccactactgcggcggcagcggcatggagaccatcaacaccggccccttcgtgatgagaagcacctgcagaagatgcggcggcagaggcagcatcatcatcagcccctgcgtggtgtgcagaggcgccggccaggccaagcagaagaagagagtgatgatccccgtgcccgccggcgtggaggacggccagaccgtgagaatgcccgtgggcaagagagagatcttcatcaccttcagagtgcagaagagccccgtgttcagaagagacggcgccgacatccacagcgacctgttcatcagcatcgcccaggccctgctgggcggcaccgccagagcccagggcctgtacgagaccatcaacgtgaccatcccccccggcacccagaccgaccagaagatcagaatgggcggcaagggcatccccagaatcaacagctacggctacggcgaccactacatccacatcaagatcagagtgcccaagagactgaccagcagacagcagagcctgatcctgagctacgccgaggacgagaccgacgtggagggcaccgtgaacggcgtgaccctgaccagcagcggcaagagaagcaccggcaactag

SEQ ID NO: 79495 - DNA, 1023 bp, synthetic construct
  misc_feature 1..1023: note = Description of Artificial Sequence: Synthetic coding sequence
  source 1..1023: mol_type = other DNA
atgggcaaggactactaccagaccctgggcctggccagaggcgccagcgacgaggagatcaagagagcctacagaagacaggccctgagataccaccccgacaagaacaaggagcccggcgccgaggagaagttcaaggagatcgccgaggcctacgacgtgctgagcgaccccagaaagagagagatcttcgacagatacggcgaggagggcctgaagggcagcggccccagcggcggcagcggcggcggcgccaacggcaccagcttcagctacaccttccacggcgacccccacgccatgttcgccgagttcttcggcggcagaaaccccttcgacaccttcttcggccagagaaacggcgaggagggcatggacatcgacgaccccttcagcggcttccccatgggcatgggcggcttcaccaacgtgaacttcggcagaagcagaagcgcccaggagcccgccagaaagaagcaggacccccccgtgacccacgacctgagagtgagcctggaggagatctacagcggctgcaccaagaagatgaagatcagccacaagagactgaaccccgacggcaagagcatcagaaacgaggacaagatcctgaccatcgaggtgaagaagggctggaaggagggcaccaagatcaccttccccaaggagggcgaccagaccagcaacaacatccccgccgacatcgtgttcgtgctgaaggacaagccccacaacatcttcaagagagacggcagcgacgtgatctaccccgccagaatcagcctgagagaggccctgtgcggctgcaccgtgaacgtgcccaccctggacggcagaaccatccccgtggtgttcaaggacgtgatcagacccggcatgagaagaaaggtgcccggcgagggcctgcccctgcccaagacccccgagaagagaggcgacctgatcatcgagttcgaggtgatcttccccgagagaatcccccagaccagcagaaccgtgctggagcaggtgctgcccatctag

SEQ ID NO: 79496 - DNA, 723 bp, synthetic construct
  misc_feature 1..723: note = Description of Artificial Sequence: Synthetic coding sequence
  source 1..723: mol_type = other DNA
atgttcgccgagttcttcggcggcagaaaccccttcgacaccttcttcggccagagaaacggcgaggagggcatggacatcgacgaccccttcagcggcttccccatgggcatgggcggcttcaccaacgtgaacttcggcagaagcagaagcgcccaggagcccgccagaaagaagcaggacccccccgtgacccacgacctgagagtgagcctggaggagatctacagcggctgcaccaagaagatgaagatcagccacaagagactgaaccccgacggcaagagcatcagaaacgaggacaagatcctgaccatcgaggtgaagaagggctggaaggagggcaccaagatcaccttccccaaggagggcgaccagaccagcaacaacatccccgccgacatcgtgttcgtgctgaaggacaagccccacaacatcttcaagagagacggcagcgacgtgatctaccccgccagaatcagcctgagagaggccctgtgcggctgcaccgtgaacgtgcccaccctggacggcagaaccatccccgtggtgttcaaggacgtgatcagacccggcatgagaagaaaggtgcccggcgagggcctgcccctgcccaagacccccgagaagagaggcgacctgatcatcgagttcgaggtgatcttccccgagagaatcccccagaccagcagaaccgtgctggagcaggtgctgcccatctag

SEQ ID NO: 79497 - DNA, 1230 bp, synthetic construct
  misc_feature 1..1230: note = Description of Artificial Sequence: Synthetic coding sequence
  source 1..1230: mol_type = other DNA
atgagcagcctgagagccagactgcccgccaccagaagaagagtggcccagcccttcgccagacccgccagccccagcctggtgcccagaagcggcagcgccatggagagcaacaaggacgaggccgagagatgcatcagcatcgccctgaaggccatccagagcaaccagcccgacagagccctgagattcctggagaaggcccagagactgtaccccacccccagagtgagagccctgatcgagagcctgaaccagaagccccagaccgccggcgaccagcccccccccaccgacaccacccacgccacccacagaaaggccggcggcaccgacgcccccagcgccaacggcgaggccggcggcgagagcaccaagggctacaccgccgagcaggtggccgccgtgaagagagtgaagcagtgcaaggactactacgagatcctgggcgtgagcagaggcgccagcgacgaggacctgaagaaggcctacagaagactggccctgaagttccaccccgacaagaaccacgcccccggcgccaccgaggccttcaaggccatcggcaccgcctacgccgtgctgagcaaccccgagaagagaaagcagtacgaccagttcggcgacgacaagagccaggccgccagacacggccacggccacggcgacttccacagaggcttcgaggccgacatcagccccgaggacctgttcaacatgttcttcggcggcggcttccccagcagcaacgtgcacgtgtacagcaacggcagaatgagatacacctaccagcagagacaggacagaagagacaaccagggcgacggcggcctgggcgtgttcgtgcagctgatgcccatcctgatcctgatcctggtgagcgccctgagccagctgatggtgagcagccccccctacagcctgagccccagacccagcgtgggccacatccacagaagagtgaccgaccacctgggcgtggtgtactacgtgggcgacaccttcagcgaggagtacaccggcagcagcctgaagaccgtggagagaaacgtggaggacgactacatcgccaacctgagaaacaactgctggaaggagaagcagcagaaggagggcctgctgtacagagccagatacttcggcgacaccgacatgtaccacagagcccagaagatgggcacccccagctgcagcagactgagcgaggtgcaggccagcctgcacggctag

SEQ ID NO: 79498 - DNA, 1230 bp, synthetic construct; identical to SEQ ID NO: 79497
  misc_feature 1..1230: note = Description of Artificial Sequence: Synthetic coding sequence
  source 1..1230: mol_type = other DNA

SEQ ID NO: 79499 - DNA, 1128 bp, synthetic construct
  misc_feature 1..1128: note = Description of Artificial Sequence: Synthetic coding sequence
  source 1..1128: mol_type = other DNA
atggagagcaacaaggacgaggccgagagatgcatcagcatcgccctgaaggccatccagagcaaccagcccgacagagccctgagattcctggagaaggcccagagactgtaccccacccccagagtgagagccctgatcgagagcctgaaccagaagccccagaccgccggcgaccagcccccccccaccgacaccacccacgccacccacagaaaggccggcggcaccgacgcccccagcgccaacggcgaggccggcggcgagagcaccaagggctacaccgccgagcaggtggccgccgtgaagagagtgaagcagtgcaaggactactacgagatcctgggcgtgagcagaggcgccagcgacgaggacctgaagaaggcctacagaagactggccctgaagttccaccccgacaagaaccacgcccccggcgccaccgaggccttcaaggccatcggcaccgcctacgccgtgctgagcaaccccgagaagagaaagcagtacgaccagttcggcgacgacaagagccaggccgccagacacggccacggccacggcgacttccacagaggcttcgaggccgacatcagccccgaggacctgttcaacatgttcttcggcggcggcttccccagcagcaacgtgcacgtgtacagcaacggcagaatgagatacacctaccagcagagacaggacagaagagacaaccagggcgacggcggcctgggcgtgttcgtgcagctgatgcccatcctgatcctgatcctggtgagcgccctgagccagctgatggtgagcagccccccctacagcctgagccccagacccagcgtgggccacatccacagaagagtgaccgaccacctgggcgtggtgtactacgtgggcgacaccttcagcgaggagtacaccggcagcagcctgaagaccgtggagagaaacgtggaggacgactacatcgccaacctgagaaacaactgctggaaggagaagcagcagaaggagggcctgctgtacagagccagatacttcggcgacaccgacatgtaccacagagcccagaagatgggcacccccagctgcagcagactgagcgaggtgcaggccagcctgcacggctag

SEQ ID NO: 79500 - DNA, 975 bp, synthetic construct
  misc_feature 1..975: note = Description of Artificial Sequence: Synthetic coding sequence
  source 1..975: mol_type = other DNA
atggccagctactacgagatcctggacgtgcccagaagcgccagcgccgacgacatcaagaaggcctacagaagaaaggccctgcagtggcaccccgacaagaaccccgacaacaaggagttcgccgagaagaagttcaaggaggtggccgaggcctacgaggtgctgagcgacaagcacaagagagagatctacgacagatacggcagagagggcctgaccggcaccggcaccggccccagcagagccgaggccggcagcggcggccccggcttcaccttcaccttcagaagccccgaggaggtgttcagagagttcttcggcagcggcgaccccttcgccgagctgttcgacgacctgggccccttcagcgagctgcagaacagaggcagcagacacagcggccccttcttcaccttcagcagcagcttccccggccacagcgacttcagcagcagcagcttcagcttcagccccggcgccggcgccttcagaagcgtgagcaccagcaccaccttcgtgcagggcagaagaatcaccaccagaagaatcatggagaacggccaggagagagtggaggtggaggaggacggccagctgaagagcgtgaccatcaacggcgtgcccgacgacctggccctgggcctggagctgagcagaagagagcagcagcccagcgtgaccagcagaagcggcggcacccaggtgcagcagacccccgccagctgccccctggacagcgacctgagcgaggacgaggacctgcagctggccatggcctacagcctgagcgagatggaggccgccggcaagaagcccgccggcggcagagaggcccagcacagaagacagggcagacccaaggcccagcaccaggaccccggcctgggcggcacccaggagggcgccagaggcgaggccaccaagagaagccccagccccgaggagaaggccagcagatgcctgatcctgtag

SEQ ID NO: 79501 - DNA, 834 bp, synthetic construct
  misc_feature 1..834: note = Description of Artificial Sequence: Synthetic coding sequence
  source 1..834: mol_type = other DNA
atggccagctactacgagatcctggacgtgcccagaagcgccagcgccgacgacatcaagaaggcctacagaagaaaggccctgcagtggcaccccgacaagaaccccgacaacaaggagttcgccgagaagaagttcaaggaggtggccgaggcctacgaggtgctgagcgacaagcacaagagagagatctacgacagatacggcagagagggcctgaccggcaccggcaccggccccagcagagccgaggccggcagcggcggccccggcttcaccttcaccttcagaagccccgaggaggtgttcagagagttcttcggcagcggcgaccccttcgccgagctgttcgacgacctgggccccttcagcgagctgcagaacagaggcagcagacacagcggccccttcttcaccttcagcagcagcttccccggccacagcgacttcagcagcagcagcttcagcttcagccccggcgccggcgccttcagaagcgtgagcaccagcaccaccttcgtgcagggcagaagaatcaccaccagaagaatcatggagaacggccaggagagagtggaggtggaggaggacggccagctgaagagcgtgaccatcaacggcgtgcccgacgacctggccctgggcctggagctgagcagaagagagcagcagcccagcgtgaccagcagaagcggcggcacccaggtgcagcagacccccgccagctgccccctggacagcgacctgagcgaggacgaggacctgcagctggccatggcctacagcctgagcgagatggaggccgccggcaagaagcccgccgacgtgttctag

SEQ ID NO: 79502 - DNA, 687 bp, synthetic construct
  misc_feature 1..687: note = Description of Artificial Sequence: Synthetic coding sequence
  source 1..687: mol_type = other DNA
atggccagctactacgagatcctggacgtgcccagaagcgccagcgccgacgacatcaagaaggcctacagaagaaaggccctgcagtggcaccccgacaagaaccccgacaacaaggagttcgccgagaagaagttcaaggaggtggccgaggcctacgaggtgctgagcgacaagcacaagagagagatctacgacagatacggcagagagggcctgaccggcaccggcaccggccccagcagagccgaggccggcagcggcggccccggcttcaccttcaccttcagaagccccgaggaggtgttcagagagttcttcggcagcggcgaccccttcgccgagctgttcgacgacctgggccccttcagcgagctgcagaacagaggcagcagacacagcggccccttcttcaccttcagcagcagcttccccggccacagcgacttcagcagcagcagcttcagcttcagccccggcgccggcgccttcagaagcgtgagcaccagcaccaccttcgtgcagggcagaagaatcaccaccagaagaatcatggagaacggccaggagagagtggaggtggaggaggacggccagctgaagagcgtgaccatcaacggcgtgcccgacgacctggccctgggcctggagctgagcagaagagagcagcagcccagcgtgacctag

SEQ ID NO: 79503 - DNA, 447 bp, synthetic construct
  misc_feature 1..447: note = Description of Artificial Sequence: Synthetic coding sequence
  source 1..447: mol_type = other DNA
atggccagctactacgagatcctggacgtgcccagaagcgccagcgccgacgacatcaagaaggcctacagaagaaaggccctgcagtggcaccccgacaagaaccccgacaacaaggagttcgccgagaagaagttcaaggaggtggccgaggcctacgaggtgctgagcgacaagcacaagagagagatctacgacagatacggcagagagggcctgaccggcaccggcaccggccccagcagagccgaggccggcagcggcggccccggcttcaccttcaccttcagaagccccgaggaggtgttcagagagttcttcggcagcggcgaccccttcgccgagctgttcgacgacctgggccccttcagcgagctgcagaacagaggcagcagacacagcggccccttcttcaccttcagcagcagcttccccggccacagctag

SEQ ID NO: 79504 - DNA, 369 bp, synthetic construct
  misc_feature 1..369: note = Description of Artificial Sequence: Synthetic coding sequence
  source 1..369: mol_type = other DNA
atggccagctactacgagatcctggacgtgcccagaagcgccagcgccgacgacatcaagaaggcctacagaagaaaggccctgcagtggcaccccgacaagaaccccgacaacaaggagttcgccgagaagaagttcaaggaggtggccgaggcctacgaggtgctgagcgacaagcacaagagagagatctacgacagatacggcagagagggcctgaccggcaccggcaccggccccagcagagccgaggccggcagcggcggccccggcttcaccttcaccttcagaagccccgaggaggtgttcagagagttcttcggcagcggcgaccccttcgccgagctgttcgacgacctgggcccctag

SEQ ID NO: 79505 - DNA, 981 bp, synthetic construct
  misc_feature 1..981: note = Description of Artificial Sequence: Synthetic coding sequence
  source 1..981: mol_type = other DNA
atggtggactactacgaggtgctgggcgtgcagagacacgccagccccgaggacatcaagaaggcctacagaaagctggccctgaagtggcaccccgacaagaaccccgagaacaaggaggaggccgagagaaagttcaagcaggtggccgaggcctacgaggtgctgagcgacgccaagaagagagacatctacgacaagtacggcaaggagggcctgaacggcggcggcggcggcggcagccacttcgacagccccttcgagttcggcttcaccttcagaaaccccgacgacgtgttcagagagttcttcggcggcagagaccccttcagcttcgacttcttcgaggaccccttcgaggacttcttcggcaacagaagaggccccagaggcagcagaagcagaggcaccggcagcttcttcagcgccttcagcggcttccccagcttcggcagcggcttcagcagcttcgacaccggcttcaccagcttcggcagcctgggccacggcggcctgaccagcttcagcagcaccagcttcggcggcagcggcatgggcaacttcaagagcatcagcaccagcaccaagatggtgaacggcagaaagatcaccaccaagagaatcgtggagaacggccaggagagagtggaggtggaggaggacggccagctgaagagcctgaccatcaacggcgtggccgacgacgacgccctggccgaggagagaatgagaagaggccagaacgccctgcccgcccagcccgccggcctgagaccccccaagccccccagacccgccagcctgctgagacacgccccccactgcctgagcgaggaggagggcgagcaggacagacccagagcccccggcccctgggaccccctggccagcgccgccggcctgaaggagggcggcaagagaaagaagcagaagcagagagaggagagcaagaagaagaagagcaccaagggcaaccactag

SEQ ID NO: 79506 - DNA, 378 bp, synthetic construct
  misc_feature 1..378: note = Description of Artificial Sequence: Synthetic coding sequence
  source 1..378: mol_type = other DNA
atggtggactactacgaggtgctgggcgtgcagagacacgccagccccgaggacatcaagaaggcctacagaaagctggccctgaagtggcaccccgacaagaaccccgagaacaaggaggaggccgagagaaagttcaagcaggtggccgaggcctacgaggtgctgagcgacgccaagaagagagacatctacgacaagtacggcaaggagggcctgaacggcggcggcggcggcggcagccacttcgacagccccttcgagttcggcttcaccttcagaaaccccgacgacgtgttcagagagttcttcggcggcagagaccccttcagcttcgacttcttcgaggaccccttcgaggacttcttcggcaactag

SEQ ID NO: 79507 - DNA, 687 bp, synthetic construct
  misc_feature 1..687: note = Description of Artificial Sequence: Synthetic coding sequence
  source 1..687: mol_type = other DNA
atggtggactactacgaggtgctgggcgtgcagagacacgccagccccgaggacatcaagaaggcctacagaaagctggccctgaagtggcaccccgacaagaaccccgagaacaaggaggaggccgagagaaagttcaagcaggtggccgaggcctacgaggtgctgagcgacgccaagaagagagacatctacgacaagtacggcaaggagggcctgaacggcggcggcggcggcggcagccacttcgacagccccttcgagttcggcttcaccttcagaaaccccgacgacgtgttcagagagttcttcggcggcagagaccccttcagcttcgacttcttcgaggaccccttcgaggacttcttcggcaacagaagaggccccagaggcagcagaagcagaggcaccggcagcttcttcagcgccttcagcggcttccccagcttcggcagcggcttcagcagcttcgacaccggcttcaccagcttcggcagcctgggccacggcggcctgaccagcttcagcagcaccagcttcggcggcagcggcatgggcaacttcaagagcatcagcaccagcaccaagatggtgaacggcagaaagatcaccaccaagagaatcgtggagaacggccaggagagagtggaggtggaggaggacggccagctgaagagcctgacctag

SEQ ID NO: 79508 - DNA, 648 bp, synthetic construct
  misc_feature 1..648: note = Description of Artificial Sequence: Synthetic coding sequence
  source 1..648: mol_type = other DNA
atggtggactactacgaggtgctgggcgtgcagagacacgccagccccgaggacatcaagaaggcctacagaaagctggccctgaagtggcaccccgacaagaaccccgagaacaaggaggaggccgagagaaagttcaagcaggtggccgaggcctacgaggtgctgagcgacgccaagaagagagacatctacgacaagtacggcaaggagggcctgaacggcggcggcggcggcggcagccacttcgacagccccttcgagttcggcttcaccttcagaaaccccgacgacgtgttcagagagttcttcggcggcagagaccccttcagcttcgacttcttcgaggaccccttcgaggacttcttcggcaacagaagaggccccagaggcagcagaagcagaggcaccggcagcttcttcagcgccttcagcggcttccccagcttcggcagcggcttcagcagcttcgacaccggcttcaccagcttcggcagcctgggccacggcggcctgaccagcttcagcagcaccagcttcggcggcagcggcatgggcaacttcaagagcatcagcaccagcaccaagtggctgatggccgagaagagcctgcagagagagctgagcagaaccgtgaagaaggagtag

SEQ ID NO: 79509 - DNA, 726 bp, synthetic construct
  misc_feature 1..726: note = Description of Artificial Sequence: Synthetic coding sequence
  source 1..726: mol_type = other DNA
atggtggactactacgaggtgctgggcgtgcagagacacgccagccccgaggacatcaagaaggcctacagaaagctggccctgaagtggcaccccgacaagaaccccgagaacaaggaggaggccgagagaaagttcaagcaggtggccgaggcctacgaggtgctgagcgacgccaagaagagagacatctacgacaagtacggcaaggagggcctgaacggcggcggcggcggcggcagccacttcgacagccccttcgagttcggcttcaccttcagaaaccccgacgacgtgttcagagagttcttcggcggcagagaccccttcagcttcgacttcttcgaggaccccttcgaggacttcttcggcaacagaagaggccccagaggcagcagaagcagaggcaccggcagcttcttcagcgccttcagcggcttccccagcttcggcagcggcttcagcagcttcgacaccggcttcaccagcttcggcagcctgggccacggcggcctgaccagcttcagcagcaccagcttcggcggcagcggcatgggcaacttcaagagcatcagcaccagcaccaagatggtgaacggcagaaagatcaccaccaagagaatcgtggagaacggccaggagagagtggaggtggaggaggacggccagctgaagagcctgaccatcaacggcaaggagcagctgctgagactggacaacaagtag

SEQ ID NO: 79510 - DNA, 201 bp, synthetic construct
  misc_feature 1..201: note = Description of Artificial Sequence: Synthetic coding sequence
  source 1..201: mol_type = other DNA
atggtggactactacgaggtgctgggcgtgcagagacacgccagccccgaggacatcaagaaggcctacagaaagctggccctgaagtggcaccccgacaagaaccccgagaacaaggaggaggccgagagaaagttcaagcaggtggccgaggcctacgaggtgctgagcgacgccaagaagagagacatctacgactag

SEQ ID NO: 79511 - DNA, 138 bp, synthetic construct
  misc_feature 1..138: note = Description of Artificial Sequence: Synthetic coding sequence
  source 1..138: mol_type = other DNA
atggtggactactacgaggtgctgggcgtgcagagacacgccagccccgaggacatcaagaaggcctacagaaagctggccctgaagtggcaccccgacaagaaccccgagaacaaggaggaggccgagagaaagtag

SEQ ID NO: 79512 - DNA, 441 bp, synthetic construct
  misc_feature 1..441: note = Description of Artificial Sequence: Synthetic coding sequence
  source 1..441: mol_type = other DNA
atggtggactactacgaggtgctgggcgtgcagagacacgccagccccgaggacatcaagaaggcctacagaaagctggccctgaagtggcaccccgacaagaaccccgagaacaaggaggaggccgagagaaagttcaagcaggtggccgaggcctacgaggtgctgagcgacgccaagaagagagacatctacgacaagtacggcaaggagggcctgaacggcggcggcggcggcggcagccacttcgacagccccttcgagttcggcttcaccttcagaaaccccgacgacgtgttcagagagttcttcggcggcagagaccccttcagcttcgacttcttcgaggaccccttcgaggacttcttcggcaacagaagaggccccagaggcagcagaagcagaggcaccggcagcttcttcagcgccttcagcggctag

SEQ ID NO: 79513 - DNA, 636 bp, synthetic construct
  misc_feature 1..636: note = Description of Artificial Sequence: Synthetic coding sequence
  source 1..636: mol_type = other DNA
atggtggactactacgaggtgctgggcgtgcagagacacgccagccccgaggacatcaagaaggcctacagaaagctggccctgaagtggcaccccgacaagaaccccgagaacaaggaggaggccgagagaaagttcaagcaggtggccgaggcctacgaggtgctgagcgacgccaagaagagagacatctacgacaagtacggcaaggagggcctgaacggcggcggcggcggcggcagccacttcgacagccccttcgagttcggcttcaccttcagaaaccccgacgacgtgttcagagagttcttcggcggcagagaccccttcagcttcgacttcttcggcgtggccgacgacgacgccctggccgaggagagaatgagaagaggccagaacgccctgcccgcccagcccgccggcctgagaccccccaagccccccagacccgccagcctgctgagacacgccccccactgcctgagcgaggaggagggcgagcaggacagacccagagcccccggcccctgggaccccctggccagcgccgccggcctgaaggagggcggcaagagaaagaagcagaagcagagagaggagagcaagaagaagaagagcaccaagggcaaccactag

SEQ ID NO: 79514 - DNA, 834 bp, synthetic construct
  misc_feature 1..834: note = Description of Artificial Sequence: Synthetic coding sequence
  source 1..834: mol_type = other DNA
atgccccaccccagaatcctgaagagacccaagaagagagacatctacgacaagtacggcaaggagggcctgaacggcggcggcggcggcggcagccacttcgacagccccttcgagttcggcttcaccttcagaaaccccgacgacgtgttcagagagttcttcggcggcagagaccccttcagcttcgacttcttcgaggaccccttcgaggacttcttcggcaacagaagaggccccagaggcagcagaagcagaggcaccggcagcttcttcagcgccttcagcggcttccccagcttcggcagcggcttcagcagcttcgacaccggcttcaccagcttcggcagcctgggccacggcggcctgaccagcttcagcagcaccagcttcggcggcagcggcatgggcaacttcaagagcatcagcaccagcaccaagatggtgaacggcagaaagatcaccaccaagagaatcgtggagaacggccaggagagagtggaggtggaggaggacggccagctgaagagcctgaccatcaacggcgtggccgacgacgacgccctggccgaggagagaatgagaagaggccagaacgccctgcccgcccagcccgccggcctgagaccccccaagccccccagacccgccagcctgctgagacacgccccccactgcctgagcgaggaggagggcgagcaggacagacccagagcccccggcccctgggaccccctggccagcgccgccggcctgaaggagggcggcaagagaaagaagcagaagcagagagaggagagcaagaagaagaagagcaccaagggcaaccactag

SEQ ID NO: 79515 - DNA, 297 bp, synthetic construct
  misc_feature 1..297: note = Description of Artificial Sequence: Synthetic coding sequence
  source 1..297: mol_type = other DNA
atggtggactactacgaggtgctgggcgtgcagagacacgccagccccgaggacatcaagaaggcctacagaaagctggccctgaagtggcaccccgacaagaaccccgagaacaaggaggaggccgagagaaagttcaagcaggtggccgaggcctacgaggtgctgagcgacgccaagaagagagacatctacgacaagtacggcaaggagggcctgaacggcggcggcggcggcggcagccacttcgacagccccttcgagttcggcttcaccttcagaaaccccgacgactag

SEQ ID NO: 79516 - DNA, 672 bp, synthetic construct
  misc_feature 1..672: note = Description of Artificial Sequence: Synthetic coding sequence
  source 1..672: mol_type = other DNA
atggccaccccccagagcatcttcatcttcgccatctgcatcctgatgatcaccgagctgatcctggccagcaagagctactacgacatcctgggcgtgcccaagagcgccagcgagagacagatcaagaaggccttccacaagctggccatgaagtaccaccccgacaagaacaagagccccgacgccgaggccaagttcagagagatcgccgaggcctacgagaccctgagcgacgccaacagaagaaaggagtacgacaccctgggccacagcgccttcaccagcggcaagggccagagaggcagcggcagcagcttcgagcagagcttcaacttcaacttcgacgacctgttcaaggacttcggcttcttcggccagaaccagaacaccggcagcaagaagagattcgagaaccacttccagaccagacaggacggcggcagcagcagacagagacaccacttccaggagttcagcttcggcggcggcctgttcgacgacatgttcgaggacatggagaagatgttcagcttcagcggcttcgacagcaccaaccagcacaccgtgcagaccgagaacagattccacggcagcagcaagcactgcagaaccgtgacccagagaagaggcaacatggtgaccacctacaccgactgcagcggccagtag

SEQ ID NO: 79517 - DNA, 2382 bp, synthetic construct
  misc_feature 1..2382: note = Description of Artificial Sequence: Synthetic coding sequence
  source 1..2382: mol_type = other DNA
atgggcgtgtggctgaacaaggacgactacatcagagacctgaagagaatcatcctgtgcttcctgatcgtgtacatggccatcctggtgggcaccgaccaggacttctacagcctgctgggcgtgagcaagaccgccagcagcagagagatcagacaggccttcaagaagctggccctgaagctgcaccccgacaagaaccccaacaaccccaacgcccacggcgacttcctgaagatcaacagagcctacgaggtgctgaaggacgaggacctgagaaagaagtacgacaagtacggcgagaagggcctggaggacaaccagggcggccagtacgagagctggaactactacagatacgacttcggcatctacgacgacgaccccgagatcatcaccctggagagaagagagttcgacgccgccgtgaacagcggcgagctgtggttcgtgaacttctacagccccggctgcagccactgccacgacctggcccccacctggagagacttcgccaaggaggtggacggcctgctgagaatcggcgccgtgaactgcggcgacgacagaatgctgtgcagaatgaagggcgtgaacagctaccccagcctgttcatcttcagaagcggcatggcccccgtgaagtaccacggcgacagaagcaaggagagcctggtgagcttcgccatgcagcacgtgagaagcaccgtgaccgagctgtggaccggcaacttcgtgaacagcatccagaccgccttcgccgccggcatcggctggctgatcaccttctgcagcaagggcggcgactgcctgaccagccagaccagactgagactgagcggcatgctggacggcctggtgaacgtgggctggatggactgcgccacccaggacaacctgtgcaagagcctggacatcaccaccagcaccaccgcctacttcccccccggcgccaccctgaacaacaaggagaagaacagcatcctgttcctgaacagcctggacgccaaggagatctacctggaggtgatccacaacctgcccgacttcgagctgctgagcgccaacaccctggaggacagactggcccaccacagatggctgctgttcttccacttcggcaagaacgagaacagcaacgaccccgagctgaagaagctgaagaccctgctgaagaacgaccacatccaggtgggcagattcgactgcagcagcgcccccgacatctgcagcaacctgtacgtgttccagcccagcctggccgtgttcaagggccagggcaccaaggagtacgagatccaccacggcaagaagatcctgtacgacatcctggccttcgccaaggagagcgtgaacagccacgtgaccaccctgggcccccagaacttccccgccaacgacaaggagccctggctggtggacttcttcgccccctggtgccccccctgcagagccctgctgcccgagctgagaagagccagcaacctgctgtacggccagctgaagttcggcaccctggactgcaccgtgcacgagggcctgtgcaacatgtacaacatccaggcctaccccaccaccgtggtgttcaaccagagcaacatccacgagtacgagggccaccacagcgccgagcagatcctggagttcatcgaggacctgatgaaccccagcgtggtgagcctgacccccaccaccttcaacgagctggtgacccagagaaagcacaacgaggtgtggatggtggacttctacagcccctggtgccacccctgccaggtgctgatgcccgagtggaagagaatggccagaaccctgaccggcctgatcaacgtgggcagcatcgactgccagcagtaccacagcttctgcgcccaggagaacgtgcagagataccccgagatcagattcttcccccccaagagcaacaaggcctaccactaccacagctacaacggctggaacagagacgcctacagcctgagaatctggggcctgggcttcctgccccaggtgagcaccgacctgaccccccagaccttcagcgagaaggtgctgcagggcaagaaccactgggtgatcgacttctacgccccctggtgcggcccctgccagaacttcgcccccgagttcgagctgctggccagaatgatcaagggcaaggtgaaggccggcaaggtggactgccaggcctacgcccagacctgccagaaggccggcatcagagcctaccccaccgtgaagttctacttctacgagagagccaagagaaacttccaggaggagcagatcaacaccagagacgccaaggccatcgccgccctgatcagcgagaagctggagaccctgagaaaccagggcaagagaaacaaggacgagctgtag

SEQ ID NO: 79518 - DNA, 2244 bp, synthetic construct
  misc_feature 1..2244: note = Description of Artificial Sequence: Synthetic coding sequence
  source 1..2244: mol_type = other DNA
atgggcgtgtggctgaacaaggacgactacatcagagacctgaagagaatcatcctgtgcttcctgatcgtgtacatggccatcctggtgggcaccgaccaggacttctacagcctgctgggcgtgagcaagaccgccagcagcagagagatcagacaggccttcaagaagctggccctgaagctgcaccccgacaagaaccccaacaaccccaacgcccacggcgacttcctgaagatcaacagagcctacgaggtgctgaaggacgaggacctgagaaagaagtacgacaagtacggcgagaagggcctggaggacaaccagggcggccagtacgagagctggaactactacagatacgacttcggcatctacgacgacgaccccgagatcatcaccctggagagaagagagttcgacgccgccgtgaacagcggcgagctgtggttcgtgaacttctacagccccggctgcagccactgccacgacctggcccccacctggagagacttcgccaaggaggtggacggcctgctgagaatcggcgccgtgaactgcggcgacgacagaatgctgtgcagaatgaagggcgtgaacagctaccccagcctgttcatcttcagaagcggcatggcccccgtgaagtaccacggcgacagaagcaaggagagcctggtgagcttcgccatgcagcacgtgagaagcaccgtgaccgagctgtggaccggcaacttcgtgaacagcatccagaccgccttcgccgccggcatcggctggctgatcaccttctgcagcaagggcggcgactgcctgaccagccagaccagactgagactgagcggcatgctgttcctgaacagcctggacgccaaggagatctacctggaggtgatccacaacctgcccgacttcgagctgctgagcgccaacaccctggaggacagactggcccaccacagatggctgctgttcttccacttcggcaagaacgagaacagcaacgaccccgagctgaagaagctgaagaccctgctgaagaacgaccacatccaggtgggcagattcgactgcagcagcgcccccgacatctgcagcaacctgtacgtgttccagcccagcctggccgtgttcaagggccagggcaccaaggagtacgagatccaccacggcaagaagatcctgtacgacatcctggccttcgccaaggagagcgtgaacagccacgtgaccaccctgggcccccagaacttccccgccaacgacaaggagccctggctggtggacttcttcgccccctggtgccccccctgcagagccctgctgcccgagctgagaagagccagcaacctgctgtacggccagctgaagttcggcaccctggactgcaccgtgcacgagggcctgtgcaacatgtacaacatccaggcctaccccaccaccgtggtgttcaaccagagcaacatccacgagtacgagggccaccacagcgccgagcagatcctggagttcatcgaggacctgatgaaccccagcgtggtgagcctgacccccaccaccttcaacgagctggtgacccagagaaagcacaacgaggtgtggatggtggacttctacagcccctggtgccacccctgccaggtgctgatgcccgagtggaagagaatggccagaaccctgaccggcctgatcaacgtgggcagcatcgactgccagcagtaccacagcttctgcgcccaggagaacgtgcagagataccccgagatcagattcttcccccccaagagcaacaaggcctaccactaccacagctacaacggctggaacagagacgcctacagcctgagaatctggggcctgggcttcctgccccaggtgagcaccgacctgaccccccagaccttcagcgagaaggtgctgcagggcaagaaccactgggtgatcgacttctacgccccctggtgcggcccctgccagaacttcgcccccgagttcgagctgctggccagaatgatcaagggcaaggtgaaggccggcaaggtggactgccaggcctacgcccagacctgccagaaggccggcatcagagcctaccccaccgtgaagttctacttctacgagagagccaagagaaacttccaggaggagcagatcaacaccagagacgccaaggccatcgccgccctgatcagcgagaagctggagaccctgagaaaccagggcaagagaaacaaggaccacctgtag

SEQ ID NO: 79519 - DNA, 534 bp, synthetic construct
  misc_feature 1..534: note = Description of Artificial Sequence: Synthetic coding sequence
  source 1..534: mol_type = other DNA
atgggcgtgtggctgaacaaggacgactacatcagagacctgaagagaatcatcctgtgcttcctgatcgtgtacatggccatcctggtgggcaccgaccaggacttctacagcctgctgggcgtgagcaagaccgccagcagcagagagatcagacaggccttcaagaagctggccctgaagctgcaccccgacaagaaccccaacaaccccaacgcccacggcgacttcctgaagatcaacagagcctacgaggtgctgaaggacgaggacctgagaaagaagtacgacaagtacggcgagaagggcctggaggacaaccagggcggccagtacgagagctggaactactacagatacgacttcggcatctacgacgacgaccccgagatcatcaccctggagagaagagagttcgacgccgccgtgaacagcggcgagctgtggttcgtgaacttctacagccccggctgcagccactgccacgacctggcccccacctggagagacttcgccaaggagagcctgagatag

SEQ ID NO: 79520 - DNA, 999 bp, synthetic construct
  misc_feature 1..999: note = Description of Artificial Sequence: Synthetic coding sequence
  source 1..999: mol_type = other DNA
atgggcgtgtggctgaacaaggacgactacatcagagacctgaagagaatcatcctgtgcttcctgatcgtgtacatggccatcctggtgggcaccgaccaggacttctacagcctgctgggcgtgagcaagaccgccagcagcagagagatcagacaggccttcaagaagctggccctgaagctgcaccccgacaagaaccccaacaaccccaacgcccacggcgacttcctgaagatcaacagagcctacgaggtgctgaaggacgaggacctgagaaagaagtacgacaagtacggcgagaagggcctggaggacaaccagggcggccagtacgagagctggaactactacagatacgacttcggcatctacgacgacgaccccgagatcatcaccctggagagaagagagttcgacgccgccgtgaacagcggcgagctgtggttcgtgaacttctacagccccggctgcagccactgccacgacctggcccccacctggagagacttcgccaaggaggtggacggcctgctgagaatcggcgccgtgaactgcggcgacgacagaatgctgtgcagaatgaagggcgtgaacagctaccccagcctgttcatcttcagaagcggcatggcccccgtgaagtaccacggcgacagaagcaaggagagcctggtgagcttcgccatgcagcacgtgagaagcaccgtgaccgagctgtggaccggcaacttcgtgaacagcatccagaccgccttcgccgccggcatcggctggctgatcaccttctgcagcaagggcggcgactgcctgaccagccagaccagactgagactgagcggcatgctggacggcctggtgaacgtgggctggatggactgcgccacccaggacaacctgtgcaagagcctggacatcaccaccagcaccaccgcctacttcccccccggcgccaccctgaacaacaaggagaagaacagcatcctgctgctgcactag

SEQ ID NO: 79521 - DNA, 6732 bp, synthetic construct
  misc_feature 1..6732: note = Description of Artificial Sequence: Synthetic coding sequence
  source 1..6732: mol_type = other DNA
atgaacatcatcagagagaacaaggacctggcctgcttctacaccaccaagcacagctggagaggcaagtacaagagagtgttcagcgtgggcacccacgccatcaccacctacaaccccaacaccctggaggtgaccaaccagtggccctacggcgacatctgcagcatcagccccgtgggcaagggccagggcaccgagttcaacctgaccttcagaaagggcagcggcaagaagagcgagaccctgaagttcagcaccgagcacagaaccgagctgctgaccgaggccctgagattcagaaccgacttcagcgagggcaagatcaccggcagaagatacaactgctacaagcaccactggagcgacagcagaaagcccgtgatcctggaggtgacccccggcggcttcgaccagatcaaccccgccaccaacagagtgctgtgcagctacgactacagaaacatcgagggcttcgtggacctgagcgactaccagggcggcttctgcatcctgtacggcggcttcagcagactgcacctgttcgccagcgagcagagagaggagatcatcaagagcgccatcgaccacgccggcaactacatcggcatcagcctgagaatcagaaaggagcccctggagttcgagcagtacctgaacctgagattcggcaagtacagcaccgacgagagcatcaccagcctggccgagttcgtggtgcagaagatcagccccagacacagcgagcccgtgaagagagtgctggccctgaccgagacctgcctggtggagagagaccccgccacctacaacatcgccaccctgaagcccctgggcgaggtgttcgccctggtgtgcgacagcgagaacccccagctgttcaccatcgagttcatcaagggccaggtgagaaagtacagcagcaccgagagagacagcctgctggccagcctgctggacggcgtgagagccagcggcaacagagacgtgtgcgtgaagatgacccccacccacaagggccagagatggggcctgctgagcatgcccgtggacgaggaggtggagagcctgcacctgagattcctggccaccccccccaacggcaacttcgccgacgccgtgttcagattcaacgccaacatcagctacagcggcgtgctgcacgccgtgacccaggacggcctgttcagcgagaacaaggagaagctgatcaacaacgccatcaccgccctgctgagccaggagggcgacgtggtggccagcaacgccgagctggagagccagttccaggccgtgagaagactggtggccagcaaggccggcttcctggccttcacccagctgcccaagttcagagagagactgggcgtgaaggtggtgaaggccctgaagagaagcaacaacggcatcatccacgccgccgtggacatgctgtgcgccctgatgtgccccatgcacgacgactacgacctgagacaggagcagctgaacaaggccagcctgctgagcagcaagaagttcctggagaacctgctggagaagttcaacagccacgtggaccacggcaccggcgccctggtgatcagcagcctgctggacttcctgaccttcgccctgtgcgccccctacagcgagaccaccgagggccagcagttcgacatgctgctggagatggtggccagcaacggcagaaccctgttcaagctgttccagcaccccagcatggccatcatcaagggcgccggcctggtgatgaaggccatcatcgaggagggcgacaaggagatcgccaccaagatgcaggagctggccctgagcgagggcgccctgcccagacacctgcacaccgccatgttcaccatcagcagcgaccagagaatgctgaccaacagacagctgagcagacacctggtgggcctgtggaccgccgacaacgccaccgccaccaacctgctgaagagaatcctgccccccggcctgctggcctacctggagagcagcgacctggtgcccgagaaggacgccgacagaatgcacgtgagagacaacgtgaagatcgccatggaccagtacggcaagttcaacaaggtgcccgagtggcagagactggccggcaaggccgccaaggaggtggagaagttcgccaaggagaaggtggacctggtgctgatgcactggagagacagaatgggcatcgcccagaaggagaacatcaaccagaagcccgtggtgctgagaaagagaagacagagaatcaagatcgaggccaactgggacctgttctactacagattcggccaggaccacgccagaagcaacctgatctggaacttcaagaccagagaggagctgaaggacaccctggagagcgagatgagagccttcaacatcgacagagagctgggcagcgccaacgtgatcagctggaaccaccacgagttcgaggtgaagtacgagtgcctggccgaggagatcaagatcggcgactactacctgagactgctgctggaggaggacgagaacgaggagagcggcagcatcaagagaagctacgagttcttcaacgagctgtaccacagattcctgctgacccccaaggtgaacatgaagtgcctgtgcctgcaggccctggccatcgtgtacggcagatgccacgaggagatcggccccttcaccgacaccagatacatcatcggcatgctggagagatgcaccgacaagctggagagagacagactgatcctgttcctgaacaagctgatcctgaacaagaagaacgtgaaggacctgatggacagcaacggcatcagaatcctggtggacctgctgaccctggcccacctgcacgtgagcagagccaccgtgcccctgcagagcaacgtgatcgaggccgcccccgacatgaagagagagagcgagaaggagtggtacttcggcaacgccgacaaggagagaagcggcccctacggcttccacgagatgcaggagctgtggaccaagggcatgctgaacgccaagaccagatgctgggcccagggcatggacggctggagacccctgcagagcatcccccagctgaagtggtgcctgctggccagcggccaggccgtgctgaacgagaccgacctggccaccctgatcctgaacatgctgatcaccatgtgcggctacttccccagcagagaccaggacaacgccatcatcagacccctgcccaaggtgaagagactgctgagcgacagcacctgcctgccccacatcatccagctgctgctgaccttcgaccccatcctggtggagaaggtggccatcctgctgtaccacatcatgcaggacaacccccagctgcccagactgtacctgagcggcgtgttcttcttcatcatgatgtacaccggcagcaacgtgctgcccgtggccagattcctgaagtacacccacaccaagcaggccttcaagagcgaggagaccaagggccaggacatcttccagagaagcatcctgggccacatcctgcccgaggccatggtgtgctacctggagaactacgagcccgagaagttcagcgagatcttcctgggcgagttcgacacccccgaggccatctggagcagcgagatgagaagactgatgatcgagaagatcgccgcccacctggccgacttcacccccagactgcagagcaacaccagagccctgtaccagtactgccccatccccatcatcaactacccccagctggagaacgagctgttctgcaacatctactacctgaagcagctgtgcgacaccctgagattccccgactggcccatcaaggaccccgtgaagctgctgaaggacaccctggacgcctggaagaaggaggtggagaagaagccccccatgatgagcatcgacgacgcctacgaggtgctgaacctgccccagggccagggcccccacgacgagagcaagatcagaaaggcctacttcagactggcccagaagtaccaccccgacaagaaccccgagggcagagacatgttcgagaaggtgaacaaggcctacgagttcctgtgcaccaagagcgccaagatcgtggacggccccgaccccgagaacatcatcctgatcctgaagacccagagcatcctgttcaacagacacaaggaggacctgcagccctacaagtacgccggctaccccatgctgatcagaaccatcaccatggagaccagcgacgacctgctgttcagcaaggagagccccctgctgcccgccgccaccgagctggccttccacaccgtgaactgcagcgccctgaacgccgaggagctgagaagagagaacggcctggaggtgctgcaggaggccttcagcagatgcgtggccgtgctgaccagagccagcaagcccagcgacatgagcgtgcaggtgtgcggctacatcagcaagtgctacagcgtggccgcccagttcgaggagtgcagagagaagatcaccgagatgcccagcatcatcaaggacctgtgcagagtgctgtacttcggcaagagcatccccagagtggccgccctgggcgtggagtgcgtgagcagcttcgccgtggacttctggctgcagacccacctgttccaggccggcatcctgtggtacctgctgggcttcctgttcaactacgactacaccctggaggagagcggcatccagaagagcgaggagaccaaccagcaggaggtggccaacagcctggccaagctgagcgtgcacgccctgagcagactgggcggctacctggccgaggagcaggccacccccgagaaccccaccatcagaaagagcctggccggcatgctgaccccctacgtggccagaaagctggccgtggccagcgtgaccgagatcctgaagatgctgaacagcaacaccgagagcccctacctgatctggaacaacagcaccagagccgagctgctggagttcctggagagccagcaggagaacatgatcaagaagggcgactgcgacaagacctacggcagcgagttcgtgtacagcgaccacgccaaggagctgatcgtgggcgagatcttcgtgagagtgtacaacgaggtgcccaccttccagctggaggtgcccaaggccttcgccgccagcctgctggactacatcggcagccaggcccagtacctgcacaccttcatggccatcacccacgccgccaaggtggagagcgagcagcacggcgacagactgcccagagtggagatggccctggaggccctgagaaacgtgatcaagtacaaccccggcagcgagagcgagtgcatcggccacttcaagctgatcttcagcctgctgagagtgcacggcgccggccaggtgcagcagctggccctggaggtggtgaacatcgtgaccagcaaccaggactgcgtgaacaacatcgccgagagcatggtgctgagcagcctgctggccctgctgcacagcctgcccagcagcagacagctggtgctggagaccctgtacgccctgaccagcagcaccaagatcatcaaggaggccatggccaagggcgccctgatctacctgctggacatgttctgcaacagcacccacccccaggtgagagcccagaccgccgagctgttcgccaagatgaccgccgacaagctgatcggccccaaggtgagaatcaccctgatgaagttcctgcccagcgtgttcatggacgccatgagagacaaccccgaggccgccgtgcacatcttcgagggcacccacgagaaccccgagctgatctggaacgacaacagcagagacaaggtgagcaccaccgtgagagagatgatgctggagcacttcaagaaccagcaggacaaccccgaggccaactggaagctgcccgaggacttcgccgtggtgttcggcgaggccgagggcgagctggccgtgggcggcgtgttcctgagaatcttcatcgcccagcccgcctgggtgctgagaaagcccagagagttcctgatcgccctgctggagaagctgaccgagctgctggagaagaacaacccccacggcgagaccctggagaccctgaccatggccaccgtgtgcctgttcagcgcccagccccagctggccgaccaggtgccccccctgggccacctgcccaaggtgatccaggccatgaaccacagaaacaacgccatccccaagagcgccatcagagtgatccacgccctgagcgagaacgagctgtgcgtgagagccatggccagcctggagaccatcggccccctgatgaacggcatgaagaagagagccgacaccgtgggcctggcctgcgaggccatcaacagaatgttccagaaggagcagagcgagctggtggcccaggccctgaaggccgacctggtgccctacctgctgaagctgctggagggcatcggcctggagaacctggacagccccgccgccaccaaggcccagatcgtgaaggccctgaaggccatgaccagaagcctgcagtacggcgagcaggtgaacgagatcctgtgcagaagcagcgtgtggagcgccttcaaggaccagaagcacgacctgttcatcagcgagagccagaccgccggctacctgaccggccccggcgtggccggctacctgaccgccggcaccagcaccagcgtgatgagcaacctgcccccccccgtggaccacgaggccggcgacctgggctaccagacctag

SEQ ID NO: 79522 - DNA, 2673 bp, synthetic construct
  misc_feature 1..2673: note = Description of Artificial Sequence: Synthetic coding sequence
  source 1..2673: mol_type = other DNA
atgtaccagatcagcaagaacagcggctgggccagaagcagagagtacaacttcaacctgaagacccagagcatcctgttcaacagacacaaggaggacctgcagccctacaagtacgccggctaccccatgctgatcagaaccatcaccatggagaccagcgacgacctgctgttcagcaaggagagccccctgctgcccgccgccaccgagctggccttccacaccgtgaactgcagcgccctgaacgccgaggagctgagaagagagaacggcctggaggtgctgcaggaggccttcagcagatgcgtggccgtgctgaccagagccagcaagcccagcgacatgagcgtgcaggtgtgcggctacatcagcaagtgctacagcgtggccgcccagttcgaggagtgcagagagaagatcaccgagatgcccagcatcatcaaggacctgtgcagagtgctgtacttcggcaagagcatccccagagtggccgccctgggcgtggagtgcgtgagcagcttcgccgtggacttctggctgcagacccacctgttccaggccggcatcctgtggtacctgctgggcttcctgttcaactacgactacaccctggaggagagcggcatccagaagagcgaggagaccaaccagcaggaggtggccaacagcctggccaagctgagcgtgcacgccctgagcagactgggcggctacctggccgaggagcaggccacccccgagaaccccaccatcagaaagagcctggccggcatgctgaccccctacgtggccagaaagctggccgtggccagcgtgaccgagatcctgaagatgctgaacagcaacaccgagagcccctacctgatctggaacaacagcaccagagccgagctgctggagttcctggagagccagcaggagaacatgatcaagaagggcgactgcgacaagacctacggcagcgagttcgtgtacagcgaccacgccaaggagctgatcgtgggcgagatcttcgtgagagtgtacaacgaggtgcccaccttccagctggaggtgcccaaggccttcgccgccagcctgctggactacatcggcagccaggcccagtacctgcacaccttcatggccatcacccacgccgccaaggtggagagcgagcagcacggcgacagactgcccagagtggagatggccctggaggccctgagaaacgtgatcaagtacaaccccggcagcgagagcgagtgcatcggccacttcaagctgatcttcagcctgctgagagtgcacggcgccggccaggtgcagcagctggccctggaggtggtgaacatcgtgaccagcaaccaggactgcgtgaacaacatcgccgagagcatggtgctgagcagcctgctggccctgctgcacagcctgcccagcagcagacagctggtgctggagaccctgtacgccctgaccagcagcaccaagatcatcaaggaggccatggccaagggcgccctgatctacctgctggacatgttctgcaacagcacccacccccaggtgagagcccagaccgccgagctgttcgccaagatgaccgccgacaagctgatcggccccaaggtgagaatcaccctgatgaagttcctgcccagcgtgttcatggacgccatgagagacaaccccgaggccgccgtgcacatcttcgagggcacccacgagaaccccgagctgatctggaacgacaacagcagagacaaggtgagcaccaccgtgagagagatgatgctggagcacttcaagaaccagcaggacaaccccgaggccaactggaagctgcccgaggacttcgccgtggtgttcggcgaggccgagggcgagctggccgtgggcggcgtgttcctgagaatcttcatcgcccagcccgcctgggtgctgagaaagcccagagagttcctgatcgccctgctggagaagctgaccgagctgctggagaagaacaacccccacggcgagaccctggagaccctgaccatggccaccgtgtgcctgttcagcgcccagccccagctggccgaccaggtgccccccctgggccacctgcccaaggtgatccaggccatgaaccacagaaacaacgccatccccaagagcgccatcagagtgatccacgccctgagcgagaacgagctgtgcgtgagagccatggccagcctggagaccatcggccccctgatgaacggcatgaagaagagagccgacaccgtgggcctggcctgcgaggccatcaacagaatgttccagaaggagcagagcgagctggtggcccaggccctgaaggccgacctggtgccctacctgctgaagctgctggagggcatcggcctggagaacctggacagccccgccgccaccaaggcccagatcgtgaaggccctgaaggccatgaccagaagcctgcagtacggcgagcaggtgaacgagatcctgtgcagaagcagcgtgtggagcgccttcaaggaccagaagcacgacctgttcatcagcgagagccagaccgccggctacctgaccggccccggcgtggccggctacctgaccgccggcaccagcaccagcgtgatgagcaacctgcccccccccgtggaccacgaggccggcgacctgggctaccagacctag

SEQ ID NO: 79523 - DNA, 351 bp, synthetic construct
  misc_feature 1..351: note = Description of Artificial Sequence: Synthetic coding sequence
  source 1..351: mol_type = other DNA
atggccagcaccgtggtggccgtgggcctgaccatcgccgccgccggcttcgccggcagatacgtgctgcaggccatgaagcacatggagccccaggtgaagcaggtgttccagagcctgcccaagagcgccttcagcggcggctactacagaggcggcttcgagcccaagatgaccaagagagaggccgccctgatcctgggcgtgagccccaccgccaacaagggcaagatcagagacgcccacagaagaatcatgctgctgaaccaccccgacaagggcggcagcccctacatcgccgccaagatcaacgaggccaaggacctgctggagggccaggccaagaagtag

SEQ ID NO: 79524 - DNA, 1707 bp, synthetic construct
  misc_feature 1..1707: note = Description of Artificial Sequence: Synthetic coding sequence
  source 1..1707: mol_type = other DNA
atgctgctgctgcccagcgccgccgacggcagaggcaccgccatcacccacgccctgaccagcgccagcaccctgtgccaggtggagcccgtgggcagatggttcgaggccttcgtgaagagaagaaacagaaacgccagcgccagcttccaggagctggaggacaagaaggagctgagcgaggagagcgaggacgaggagctgcagctggaggagttccccatgctgaagaccctggaccccaaggactggaagaaccaggaccactacgccgtgctgggcctgggccacgtgagatacaaggccacccagagacagatcaaggccgcccacaaggccatggtgctgaagcaccaccccgacaagagaaaggccgccggcgagcccatcaaggagggcgacaacgactacttcacctgcatcaccaaggcctacgagatgctgagcgaccccgtgaagagaagagccttcaacagcgtggaccccaccttcgacaacagcgtgcccagcaagagcgaggccaaggacaacttcttcgaggtgttcacccccgtgttcgagagaaacagcagatggagcaacaagaagaacgtgcccaagctgggcgacatgaacagcagcttcgaggacgtggacatcttctacagcttctggtacaacttcgacagctggagagagttcagctacctggacgaggaggagaaggagaaggccgagtgcagagacgagagaagatggatcgagaagcagaacagagccaccagagcccagagaaagaaggaggagatgaacagaatcagaaccctggtggacaacgcctacagctgcgaccccagaatcaagaagttcaaggaggaggagaaggccaagaaggaggccgagaagaaggccaaggccgaggccaagagaaaggagcaggaggccaaggagaagcagagacaggccgagctggaggccgccagactggccaaggagaaggaggaggaggaggtgagacagcaggccctgctggccaagaaggagaaggacatccagaagaaggccatcaagaaggagagacagaagctgagaaacagctgcaagatcgaggagatcaacgagcagatcagaaaggagaaggaggaggccgaggccagaatgagacaggccagcaagaacaccgagaagagcaccggcggcggcggcaacggcagcaagaactggagcgaggacgacctgcagctgctgatcaaggccgtgaacctgttccccgccggcaccaacagcagatgggaggtgatcgccaactacatgaacatccacagcagcagcggcgtgaagagaaccgccaaggacgtgatcggcaaggccaagagcctgcagaagctggacccccaccagaaggacgacatcaacaagaaggccttcgacaagttcaagaaggagcacggcgtggtgccccaggccgacaacgccacccccagcgagagattcgagggcccctacaccgacttcaccccctggaccaccgaggagcagaagctgctggagcaggccctgaagacctaccccgtgaacacccccgagagatgggagaagatcgccgaggccgtgcccggcagaaccaagaaggactgcatgaagagatacaaggagctggtggagatggtgaaggccaagaaggccgcccaggagcaggtgctgaacgccagcagagccaagaagtag

SEQ ID NO: 79525 - DNA, 1866 bp, synthetic construct
  misc_feature 1..1866: note = Description of Artificial Sequence: Synthetic coding sequence
  source 1..1866: mol_type = other DNA
atgctgctgctgcccagcgccgccgacggcagaggcaccgccatcacccacgccctgaccagcgccagcaccctgtgccaggtggagcccgtgggcagatggttcgaggccttcgtgaagagaagaaacagaaacgccagcgccagcttccaggagctggaggacaagaaggagctgagcgaggagagcgaggacgaggagctgcagctggaggagttccccatgctgaagaccctggaccccaaggactggaagaaccaggaccactacgccgtgctgggcctgggccacgtgagatacaaggccacccagagacagatcaaggccgcccacaaggccatggtgctgaagcaccaccccgacaagagaaaggccgccggcgagcccatcaaggagggcgacaacgactacttcacctgcatcaccaaggcctacgagatgctgagcgaccccgtgaagagaagagccttcaacagcgtggaccccaccttcgacaacagcgtgcccagcaagagcgaggccaaggacaacttcttcgaggtgttcacccccgtgttcgagagaaacagcagatggagcaacaagaagaacgtgcccaagctgggcgacatgaacagcagcttcgaggacgtggacatcttctacagcttctggtacaacttcgacagctggagagagttcagctacctggacgaggaggagaaggagaaggccgagtgcagagacgagagaagatggatcgagaagcagaacagagccaccagagcccagagaaagaaggaggagatgaacagaatcagaaccctggtggacaacgcctacagctgcgaccccagaatcaagaagttcaaggaggaggagaaggccaagaaggaggccgagaagaaggccaaggccgaggccaagagaaaggagcaggaggccaaggagaagcagagacaggccgagctggaggccgccagactggccaaggagaaggaggaggaggaggtgagacagcaggccctgctggccaagaaggagaaggacatccagaagaaggccatcaagaaggagagacagaagctgagaaacagctgcaagacctggaaccacttcagcgacaacgaggccgagagagtgaagatgatggaggaggtggagaagctgtgcgacagactggagctggccagcctgcagtgcctgaacgagaccctgaccagctgcaccaaggaggtgggcaaggccgccctggagaagcagatcgaggagatcaacgagcagatcagaaaggagaaggaggaggccgaggccagaatgagacaggccagcaagaacaccgagaagagcaccggcggcggcggcaacggcagcaagaactggagcgaggacgacctgcagctgctgatcaaggccgtgaacctgttccccgccggcaccaacagcagatgggaggtgatcgccaactacatgaacatccacagcagcagcggcgtgaagagaaccgccaaggacgtgatcggcaaggccaagagcctgcagaagctggacccccaccagaaggacgacatcaacaagaaggccttcgacaagttcaagaaggagcacggcgtggtgccccaggccgacaacgccacccccagcgagagattcgagggcccctacaccgacttcaccccctggaccaccgaggagcagaagctgctggagcaggccctgaagacctaccccgtgaacacccccgagagatgggagaagatcgccgaggccgtgcccggcagaaccaagaaggactgcatgaagagatacaaggagctggtggagatggtgaaggccaagaaggccgcccaggagcaggtgctgaacgccagcagagccaagaagtag

SEQ ID NO: 79526 - DNA, 609 bp, synthetic construct
  misc_feature 1..609: note = Description of Artificial Sequence: Synthetic coding sequence
  source 1..609: mol_type = other DNA
atgctgctgctgcccagcgccgccgacggcagaggcaccgccatcacccacgccctgaccagcgccagcaccctgtgccaggtggagcccgtgggcagatggttcgaggccttcgtgaagagaagaaacagaaacgccagcgccagcttccaggagctggaggacaagaaggagctgagcgaggagagcgaggacgaggagctgcagctggaggagttccccatgctgaagaccctggaccccaaggactggaagaaccaggaccactacgccgtgctgggcctgggccacgtgagatacaaggccacccagagacagatcaaggccgcccacaaggccatggtgctgaagcaccaccccgacaagagaaaggccgccggcgagcccatcaaggagggcgacaacgactacttcacctgcatcaccaaggcctacgagatgctgagcgaccccgtgaagagaagagccttcaacagcgtggaccccaccttcgacaacagcgtgcccagcaagagcgaggccaaggacaacttcttcgaggtgttcacccccgtgttcgagagaaacagcagagtgagcatcagcaagaagaagaagaagaagagatag

SEQ ID NO: 79527 - DNA, 822 bp, synthetic construct
  misc_feature 1..822: note = Description of Artificial Sequence: Synthetic coding sequence
  source 1..822: mol_type = other DNA
atggaggccaacatgcccaagagaaaggagcccggcagaagcctgagaatcaaggtgatcagcatgggcaacgccgaggtgggcaagagctgcatcatcaagagatactgcgagaagagattcgtgagcaagtacctggccaccatcggcatcgactacggcgtgaccaaggtgcacgtgagagacagagagatcaaggtgaacatcttcgacatggccggccaccccttcttctacgaggtgagaaacgagttctacaaggacacccagggcgtgatcctggtgtacgacgtgggccagaaggacagcttcgacgccctggacgcctggctggccgagatgaagcaggagctgggcccccacggcaacatggagaacatcatcttcgtggtgtgcgccaacaagatcgactgcaccaagcacagatgcgtggacgagagcgagggcagactgtgggccgagagcaagggcttcctgtacttcgagaccagcgcccagaccggcgagggcatcaacgagatgttccagaccttctacatcagcatcgtggacctgtgcgagaacggcggcaagagacccaccaccaacagcagcgccagcttcaccaaggagcaggccgacgccatcagaagaatcagaaacagcaaggacagctgggacatgctgggcgtgaagcccggcgccagcagagacgaggtgaacaaggcctacagaaagctggccgtgctgctgcaccccgacaagtgcgtggcccccggcagcgaggacgccttcaaggccgtggtgaacgccagaaccgccctgctgaagaacatcaagtag

SEQ ID NO: 79528 - DNA, 609 bp, synthetic construct
  misc_feature 1..609: note = Description of Artificial Sequence: Synthetic coding sequence
  source 1..609: mol_type = other DNA
atggccggccaccccttcttctacgaggtgagaaacgagttctacaaggacacccagggcgtgatcctggtgtacgacgtgggccagaaggacagcttcgacgccctggacgcctggctggccgagatgaagcaggagctgggcccccacggcaacatggagaacatcatcttcgtggtgtgcgccaacaagatcgactgcaccaagcacagatgcgtggacgagagcgagggcagactgtgggccgagagcaagggcttcctgtacttcgagaccagcgcccagaccggcgagggcatcaacgagatgttccagaccttctacatcagcatcgtggacctgtgcgagaacggcggcaagagacccaccaccaacagcagcgccagcttcaccaaggagcaggccgacgccatcagaagaatcagaaacagcaaggacagctgggacatgctgggcgtgaagcccggcgccagcagagacgaggtgaacaaggcctacagaaagctggccgtgctgctgcaccccgacaagtgcgtggcccccggcagcgaggacgccttcaaggccgtggtgaacgccagaaccgccctgctgaagaacatcaagtag

SEQ ID NO: 79529 - DNA, 1515 bp, synthetic construct
  misc_feature 1..1515: note = Description of Artificial Sequence: Synthetic coding sequence
  source 1..1515: mol_type = other DNA
atggtggcccccggcagcgtgaccagcagactgggcagcgtgttccccttcctgctggtgctggtggacctgcagtacgagggcgccgagtgcggcgtgaacgccgacgtggagaagcacctggagctgggcaagaagctgctggccgccggccagctggccgacgccctgagccagttccacgccgccgtggacggcgaccccgacaactacatcgcctactacagaagagccaccgtgttcctggccatgggcaagagcaaggccgccctgcccgacctgaccaaggtgatccagctgaagatggacttcaccgccgccagactgcagagaggccacctgctgctgaagcagggcaagctggacgaggccgaggacgacttcaagaaggtgctgaagagcaaccccagcgagaacgaggagaaggaggcccagagccagctgatcaagagcgacgagatgcagagactgagaagccaggccctgaacgccttcggcagcggcgactacaccgccgccatcgccttcctggacaagatcctggaggtgtgcgtgtgggacgccgagctgagagagctgagagccgagtgcttcatcaaggagggcgagcccagaaaggccatcagcgacctgaaggccgccagcaagctgaagaacgacaacaccgaggccttctacaagatcagcaccctgtactaccagctgggcgaccacgagctgagcctgagcgaggtgagagagtgcctgaagctggaccaggaccacaagagatgcttcgcccactacaagcaggtgaagaagctgaacaagctgatcgagagcgccgaggagctgatcagagacggcagatacaccgacgccaccagcaagtacgagagcgtgatgaagaccgagcccagcatcgccgagtacaccgtgagaagcaaggagagaatctgccactgcttcagcaaggacgagaagcccgtggaggccatcagagtgtgcagcgaggtgctgcagatggagcccgacaacgtgaacgccctgaaggacagagccgaggcctacctgatcgaggagatgtacgacgaggccatccaggactacgagaccgcccaggagcacaacgagaacgaccagcagatcagagagggcctggagaaggcccagagactgctgaagcagagccagaagagagactactacaagatcctgggcgtgaagagaaacgccaagaagcaggagatcatcaaggcctacagaaagctggccctgcagtggcaccccgacaacttccagaacgaggaggagaagaagaaggccgagaagaagttcatcgacatcgccgccgccaaggaggtgctgagcgaccccgagatgagaaagaagttcgacgacggcgaggaccccctggacgccgagagccagcagggcggcggcggcaaccccttccacagaagctggaacagctggcagggcttcaaccccttcagcagcggcggccccttcagattcaagttccacttcaactag

SEQ ID NO: 79530 - DNA, 597 bp, synthetic construct
  misc_feature 1..597: note = Description of Artificial Sequence: Synthetic coding sequence
  source 1..597: mol_type = other DNA
atggccgaccagagacagagaagcctgagcaccagcggcgagagcctgtaccacgtgctgggcctggacaagaacgccaccagcgacgacatcaagaagagctacagaaagctggccctgaagtaccaccccgacaagaaccccgacaaccccgaggccgccgacaagttcaaggagatcaacaacgcccacgccatcctgaccgacgccaccaagagaaacatctacgacaagtacggcagcctgggcctgtacgtggccgagcagttcggcgaggagaacgtgaacacctacttcgtgctgagcagctggtgggccaaggccctgttcgtgttctgcggcctgctgacctgctgctactgctgctgctgcctgtgctgctgcttcaactgctgctgcggcaagtgcaagcccaaggcccccgagggcgaggagaccgagttctacgtgagccccgaggacctggaggcccagctgcagagcgacgagagagaggccaccgacacccccatcgtgatccagcccgccagcgccaccgagaccacccagctgaccgccgacagccaccccagctaccacaccgacggcttcaactag

SEQ ID NO: 79531 - DNA, 504 bp, synthetic construct
  misc_feature 1..504: note = Description of Artificial Sequence: Synthetic coding sequence
  source 1..504: mol_type = other DNA
atggccgaccagagacagagaagcctgagcaccagcggcgagagcctgtaccacgtgctgggcctggacaagaacgccaccagcgacgacatcaagaagagctacagaaagctggccctgaagtaccaccccgacaagaaccccgacaaccccgaggccgccgacaagttcaaggagatcaacaacgcccacgccatcctgaccgacgccaccaagagaaacatctacgacaagtacggcagcctgggcctgtacgtggccgagcagttcggcgaggagaacgtgaacacctacttcgtgctgagcagctggtgggccaaggccctgttcgtgttctgcggcctgctgacctgctgctactgctgctgctgcctgtgctgctgcttcaactgctgctgcggcaagtgcaagcccaaggcccccgagggcgaggagaccgagttctacgtgagccccgaggacctggaggcccagctgcagagcgacgagagaggcggccactag

SEQ ID NO: 79532 - DNA, 600 bp, synthetic construct
  misc_feature 1..600: note = Description of Artificial Sequence: Synthetic coding sequence
  source 1..600: mol_type = other DNA
atggcctgcaacatccccaaccagagacagagaaccctgagcaccaccggcgaggccctgtacgagatcctgggcctgcacaagggcgccagcaacgaggagatcaagaagacctacagaaagctggccctgaagcaccaccccgacaagaaccccgacgaccccgccgccaccgagaagttcaaggagatcaacaacgcccacgccatcctgaccgacatcagcaagagaagcatctacgacaagtacggcagcctgggcctgtacgtggccgagcagttcggcgacgagaacgtgaacacctacttcatgctgagcagctggtgggccaaggccctgttcgtgatcgtgggcctgctgaccggctgctacttctgctgctgcctgtgctgctgctgcaactgctgctgcggccactgcagacccgagagcagcgtgcccgaggaggacttctacgtgagccccgaggacctggaggagcagatcaagagcgacatggagaaggacgtggacttccccgtgttcctgcagcccaccaacgccaacgagaagacccagctgatcaaggagggcagcagaagctactgcaccgacagctag

SEQ ID NO: 79533 - DNA, 570 bp, synthetic construct
  misc_feature 1..570: note = Description of Artificial Sequence: Synthetic coding sequence
  source 1..570: mol_type = other DNA
atgagcaccgtgaaggaggccgcccacagactgagcaagagcgagatgagcctgtacgccgtgctggacctgaagaagggcgccagccccgaggacttcaagaagagctacagccacagcgccctgctgccccacccccccttcgagtaccacctgggcagaaagctggccctgagataccaccccgacaagaaccccggcaacgcccaggccgccgagatcttcaaggagatcaacgccgcccacgccatcctgagcgacagcaagaagagaaagatctacgaccagcacggcagcctgggcatctacctgtacgaccacttcggcgaggagggcgtgagatactacttcatcctgaacagctgctggttcaagaccctggtgatcctgtgcaccctgctgacctgctgctgcttctgctgctgctgctgcttctgctgcggcgccctgaagcccccccccgagcaggacagcggcagaaagtaccagcagaacgtgcagagccagccccccagaagcggcgccaagtgcgacttcagaagcgaggagaacagcgaggacgacttctag

SEQ ID NO: 79534 - DNA, 570 bp, synthetic construct; identical to SEQ ID NO: 79533
  misc_feature 1..570: note = Description of Artificial Sequence: Synthetic coding sequence
  source 1..570: mol_type = other DNA

SEQ ID NO: 79535 - DNA, 2703 bp, synthetic construct
  misc_feature 1..2703: note = Description of Artificial Sequence: Synthetic coding sequence
  source 1..2703: mol_type = other DNA
atggagcccagctacggcggcggcctgttcgacatggtgaagggcggcgccggcagactgttcagcaacctgaaggacaacctgaaggacaccctgaaggacaccagcagcagagtgatccagagcgtgaccagctacaccaagggcgacctggacttcacctacgtgaccagcagaatcatcgtgatgagcttccccctggacaacgtggacatcggcttcagaaaccaggtggacgacatcagaagcttcctggacagcagacacctggaccactacaccgtgtacaacctgagccccaagagctacagaaccgccaagttccacagcagagtgagcgagtgcagctggcccatcagacaggcccccagcctgcacaacctgttcgccgtgtgcagaaacatgtacaactggctgctgcagaaccccaagaacgtgtgcgtggtgcactgcctggacggcagagccgccagcagcatcctggtgggcgccatgttcatcttctgcaacctgtacagcacccccggccccgccatcagactgctgtacgccaagagacccggcatcggcctgagccccagccacagaagatacctgggctacatgtgcgacctgctggccgacaagccctacagaccccacttcaagcccctgaccatcaagagcatcaccgtgagccccatccccttcttcaacaagcagagaaacggctgcagaccctactgcgacgtgctgatcggcgagaccaagatctacagcacctgcaccgacttcgagagaatgaaggagtacagagtgcaggacggcaagatcttcatccccctgaacatcaccgtgcagggcgacgtggtggtgagcatgtaccacctgagaagcaccatcggcagcagactgcaggccaaggtgaccaacacccagatcttccagctgcagttccacaccggcttcatccccctggacaccaccgtgctgaagttcaccaagcccgagctggacgcctgcgacgtgcccgagaagtacccccagctgttccaggtgaccctggacgtggagctgcagccccacgacaaggtgatcgacctgacccccccctgggagcactactgcaccaaggacgtgaaccccagcatcctgttcagcagccaccaggagcaccaggacaccctggccctgggcggccaggcccccatcgacatcccccccgacaaccccagacactacggccagagcggcttcttcgccagcctgtgctggcaggaccagaagagcgagaagagcttctgcgaggaggaccacgccgccctggtgaaccaggagagcgagcagagcgacgacgagctgctgaccctgagcagcccccacggcaacgccaacggcgacaagccccacggcgtgaagaagcccagcaagaagcagcaggagcccgccgccccccccccccccgaggacgtggacctgctgggcctggagggcagcgccatgagcaacagcttcagcccccccgccgccccccccaccaacagcgagctgctgagcgacctgttcggcggcggcggcgccgccggccccacccaggccggccagagcggcgtggaggacgtgttccaccccagcggccccgccagcacccagagcacccccagaagaagcgccaccagcaccagcgccagccccaccctgagagtgggcgagggcgccaccttcgaccccttcggcgcccccagcaagcccagcggccaggacctgctgggcagcttcctgaacaccagcagcgccagcagcgaccccttcctgcagcccaccagaagccccagccccaccgtgcacgccagcagcacccccgccgtgaacatccagcccgacgtgagcggcggctgggactggcacgccaagcccggcggcttcggcatgggcagcaagagcgccgccaccagccccaccggcagcagccacggcacccccacccaccagagcaagccccagaccctggaccccttcgccgacctgggcaccctgggcagcagcagcttcgccagcaagcccaccacccccaccggcctgggcggcggcttcccccccctgagcagcccccagaaggccagcccccagcccatgggcggcggctggcagcagggcggcgcctacaactggcagcagccccagcccaagccccagcccagcatgccccacagcagcccccagaacagacccaactacaacgtgagcttcagcgccatgcccggcggccagaacgagagaggcaagggcagcagcaacctggagggcaagcagaaggccgccgacttcgaggacctgctgagcggccagggcttcaacgcccacaaggacaagaagggccccagaaccatcgccgagatgagaaaggaggagatggccaaggagatggaccccgagaagctgaagatcctggagtggatcgagggcaaggagagaaacatcagagccctgctgagcaccatgcacaccgtgctgtgggccggcgagaccaagtggaagcccgtgggcatggccgacctggtgacccccgagcaggtgaagaaggtgtacagaaaggccgtgctggtggtgcaccccgacaaggccaccggccagccctacgagcagtacgccaagatgatcttcatggagctgaacgacgcctggagcgagttcgagaaccagggccagaagcccctgtactag

SEQ ID NO: 79536 - DNA, 2913 bp, synthetic construct
  misc_feature 1..2913: note = Description of Artificial Sequence: Synthetic coding sequence
  source 1..2913: mol_type = other DNA
atgagcctgctgggcagctacagaaagaagaccagcaacgacggctacgagagcctgcagctggtggacagcaacggcgacctgagcgccggcagcggcggcgtgggcggcaagcagagagtgaacgccggcgccgccgccagaagccccgccagacagccccccgacagagccagcaccatggacagcagcggcgccagcagccccgacatggagcccagctacggcggcggcctgttcgacatggtgaagggcggcgccggcagactgttcagcaacctgaaggacaacctgaaggacaccctgaaggacaccagcagcagagtgatccagagcgtgaccagctacaccaagggcgacctggacttcacctacgtgaccagcagaatcatcgtgatgagcttccccctggacaacgtggacatcggcttcagaaaccaggtggacgacatcagaagcttcctggacagcagacacctggaccactacaccgtgtacaacctgagccccaagagctacagaaccgccaagttccacagcagagtgagcgagtgcagctggcccatcagacaggcccccagcctgcacaacctgttcgccgtgtgcagaaacatgtacaactggctgctgcagaaccccaagaacgtgtgcgtggtgcactgcctggacggcagagccgccagcagcatcctggtgggcgccatgttcatcttctgcaacctgtacagcacccccggccccgccatcagactgctgtacgccaagagacccggcatcggcctgagccccagccacagaagatacctgggctacatgtgcgacctgctggccgacaagccctacagaccccacttcaagcccctgaccatcaagagcatcaccgtgagccccatccccttcttcaacaagcagagaaacggctgcagaccctactgcgacgtgctgatcggcgagaccaagatctacagcacctgcaccgacttcgagagaatgaaggagtacagagtgcaggacggcaagatcttcatccccctgaacatcaccgtgcagggcgacgtggtggtgagcatgtaccacctgagaagcaccatcggcagcagactgcaggccaaggtgaccaacacccagatcttccagctgcagttccacaccggcttcatccccctggacaccaccgtgctgaagttcaccaagcccgagctggacgcctgcgacgtgcccgagaagtacccccagctgttccaggtgaccctggacgtggagctgcagccccacgacaaggtgatcgacctgacccccccctgggagcactactgcaccaaggacgtgaaccccagcatcctgttcagcagccaccaggagcaccaggacaccctggccctgggcggccaggcccccatcgacatcccccccgacaaccccagacactacggccagagcggcttcttcgccagcctgtgctggcaggaccagaagagcgagaagagcttctgcgaggaggaccacgccgccctggtgaaccaggagagcgagcagagcgacgacgagctgctgaccctgagcagcccccacggcaacgccaacggcgacaagccccacggcgtgaagaagcccagcaagaagcagcaggagcccgccgccccccccccccccgaggacgtggacctgctgggcctggagggcagcgccatgagcaacagcttcagcccccccgccgccccccccaccaacagcgagctgctgagcgacctgttcggcggcggcggcgccgccggccccacccaggccggccagagcggcgtggaggacgtgttccaccccagcggccccgccagcacccagagcacccccagaagaagcgccaccagcaccagcgccagccccaccctgagagtgggcgagggcgccaccttcgaccccttcggcgcccccagcaagcccagcggccaggacctgctgggcagcttcctgaacaccagcagcgccagcagcgaccccttcctgcagcccaccagaagccccagccccaccgtgcacgccagcagcacccccgccgtgaacatccagcccgacgtgagcggcggctgggactggcacgccaagcccggcggcttcggcatgggcagcaagagcgccgccaccagccccaccggcagcagccacggcacccccacccaccagagcaagccccagaccctggaccccttcgccgacctgggcaccctgggcagcagcagcttcgccagcaagcccaccacccccaccggcctgggcggcggcttcccccccctgagcagcccccagaaggccagcccccagcccatgggcggcggctggcagcagggcggcgcctacaactggcagcagccccagcccaagccccagcccagcatgccccacagcagcccccagaacagacccaactacaacgtgagcttcagcgccatgcccggcggccagaacgagagaggcaagggcagcagcaacctggagggcaagcagaaggccgccgacttcgaggacctgctgagcggccagggcttcaacgcccacaaggacaagaagggccccagaaccatcgccgagatgagaaaggaggagatggccaaggagatggaccccgagaagctgaagatcctggagtggatcgagggcaaggagagaaacatcagagccctgctgagcaccatgcacaccgtgctgtgggccggcgagaccaagtggaagcccgtgggcatggccgacctggtgacccccgagcaggtgaagaaggtgtacagaaaggccgtgctggtggtgcaccccgacaaggccaccggccagccctacgagcagtacgccaagatgatcttcatggagctgaacgacgcctggagcgagttcgagaaccagggccagaagcccctgtactag

SEQ ID NO: 79537 - DNA, 2742 bp, synthetic construct
  misc_feature 1..2742: note = Description of Artificial Sequence: Synthetic coding sequence
  source 1..2742: mol_type = other DNA
atgaaggacagcgagaacaagggcgccagcagccccgacatggagcccagctacggcggcggcctgttcgacatggtgaagggcggcgccggcagactgttcagcaacctgaaggacaacctgaaggacaccctgaaggacaccagcagcagagtgatccagagcgtgaccagctacaccaagggcgacctggacttcacctacgtgaccagcagaatcatcgtgatgagcttccccctggacaacgtggacatcggcttcagaaaccaggtggacgacatcagaagcttcctggacagcagacacctggaccactacaccgtgtacaacctgagccccaagagctacagaaccgccaagttccacagcagagtgagcgagtgcagctggcccatcagacaggcccccagcctgcacaacctgttcgccgtgtgcagaaacatgtacaactggctgctgcagaaccccaagaacgtgtgcgtggtgcactgcctggacggcagagccgccagcagcatcctggtgggcgccatgttcatcttctgcaacctgtacagcacccccggccccgccatcagactgctgtacgccaagagacccggcatcggcctgagccccagccacagaagatacctgggctacatgtgcgacctgctggccgacaagccctacagaccccacttcaagcccctgaccatcaagagcatcaccgtgagccccatccccttcttcaacaagcagagaaacggctgcagaccctactgcgacgtgctgatcggcgagaccaagatctacagcacctgcaccgacttcgagagaatgaaggagtacagagtgcaggacggcaagatcttcatccccctgaacatcaccgtgcagggcgacgtggtggtgagcatgtaccacctgagaagcaccatcggcagcagactgcaggccaaggtgaccaacacccagatcttccagctgcagttccacaccggcttcatccccctggacaccaccgtgctgaagttcaccaagcccgagctggacgcctgcgacgtgcccgagaagtacccccagctgttccaggtgaccctggacgtggagctgcagccccacgacaaggtgatcgacctgacccccccctgggagcactactgcaccaaggacgtgaaccccagcatcctgttcagcagccaccaggagcaccaggacaccctggccctgggcggccaggcccccatcgacatcccccccgacaaccccagacactacggccagagcggcttcttcgccagcctgtgctggcaggaccagaagagcgagaagagcttctgcgaggaggaccacgccgccctggtgaaccaggagagcgagcagagcgacgacgagctgctgaccctgagcagcccccacggcaacgccaacggcgacaagccccacggcgtgaagaagcccagcaagaagcagcaggagcccgccgccccccccccccccgaggacgtggacctgctgggcctggagggcagcgccatgagcaacagcttcagcccccccgccgccccccccaccaacagcgagctgctgagcgacctgttcggcggcggcggcgccgccggccccacccaggccggccagagcggcgtggaggacgtgttccaccccagcggccccgccagcacccagagcacccccagaagaagcgccaccagcaccagcgccagccccaccctgagagtgggcgagggcgccaccttcgaccccttcggcgcccccagcaagcccagcggccaggacctgctgggcagcttcctgaacaccagcagcgccagcagcgaccccttcctgcagcccaccagaagccccagccccaccgtgcacgccagcagcacccccgccgtgaacatccagcccgacgtgagcggcggctgggactggcacgccaagcccggcggcttcggcatgggcagcaagagcgccgccaccagccccaccggcagcagccacggcacccccacccaccagagcaagccccagaccctggaccccttcgccgacctgggcaccctgggcagcagcagcttcgccagcaagcccaccacccccaccggcctgggcggcggcttcccccccctgagcagcccccagaaggccagcccccagcccatgggcggcggctggcagcagggcggcgcctacaactggcagcagccccagcccaagccccagcccagcatgccccacagcagcccccagaacagacccaactacaacgtgagcttcagcgccatgcccggcggccagaacgagagaggcaagggcagcagcaacctggagggcaagcagaaggccgccgacttcgaggacctgctgagcggccagggcttcaacgcccacaaggacaagaagggccccagaaccatcgccgagatgagaaaggaggagatggccaaggagatggaccccgagaagctgaagatcctggagtggatcgagggcaaggagagaaacatcagagccctgctgagcaccatgcacaccgtgctgtgggccggcgagaccaagtggaagcccgtgggcatggccgacctggtgacccccgagcaggtgaagaaggtgtacagaaaggccgtgctggtggtgcaccccgacaaggccaccggccagccctacgagcagtacgccaagatgatcttcatggagctgaacgacgcctggagcgagttcgagaaccagggccagaagcccctgtactag

SEQ ID NO: 79538 - DNA, 783 bp, synthetic construct
  misc_feature 1..783: note = Description of Artificial Sequence: Synthetic coding sequence
  source 1..783: mol_type = other DNA
atgggcctgctggacctgtgcgaggaggtgttcggcaccgccgacctgtacagagtgctgggcgtgagaagagaggccagcgacggcgaggtgagaagaggctaccacaaggtgagcctgcaggtgcaccccgacagagtgggcgagggcgacaaggaggacgccaccagaagattccagatcctgggcaaggtgtacagcgtgctgagcgacagagagcagagagccgtgtacgacgagcagggcaccgtggacgaggacagccccgtgctgacccaggacagagactgggaggcctactggagactgctgttcaagaagatcagcctggaggacatccaggccttcgagaagacctacaagggcagcgaggaggagctggccgacatcaagcaggcctacctggacttcaagggcgacatggaccagatcatggagagcgtgctgtgcgtgcagtacaccgaggagcccagaatcagaaacatcatccagcaggccatcgacgccggcgaggtgcccagctacaacgccttcgtgaaggagagcaagcagaagatgaacgccagaaagagaagagcccaggaggaggccaaggaggccgagatgagcagaaaggagctgggcctggacgagggcgtggacagcctgaaggccgccatccagagcagacagaaggacagacagaaggagatggacaacttcctggcccagatggaggccaagtactgcaagagcagcaagggcggcggcaagaagagcgccctgaagaaggagaagaagtag

SEQ ID NO: 79539 - DNA, 1029 bp, synthetic construct
  misc_feature 1..1029: note = Description of Artificial Sequence: Synthetic coding sequence
  source 1..1029: mol_type = other DNA
atgctggagaacagcctgtacagccccacctgggagggcagccagttctgggtgaccgtgcagagaaccgaggccgccgagagatgcggcctgcacggcagctacgtgctgagagtggaggccgagagactgaccctgctgaccgtgggcgcccagagccagatcctggagcccctgctgagctggccctacaccctgctgagaagatacggcagagacaaggtgatgttcagcttcgaggccggcagaagatgccccagcggccccggcaccttcaccttccagaccgcccagggcaacgacatcttccaggccgtggagaccgccatccacagacagaaggcccagggcaaggccggccagggccacgacgtgctgagagccgacagccacgagggcgaggtggccgagggcaagctgcccagcccccccggcccccaggagctgctggacagcccccccgccctgtacgccgagcccctggacagcctgagaatcgccccctgccccagccaggacagcctgtacagcgaccccctggacagcaccagcgcccaggccggcgagggcgtgcagagaaagaagcccctgtactgggacctgtacgagcacgcccagcagcagctgctgaaggccaagctgaccgaccccaaggaggaccccatctacgacgagcccgagggcctggcccccgtgcccccccagggcctgtacgacctgcccagagagcccaaggacgcctggtggtgccaggccagagtgaaggaggagggctacgagctgccctacaaccccgccaccgacgactacgccgtgcccccccccagaagcaccaagcccctgctggcccccaagccccagggccccgccttccccgagcccggcaccgccaccggcagcggcatcaagagccacaacagcgccctgtacagccaggtgcagaagagcggcgccagcggcagctgggactgcggcctgagcagagtgggcaccgacaagaccggcgtgaagagcgagggcagcacctag

SEQ ID NO: 79540 - DNA, 855 bp, synthetic construct
  misc_feature 1..855: note = Description of Artificial Sequence: Synthetic coding sequence
  source 1..855: mol_type = other DNA
atggagcccggcatgctgggcccccacaacctgccccaccacgagcccatcagcttcggcatcgaccagatcctgagcggccccgagacccccggcggcggcctgggcctgggcagaggcggccagggccacggcgagaacggcgccttcagcggcggctaccacggcgccagcggctacggccccgccggcagcctggcccccctgcccggcagcagcggcgtgggccccggcggcgtgatcagagtgcccgcccacagacccctgcccgtgcccccccccgccggcggcgcccccgccgtgcccggccccagcggcctgggcggcgccggcggcctggccggcctgaccttcccctggatggacagcggcagaagattcgccaaggacagactgaccgccgccctgagccccttcagcggcaccagaagaatcggccacccctaccagaacagaaccccccccaagagaaagaagcccagaaccagcttcagcagaagccaggtgctggagctggagagaagattcctgagacagaagtacctggccagcgccgagagagccgccctggccaaggccctgagaatgaccgacgcccaggtgaagacctggttccagaacagaagaaccaagtggagaagacagaccgccgaggagagagaggccgagagacacagagccggcagactgctgctgcacctgcagcaggacgccctgcccagacccctgagaccccccctgccccccgaccccctgtgcctgcacaacagcagcctgttcgccctgcagaacctgcagccctgggccgaggacaacaaggtggccagcgtgagcggcctggccagcgtggtgtag

SEQ ID NO: 79541 - DNA, 1239 bp, synthetic construct
  misc_feature 1..1239: note = Description of Artificial Sequence: Synthetic coding sequence
  source 1..1239: mol_type = other DNA
atgggcgacggcgccgtgaagcagggcttcctgtacctgcagcagcagcagaccttcggcaagaagtggagaagattcggcgccagcctgtacggcggcagcgactgcgccctggccagactggagctgcaggagggccccgagaagcccagaagatgcgaggccgccagaaaggtgatcagactgagcgactgcctgagagtggccgaggccggcggcgaggccagcagccccagagacaccagcgccttcttcctggagaccaaggagagactgtacctgctggccgcccccgccgccgagagaggcgactgggtgcaggccatctgcctgctggccttccccggccagagaaaggagctgagcggccccgagggcaagcagagcagaccctgcatggaggagaacgagctgtacagcagcgccgtgaccgtgggcccccacaaggagttcgccgtgaccatgagacccaccgaggccagcgagagatgccacctgagaggcagctacaccctgagagccggcgagagcgccctggagctgtggggcggccccgagcccggcacccagctgtacgactggccctacagattcctgagaagattcggcagagacaaggtgaccttcagcttcgaggccggcagaagatgcgtgagcggcgagggcaacttcgagttcgagaccagacagggcaacgagatcttcctggccctggaggaggccatcagcgcccagaagaacgccgcccccgccaccccccagccccagcccgccaccatccccgccagcctgcccagacccgacagcccctacagcagaccccacgacagcctgcccccccccagccccaccacccccgtgcccgcccccagacccagaggccaggagggcgagtacgccgtgcccttcgacgccgtggccagaagcctgggcaagaacttcagaggcatcctggccgtgcccccccagctgctggccgaccccctgtacgacagcatcgaggagaccctgccccccagacccgaccacatctacgacgagcccgagggcgtggccgccctgagcctgtacgacagcccccaggagcccagaggcgaggcctggagaagacaggccaccgccgacagagaccccgccggcctgcagcacgtgcagcccgccggccaggacttcagcgccagcggctggcagcccggcaccgagtacgacaacgtggtgctgaagaagggccccaagtag

SEQ ID NO: 79542 - DNA, 777 bp, synthetic construct
  misc_feature 1..777: note = Description of Artificial Sequence: Synthetic coding sequence
  source 1..777: mol_type = other DNA
atgagacccaccgaggccagcgagagatgccacctgagaggcagctacaccctgagagccggcgagagcgccctggagctgtggggcggccccgagcccggcacccagctgtacgactggccctacagattcctgagaagattcggcagagacaaggtgaccttcagcttcgaggccggcagaagatgcgtgagcggcgagggcaacttcgagttcgagaccagacagggcaacgagatcttcctggccctggaggaggccatcagcgcccagaagaacgccgcccccgccaccccccagccccagcccgccaccatccccgccagcctgcccagacccgacagcccctacagcagaccccacgacagcctgcccccccccagccccaccacccccgtgcccgcccccagacccagaggccaggagggcgagtacgccgtgcccttcgacgccgtggccagaagcctgggcaagaacttcagaggcatcctggccgtgcccccccagctgctggccgaccccctgtacgacagcatcgaggagaccctgccccccagacccgaccacatctacgacgagcccgagggcgtggccgccctgagcctgtacgacagcccccaggagcccagaggcgaggcctggagaagacaggccaccgccgacagagaccccgccggcctgcagcacgtgcagcccgccggccaggacttcagcgccagcggctggcagcccggcaccgagtacgacaacgtggtgctgaagaagggccccaagtag

SEQ ID NO: 79543 - DNA, 993 bp, synthetic construct
  misc_feature 1..993: note = Description of Artificial Sequence: Synthetic coding sequence
  source 1..993: mol_type = other DNA
atggaccccctggagacccccatcaaggacggcatcctgtaccagcagcacgtgaagttcggcaagaagtgctggagaaaggtgtgggccctgctgtacgccggcggccccagcggcgtggccagactggagagctgggaggtgagagacggcggcctgggcgccgccggcgacagaagcgccggccccggcagaagaggcgagagaagagtgatcagactggccgactgcgtgagcgtgctgcccgccgacggcgagagctgccccagagacaccggcgccttcctgctgaccaccaccgagagaagccacctgctggccgcccagcacagacaggcctggatgggccccatctgccagctggccttccccggcaccggcgaggccagcagcggcagcaccgacgcccagagccccaagagaggcctggtgcccatggaggagaacagcatctacagcagctggcaggaggtgggcgagttccccgtggtggtgcagagaaccgaggccgccaccagatgccagctgaagggccccgccctgctggtgctgggccccgacgccatccagctgagagaggccaagggcacccaggccctgtacagctggccctaccacttcctgagaaagttcggcagcgacaagatcctgctgggcacccccggcgtgagcctgctgatctgcaagggcgagagaaccgacgacgtgagcggcatcatcctggacgagagcctgctgagagcctacagcgtgcccggcgccggcggccacagcagagtgcaggacagcctgggccccgtgctgagagagcccaccttccagggcgagagaagcttcctgaagaccagcatgctgagaagcctgctgtgcagctgcagctggagacaccccagaagccagcccagaacccaggccagctgcctgcagggcagcgactgccccgccccccacagaaacagcaccagcgccgcccacaccctgggcaccagctag

SEQ ID NO: 79544 - DNA, 1491 bp, synthetic construct
  misc_feature 1..1491: note = Description of Artificial Sequence: Synthetic coding sequence
  source 1..1491: mol_type = other DNA
atgaccagaggcgccagactgagaagcgacgccagagcccagctgaaccagctgagcctggacggcggcaccggcagcggccagaagggcaagtgcgaggagttccccagcagcctgagcagcgtgagccccggcctggaggccgccgccctgctgctggccgtgaccatggaccccctggagacccccatcaaggacggcatcctgtaccagcagcacgtgaagttcggcaagaagtgctggagaaaggtgtgggccctgctgtacgccggcggccccagcggcgtggccagactggagagctgggaggtgagagacggcggcctgggcgccgccggcgacagaagcgccggccccggcagaagaggcgagagaagagtgatcagactggccgactgcgtgagcgtgctgcccgccgacggcgagagctgccccagagacaccggcgccttcctgctgaccaccaccgagagaagccacctgctggccgcccagcacagacaggcctggatgggccccatctgccagctggccttccccggcaccggcgaggccagcagcggcagcaccgacgcccagagccccaagagaggcctggtgcccatggaggagaacagcatctacagcagctggcaggaggtgggcgagttccccgtggtggtgcagagaaccgaggccgccaccagatgccagctgaagggccccgccctgctggtgctgggccccgacgccatccagctgagagaggccaagggcacccaggccctgtacagctggccctaccacttcctgagaaagttcggcagcgacaagggcgtgttcagcttcgaggccggcagaagatgccacagcggcgagggcctgttcgccttcagcaccccctgcgcccccgacctgtgcagagccgtggccggcgccatcgccagacagagagagagactgcccgagctgaccagaccccagccctgccccctgcccagagccaccagcctgcccagcctggacacccccggcgagctgagagagatgccccccggccccgagccccccaccagcagaaagatgcacctggccgagcccggcccccagagcctgcccctgctgctgggccccgagcccaacgacctggccagcggcctgtacgccagcgtgtgcaagagagccagcggcccccccggcaacgagcacctgtacgagaacctgtgcgtgctggaggccagccccaccctgcacggcggcgagcccgagccccacgagggccccggcagcagaagccccaccaccagccccatctaccacaacggccaggacctgagctggcccggccccgccaacgacagcaccctggaggcccagtacagaagactgctggagctggaccaggtggagggcaccggcagacccgacccccaggccggcttcaaggccaagctggtgaccctgctgagcagagagagaagaaagggccccgccccctgcgacagaccctag

SEQ ID NO: 79545 - DNA, 687 bp, synthetic construct
  misc_feature 1..687: note = Description of Artificial Sequence: Synthetic coding sequence
  source 1..687: mol_type = other DNA
atggaccccctggagacccccatcaaggacggcatcctgtaccagcagcacgtgaagttcggcaagggcaccggcgaggccagcagcggcagcaccgacgcccagagccccaagagaggcctggtgcccatggaggagaacagcatctacagcagctggcaggaggtgggcgagttccccgtggtggtgcagagaaccgaggccgccaccagatgccagctgaagggccccgccctgctggtgctgggccccgacgccatccagctgagagaggccaagggcacccaggccctgtacagctggccctaccacttcctgagaaagttcggcagcgacaagatcctgctgggcacccccggcgtgagcctgctgatctgcaagggcgagagaaccgacgacgtgagcggcatcatcctggacgagagcctgctgagagcctacagcgtgcccggcgccggcggccacagcagagtgcaggacagcctgggccccgtgctgagagagcccaccttccagggcgagagaagcttcctgaagaccagcatgctgagaagcctgctgtgcagctgcagctggagacaccccagaagccagcccagaacccaggccagctgcctgcagggcagcgactgccccgccccccacagaaacagcaccagcgccgcccacaccctgggcaccagctag

SEQ ID NO: 79546 - DNA, 435 bp, synthetic construct
  misc_feature 1..435: note = Description of Artificial Sequence: Synthetic coding sequence
  source 1..435: mol_type = other DNA
atggaccccctggagacccccatcaaggacggcatcctgtaccagcagcacgtgaagttcggcaagaagtgctggagaaaggtgtgggccctgctgtacgccggcggccccagcggcgtggccagactggagagctgggaggtgagagacggcggcctgggcgccgccggcgacagaagcgccggccccggcagaagaggcgagagaagagtgatcagactggccgactgcgtgagcgtgctgcccgccgacggcgagagctgccccagagacaccggcgccttcctgctgaccaccaccgagagaagccacctgctggccgcccagcacagacaggcctggatgggccccatctgccagctggccttccccggcaccggcgaggccagcagcggcagcaccgacgcccagagccccaagagaggcctggtgtag

SEQ ID NO: 79547 - DNA, 471 bp, synthetic construct
  misc_feature 1..471: note = Description of Artificial Sequence: Synthetic coding sequence
  source 1..471: mol_type = other DNA
atggaccccctggagacccccatcaaggacggcatcctgtaccagcagcacgtgaagttcggcaagaagtgctggagaaaggtgtgggccctgctgtacgccggcggccccagcggcgtggccagactggagagctgggaggtgagagacggcggcctgggcgccgccggcgacagaagcgccggccccggcagaagaggcgagagaagagtgatcagactggccgactgcgtgagcgtgctgcccgccgacggcgagagctgccccagagacaccggcgccttcctgctgaccaccaccgagagaagccacctgctggccgcccagcacagacaggcctggatgggccccatctgccagctggccttccccggcaccggcgaggccagcagcggcagcaccgacgcccagagccccaagagaggcctggtgcccatggaggagaacagcatctacagcagctggcagtag

SEQ ID NO: 79548 - DNA, 132 bp, synthetic construct
  misc_feature 1..132: note = Description of Artificial Sequence: Synthetic coding sequence
  source 1..132: mol_type = other DNA
atggaccccctggagacccccatcaaggacggcatcctgtaccagcagcacgtgaagttcggcaagaagtgctggagaaaggtgtgggccctgctgtacgccggcggccccagcggcgtggccagactgtag

SEQ ID NO: 79549 - DNA, 642 bp, synthetic construct
  misc_feature 1..642: note = Description of Artificial Sequence: Synthetic coding sequence
  source 1..642: mol_type = other DNA
atggaccccctggagacccccatcaaggacggcatcctgtaccagcagcacgtgaagttcggcaagaagtgctggagaaaggtgtgggccctgctgtacgccggcggccccagcggcgtggccagactggagagctgggaggtgagagacggcggcctgggcgccgccggcgacagaagcgccggccccggcagaagaggcgagagaagagtgatcagactggccgactgcgtgagcgtgctgcccgccgacggcgagagctgccccagagacaccggcgccttcctgctgaccaccaccgagagaagccacctgctggccgcccagcacagacaggcctggatgggccccatctgccagctggccttccccggcaccggcgaggccagcagcggcagcaccgacgcccagagccccaagagaggcctggtgcccatggaggagaacagcatctacagcagctggcaggaggtgggcgagttccccgtggtggtgcagagaaccgaggccgccaccagatgccagctgaagggccccgccctgctggtgctgggccccgacgccatccagctgagagaggccaagggcacccaggccctgtacagctggccctaccacttcctgagaaagttcggcagctag

SEQ ID NO: 79550 - DNA, 42 bp, synthetic construct
  misc_feature 1..42: note = Description of Artificial Sequence: Synthetic coding sequence
  source 1..42: mol_type = other DNA
atggaccccctggagacccccatcaaggacggcatcctgtag

SEQ ID NO: 79551 - DNA, 258 bp, synthetic construct
  misc_feature 1..258: note = Description of Artificial Sequence: Synthetic coding sequence
  source 1..258: mol_type = other DNA
atggaccccctggagacccccatcaaggacggcatcctgtaccagcagcacgtgaagttcggcaagaagtgctggagaaaggtgtgggccctgctgtacgccggcggccccagcggcgtggccagactggagagctgggaggtgagagacggcggcctgggcgccgccggcgacagaagcgccggccccggcagaagaggcgagagaagagtgatcagactggccgactgcgtgagcgtgctgcccgccgacggctag

SEQ ID NO: 79552 - DNA, 981 bp, synthetic construct
  misc_feature 1..981: note = Description of Artificial Sequence: Synthetic coding sequence
  source 1..981: mol_type = other DNA
atggccaccaacttcagcgacatcgtgaagcagggctacgtgaagatgaagagcagaaagctgggcatctacagaagatgctggctggtgttcagaaagagcagcagcaagggcccccagagactggagaagtaccccgacgagaagagcgtgtgcctgagaggctgccccaaggtgaccgagatcagcaacgtgaagtgcgtgaccagactgcccaaggagaccaagagacaggccgtggccatcatcttcaccgacgacagcgccagaaccttcacctgcgacagcgagctggaggccgaggagtggtacaagaccctgagcgtggagtgcctgggcagcagactgaacgacatcagcctgggcgagcccgacctgctggcccccggcgtgcagtgcgagcagaccgacagattcaacgtgttcctgctgccctgccccaacctggacgtgtacggcgagtgcaagctgcagatcacccacgagaacatctacctgtgggacatccacaaccccagagtgaagctggtgagctggcccctgtgcagcctgagaagatacggcagagacgccaccagattcaccttcgaggccggcagaatgtgcgacgccggcgagggcctgtacaccttccagacccaggagggcgagcagatctaccagagagtgcacagcgccaccctggccatcgccgagcagcacaagagagtgctgctggagatggagaagaacgtgagactgctgaacaagggcaccgagcactacagctacccctgcacccccaccaccatgctgcccagaagcgcctactggcaccacatcaccggcagccagaacatcgccgaggccagcagctacgccggcgagggctacggcgccgcccaggccagcagcgagaccgacctgctgaacagattcatcctgctgaagcccaagcccagccagggcgacagcagcgaggccaagacccccagccagtag

SEQ ID NO: 79553 - DNA, 921 bp, synthetic construct
  misc_feature 1..921: note = Description of Artificial Sequence: Synthetic coding sequence
  source 1..921: mol_type = other DNA
atggccagcaacttcaacgacatcgtgaagcagggctacgtgagaatcagaagcagaagactgggcatctaccagagatgctggctggtgttcaagaaggccagcagcaagggccccaagagactggagaagttcagcgacgagagagccgcctacttcagatgctaccacaaggtgaccgagctgaacaacgtgaagaacgtggccagactgcccaagagcaccaagaagcacgccatcggcatctacttcaacgacgacaccagcaagaccttcgcctgcgagagcgacctggaggccgacgagtggtgcaaggtgctgcagatggagtgcgtgggcaccagaatcaacgacatcagcctgggcgagcccgacctgctggccaccggcgtggagagagagcagagcgagagattcaacgtgtacctgatgcccagccccaacctggacgtgcacggcgagtgcgccctgcagatcacctacgagtacatctgcctgtgggacgtgcagaaccccagagtgaagctgatcagctggcccctgagcgccctgagaagatacggcagagacaccacctggttcaccttcgaggccggcagaatgtgcgagaccggcgagggcctgttcatcttccagaccagagacggcgaggccatctaccagaaggtgcacagcgccgccctggccatcgccgagcagcacgagagactgctgcagagcgtgaagaacagcatgctgcagatgaagatgagcgagagagccgccagcctgagcaccatggtgcccctgcccagaagcgcctactggcagcacatcaccagacagcacagcaccggccagctgtacagactgcaggacgtgagcagccccctgaagctgcacagaaccgagaccttccccgcctacagaagcgagcactag

SEQ ID NO: 79554 - DNA, 1515 bp, synthetic construct
  misc_feature 1..1515: note = Description of Artificial Sequence: Synthetic coding sequence
  source 1..1515: mol_type = other DNA
atgaccgaggccgccctggtggagggccaggtgaagctgagagacggcaagaagtggaagagcagatggctggtgctgagaaagcccagccccgtggccgactgcctgctgatgctggtgtacaaggacaagagcgagagaatcaagggcctgagagagagaagcagcctgaccctggaggacatctgcggcctggagcccggcctgccctacgagggcctggtgcacaccctggccatcgtgtgcctgagccaggccatcatgctgggcttcgacagccacgaggccatgtgcgcctgggacgccagaatcagatacgccctgggcgaggtgcacagattccacgtgaccgtggcccccggcaccaagctggagagcggccccgccaccctgcacctgtgcaacgacgtgctggtgctggccagagacatcccccccgccgtgaccggccagtggaagctgagcgacctgagaagatacggcgccgtgcccagcggcttcatcttcgagggcggcaccagatgcggctactgggccggcgtgttcttcctgagcagcgccgagggcgagcagatcagcttcctgttcgactgcatcgtgagaggcatcagccccaccaagggccccttcggcctgagacccgtgctgcccgaccccagcccccccggccccagcaccgtggaggagagagtggcccaggaggccctggagaccctgcagctggagaagagactgagcctgctgagccacgccggcagacccggcagcggcggcgacgacagaagcctgagcagcagcagcagcgaggccagccacctggacgtgagcgccagcagcagactgaccgcctggcccgagcagagcagcagcagcgccagcaccagccaggagggccccagacccgccgccgcccaggccgccggcgaggccatggtgggcgccagcagacccccccccaagcccctgagacccagacagctgcaggaggtgggcagacagagcagcagcgacagcggcatcgccaccggcagccacagcagctacagcagcagcctgagcagctacgccggcagcagcctggacgtgtggagagccaccgacgagctgggcagcctgctgagcctgcccgccgccggcgcccccgagcccagcctgtgcacctgcctgcccggcaccgtggagtaccaggtgcccaccagcctgagagcccactacgacacccccagaagcctgtgcctggcccccagagaccacagcccccccagccagggcagccccggcaacagcgccgccagagacagcggcggccagaccagcgccggctgccccagcggctggctgggcaccagaagaagaggcctggtgatggaggccccccagggcagcgaggccaccctgcccggccccgcccccggcgagccctgggaggccggcggcccccacgccggccccccccccgccttcttcagcgcctgccccgtgtgcggcggcctgaaggtgaacccccccccctag

SEQ ID NO: 79555 - DNA, 1827 bp, synthetic construct
  misc_feature 1..1827: note = Description of Artificial Sequence: Synthetic coding sequence
  source 1..1827: mol_type = other DNA
atgaccgaggccgccctggtggagggccaggtgaagctgagagacggcaagaagtggaagagcagatggctggtgctgagaaagcccagccccgtggccgactgcctgctgatgctggtgtacaaggacaagagcgagagaatcaagggcctgagagagagaagcagcctgaccctggaggacatctgcggcctggagcccggcctgccctacgagggcctggtgcacaccctggccatcgtgtgcctgagccaggccatcatgctgggcttcgacagccacgaggccatgtgcgcctgggacgccagaatcagatacgccctgggcgaggtgcacagattccacgtgaccgtggcccccggcaccaagctggagagcggccccgccaccctgcacctgtgcaacgacgtgctggtgctggccagagacatcccccccgccgtgaccggccagtggaagctgagcgacctgagaagatacggcgccgtgcccagcggcttcatcttcgagggcggcaccagatgcggctactgggccggcgtgttcttcctgagcagcgccgagggcgagcagatcagcttcctgttcgactgcatcgtgagaggcatcagccccaccaagggccccttcggcctgagacccgtgctgcccgaccccagcccccccggccccagcaccgtggaggagagagtggcccaggaggccctggagaccctgcagctggagaagagactgagcctgctgagccacgccggcagacccggcagcggcggcgacgacagaagcctgagcagcagcagcagcgaggccagccacctggacgtgagcgccagcagcagactgaccgcctggcccgagcagagcagcagcagcgccagcaccagccaggagggccccagacccgccgccgcccaggccgccggcgaggccatggtgggcgccagcagacccccccccaagcccctgagacccagacagctgcaggaggtgggcagacagagcagcagcgacagcggcatcgccaccggcagccacagcagctacagcagcagcctgagcagctacgccggcagcagcctggacgtgtggagagccaccgacgagctgggcagcctgctgagcctgcccgccgccggcgcccccgagcccagcctgtgcacctgcctgcccggcaccgtggagtaccaggtgcccaccagcctgagagcccactacgacacccccagaagcctgtgcctggcccccagagaccacagcccccccagccagggcagccccggcaacagcgccgccagagacagcggcggccagaccagcgccggctgccccagcggctggctgggcaccagaagaagaggcctggtgatggaggccccccagggcagcgaggccaccctgcccggccccgcccccggcgagccctgggaggccggcggcccccacgccggccccccccccgccttcttcagcgcctgccccgtgtgcggcggcctgaagggcgccgccgccagcgcccccggccccgccaccgcccacagcggcagccccggccccgtggccgtggacagccccggccccgagagacccagaggcgagagccccacctacgtgaacatccccgtgagccccagcagcagaaagcagctgcactacatgggcctggagctgcaggaggccagcgagggcgtgagaggcgccggcgccagcctgtacgcccagatcgacatcatggccaccgagaccgcccacagagtgggcgtgagacacgccagagccagagaggagcagctgagcgagctggagcagagaaaggccgccccccagtag

SEQ ID NO: 79556 - DNA, 768 bp, synthetic construct
  misc_feature 1..768: note = Description of Artificial Sequence: Synthetic coding sequence
  source 1..768: mol_type = other DNA
atgaccgaggccgccctggtggagggccaggtgaagctgagagacggcaagaagtggaagagcagatggctggtgctgagaaagcccagccccgtggccgactgcctgctgatgctggtgtacaaggacaagagcgagagaatcaagggcctgagagagagaagcagcctgaccctggaggacatctgcggcctggagcccggcctgccctacgagggcctggtgcacaccctggccatcgtgtgcctgagccaggccatcatgctgggcttcgacagccacgaggccatgtgcgcctgggacgccagaatcagatacgccctgggcgaggtgcacagattccacgtgaccgtggcccccggcaccaagctggagagcggccccgccaccctgcacctgtgcaacgacgtgctggtgctggccagagacatcccccccgccgtgaccggccagtggaagctgagcgacctgagaagatacggcgccgtgcccagcggcttcatcttcgagggcggcaccagaggctggagactgctgcccgtgctgggcagaggcggcgccgaccagctgcccgtgagactgcacagacccagacacctgccccaccagggccccctgtgggccgccgccggcagcaccagacccaagagccccggcaccctggactgcggcggcgcctgcggccccggcagccccggcaaccccaccgccggcgaggccgccgagccccccctgacctgcggccaggccggccagtggagaggctag

SEQ ID NO: 79557 - DNA, 1371 bp, synthetic construct
  misc_feature 1..1371: note = Description of Artificial Sequence: Synthetic coding sequence
  source 1..1371: mol_type = other DNA
atgggctacttcagatgcgccagagccggcagcttcggcagaagaagaaagatggagcccagcaccgccgccagagcctgggccctgttctggctgctgctgcccctgctgggcgccgtgtgcgccagcggccccagaaccctggtgctgctggacaacctgaacgtgagagagacccacagcctgttcttcagaagcctgaaggacagaggcttcgagctgaccttcaagaccgccgacgaccccagcctgagcctgatcaagtacggcgagttcctgtacgacaacctgatcatcttcagccccagcgtggaggacttcggcggcaacatcaacgtggagaccatcagcgccttcatcgacggcggcggcagcgtgctggtggccgccagcagcgacatcggcgaccccctgagagagctgggcagcgagtgcggcatcgagttcgacgaggagaagaccgccgtgatcgaccaccacaactacgacatcagcgacctgggccagcacaccctgatcgtggccgacaccgagaacctgctgaaggcccccaccatcgtgggcaagagcagcctgaaccccatcctgttcagaggcgtgggcatggtggccgaccccgacaaccccctggtgctggacatcctgaccggcagcagcaccagctacagcttcttccccgacaagcccatcacccagtacccccacgccgtgggcaagaacaccctgctgatcgccggcctgcaggccagaaacaacgccagagtgatcttcagcggcagcctggacttcttcagcgacagcttcttcaacagcgccgtgcagaaggccgcccccggcagccagagatacagccagaccggcaactacgagctggccgtggccctgagcagatgggtgttcaaggaggagggcgtgctgagagtgggccccgtgagccaccacagagtgggcgagaccgccccccccaacgcctacaccgtgaccgacctggtggagtacagcatcgtgatccagcagctgagcaacggcaagtgggtgcccttcgacggcgacgacatccagctggagttcgtgagaatcgaccccttcgtgagaaccttcctgaagaagaagggcggcaagtacagcgtgcagttcaagctgcccgacgtgtacggcgtgttccagttcaaggtggactacaacagactgggctacacccacctgtacagcagcacccaggtgagcgtgagacccctgcagcacacccagtacgagagattcatccccagcgcctacccctactacgccagcgccttcagcatgatgctgggcctgttcatcttcagcatcgtgttcctgcacatgaaggagaaggagaagagcgactag

SEQ ID NO: 79558 - DNA, 1260 bp, synthetic construct
  misc_feature 1..1260: note = Description of Artificial Sequence: Synthetic coding sequence
  source 1..1260: mol_type = other DNA
atgggctacttcagatgcgccagagccggcagcttcggcagaagaagaaagatggagcccagcaccgccgccagagcctgggccctgttctggctgctgctgcccctgctgggcgccgtgtgcgccagcggccccagaaccctggtgctgctggacaacctgaacgtgagagagacccacagcctgttcttcagaagcctgaaggacttcggcggcaacatcaacgtggagaccatcagcgccttcatcgacggcggcggcagcgtgctggtggccgccagcagcgacatcggcgaccccctgagagagctgggcagcgagtgcggcatcgagttcgacgaggagaagaccgccgtgatcgaccaccacaactacgacatcagcgacctgggccagcacaccctgatcgtggccgacaccgagaacctgctgaaggcccccaccatcgtgggcaagagcagcctgaaccccatcctgttcagaggcgtgggcatggtggccgaccccgacaaccccctggtgctggacatcctgaccggcagcagcaccagctacagcttcttccccgacaagcccatcacccagtacccccacgccgtgggcaagaacaccctgctgatcgccggcctgcaggccagaaacaacgccagagtgatcttcagcggcagcctggacttcttcagcgacagcttcttcaacagcgccgtgcagaaggccgcccccggcagccagagatacagccagaccggcaactacgagctggccgtggccctgagcagatgggtgttcaaggaggagggcgtgctgagagtgggccccgtgagccaccacagagtgggcgagaccgccccccccaacgcctacaccgtgaccgacctggtggagtacagcatcgtgatccagcagctgagcaacggcaagtgggtgcccttcgacggcgacgacatccagctggagttcgtgagaatcgaccccttcgtgagaaccttcctgaagaagaagggcggcaagtacagcgtgcagttcaagctgcccgacgtgtacggcgtgttccagttcaaggtggactacaacagactgggctacacccacctgtacagcagcacccaggtgagcgtgagacccctgcagcacacccagtacgagagattcatccccagcgcctacccctactacgccagcgccttcagcatgatgctgggcctgttcatcttcagcatcgtgttcctgcacatgaaggagaaggagaagagcgactag

SEQ ID NO: 79559 - DNA, 279 bp, synthetic construct
  misc_feature 1..279: note = Description of Artificial Sequence: Synthetic coding sequence
  source 1..279: mol_type = other DNA
atgaccaagctggcccagtggctgtggggcctggccatcctgggcagcacctgggtggccctgaccaccggcgccctgggcctggagctgcccctgagctgccaggaggtgctgtggcccctgcccgcctacctgctggtgagcgccggctgctacgccctgggcaccgtgggctacagagtggccaccttccacgactgcgaggacgccgccagagagctgcagagccagatccaggaggccagagccgacctggccagaagaggcctgagattctag

SEQ ID NO: 79560 - DNA, 369 bp, synthetic construct
  misc_feature 1..369: note = Description of Artificial Sequence: Synthetic coding sequence
  source 1..369: mol_type = other DNA
atgctgagcgtgggcggcctgagactgagcctggtgagattcagcttcctgctgctgagaggcgccctgctgcccagcctggccgtgaccatgaccaagctggcccagtggctgtggggcctggccatcctgggcagcacctgggtggccctgaccaccggcgccctgggcctggagctgcccctgagctgccaggaggtgctgtggcccctgcccgcctacctgctggtgagcgccggctgctacgccctgggcaccgtgggctacagagtggccaccttccacgactgcgaggacgccgccagagagctgcagagccagatccaggaggccagagccgacctggccagaagaggcctgagattctag

SEQ ID NO: 79561 - DNA, 279 bp, synthetic construct; identical to SEQ ID NO: 79559
  misc_feature 1..279: note = Description of Artificial Sequence: Synthetic coding sequence
  source 1..279: mol_type = other DNA

SEQ ID NO: 79562 - DNA, 1191 bp, synthetic construct
  misc_feature 1..1191: note = Description of Artificial Sequence: Synthetic coding sequence
  source 1..1191: mol_type = other DNA
atggaccccagaggcaccaagagaggcgccgagaagaccgaggtggccgagcccagaaacaagctgcccagacccgcccccagcctgcccaccgaccccgccctgtacagcggccccttccccttctacagaagacccagcgagctgggctgcttcagcctggacgcccagagacagtaccacggcgacgccagagccctgagatactacagccccccccccaccaacggccccggccccaacttcgacctgagagacggctaccccgacagataccagcccagagacgaggaggtgcaggagagactggaccacctgctgtgctggctgctggagcacagaggcagactggagggcggccccggctggctggccgaggccatcgtgacctggagaggccacctgaccaagctgctgaccaccccctacgagagacaggagggctggcagctggccgccagcagattccagggcaccctgtacctgagcgaggtggagacccccaacgccagagcccagagactggccagaccccccctgctgagagagctgatgtacatgggctacaagttcgagcagtacatgtgcgccgacaagcccggcagcagccccgaccccagcggcgaggtgaacaccaacgtggccttctgcagcgtgctgagaagcagactgggcagccaccccctgctgttcagcggcgaggtggactgcaccgacccccaggcccccagcacccagccccccacctgctacgtggagctgaagaccagcaaggagatgcacagccccggccagtggagaagcttctacagacacaagctgctgaagtggtgggcccagagcttcctgcccggcgtgcccaacgtggtggccggcttcagaaaccccgacggcttcgtgagcagcctgaagaccttccccaccatgaagatgttcgagtacgtgagaaacgacagagacggctggaaccccagcgtgtgcatgaacttctgcgccgccttcctgagcttcgcccagagcaccgtggtgcaggacgaccccagactggtgcacctgttcagctgggagcccggcggccccgtgaccgtgagcgtgcaccaggacgccccctacgccttcctgcccatctggtacgtggaggccatgacccaggacctgcccagcccccccaagacccccagccccaagtag

SEQ ID NO: 79563 - DNA, 1191 bp, synthetic construct; identical to SEQ ID NO: 79562
  misc_feature 1..1191: note = Description of Artificial Sequence: Synthetic coding sequence
  source 1..1191: mol_type = other DNA

SEQ ID NO: 79564 - DNA, 1191 bp, synthetic construct; identical to SEQ ID NO: 79562
  misc_feature 1..1191: note = Description of Artificial Sequence: Synthetic coding sequence
  source 1..1191: mol_type = other DNA

SEQ ID NO: 79565 - DNA, 1191 bp, synthetic construct; identical to SEQ ID NO: 79562
  misc_feature 1..1191: note = Description of Artificial Sequence: Synthetic coding sequence
  source 1..1191: mol_type = other DNA

SEQ ID NO: 79566 - DNA, 1191 bp, synthetic construct; identical to SEQ ID NO: 79562
  misc_feature 1..1191: note = Description of Artificial Sequence: Synthetic coding sequence
  source 1..1191: mol_type = other DNA

SEQ ID NO: 79567 - DNA, 1191 bp, synthetic construct; identical to SEQ ID NO: 79562
  misc_feature 1..1191: note = Description of Artificial Sequence: Synthetic coding sequence
  source 1..1191: mol_type = other DNA

SEQ ID NO: 79568 - DNA, 1191 bp, synthetic construct
  misc_feature 1..1191: note = Description of Artificial Sequence: Synthetic coding sequence
  source 1..1191: mol_type = other DNA
atggaccccagaggcaccaagagaggcgccgagaagaccgaggtggccgagcccagaaacaagctgcccagacccgcccccagcctgcccaccgaccccgccctgtacagcggccccttccccttctacagaagacccagcgagctgggctgcttcagcctggacgcccagagacagtaccacggcgacgccagagccctgagatactacagccccccccccaccaacggccccggccccaacttcgacctgagagacggctaccccgacagataccagcccagagacgaggaggtgcaggagagactggaccacctgctgtgctggctgctggagcacagaggcagactggagggcggccccggctggctggccgaggccatcgtgacctggagaggccacctgaccaagctgctgaccaccccctacgagagacaggagggctggcagctggccgccagcagattccagggcaccctgtacctgagcgaggtggagacccccaacgccagagcccagagactggccagaccccccctgctgagagagctgatgtacatgggctacaagttcgagcagtacatgtgcgccgacaagcccggcagcagccccgaccccagcggcgaggtgaacaccaacgtggccttctgcagcgtgctgagaagcagactgggcagccaccccctgctgttcagcggcgaggtggactgcaccgacccccaggcccccagcacccagccccccacctgctacgtggagctgaagaccagcaaggagatgcagagccccggccagtggagaagcttctacagacacaagctgctgaagtggtgggcccagagcttcctgcccggcgtgcccaacgtggtggccggcttcagaaaccccgacggcttcgtgagcagcctgaagaccttccccaccatgaagatgttcgagtacgtgagaaacgacagagacggctggaaccccagcgtgtgcatgaacttctgcgccgccttcctgagcttcgcccagagcaccgtggtgcaggacgaccccagactggtgcacctgttcagctgggagcccggcggccccgtgaccgtgagcgtgcaccaggacgccccctacgccttcctgcccatctggtacgtggaggccatgacccaggacctgcccagcccccccaagacccccagccccaagtag

SEQ ID NO: 79569 - DNA, 1191 bp, synthetic construct; identical to SEQ ID NO: 79562
  misc_feature 1..1191: note = Description of Artificial Sequence: Synthetic coding sequence
  source 1..1191: mol_type = other DNA

SEQ ID NO: 79570 - DNA, 1191 bp, synthetic construct; identical to SEQ ID NO: 79562
  misc_feature 1..1191: note = Description of Artificial Sequence: Synthetic coding sequence
  source 1..1191: mol_type = other DNA

SEQ ID NO: 79571 - DNA, 1191 bp, synthetic construct; identical to SEQ ID NO: 79562
  misc_feature 1..1191: note = Description of Artificial Sequence: Synthetic coding sequence
  source 1..1191: mol_type = other DNA

SEQ ID NO: 79572 - DNA, 1191 bp, synthetic construct; identical to SEQ ID NO: 79562
  misc_feature 1..1191: note = Description of Artificial Sequence: Synthetic coding sequence
  source 1..1191: mol_type = other DNA

SEQ ID NO: 79573 - DNA, 1191 bp, synthetic construct; identical to SEQ ID NO: 79568
  misc_feature 1..1191: note = Description of Artificial Sequence: Synthetic coding sequence
  source 1..1191: mol_type = other DNA

SEQ ID NO: 79574 - DNA, 1191 bp, synthetic construct; identical to SEQ ID NO: 79562
  misc_feature 1..1191: note = Description of Artificial Sequence: Synthetic coding sequence
  source 1..1191: mol_type = other DNA

SEQ ID NO: 79575 - DNA, 1191 bp, synthetic construct; identical to SEQ ID NO: 79562
  misc_feature 1..1191: note = Description of Artificial Sequence: Synthetic coding sequence
  source 1..1191: mol_type = other DNA

SEQ ID NO: 79576 - DNA, 1191 bp, synthetic construct; identical to SEQ ID NO: 79562
  misc_feature 1..1191: note = Description of Artificial Sequence: Synthetic coding sequence
  source 1..1191: mol_type = other DNA

SEQ ID NO: 79577 - DNA, 1191 bp, synthetic construct; identical to SEQ ID NO: 79562
  misc_feature 1..1191: note = Description of Artificial Sequence: Synthetic coding sequence
  source 1..1191: mol_type = other DNA

SEQ ID NO: 79578 - DNA, 1191 bp, synthetic construct; identical to SEQ ID NO: 79562
  misc_feature 1..1191: note = Description of Artificial Sequence: Synthetic coding sequence
  source 1..1191: mol_type = other DNA

SEQ ID NO: 79579 - DNA, 1191 bp, synthetic construct; identical to SEQ ID NO: 79568
  misc_feature 1..1191: note = Description of Artificial Sequence: Synthetic coding sequence
  source 1..1191: mol_type = other DNA

SEQ ID NO: 79580 - DNA, 1443 bp, synthetic construct
  misc_feature 1..1443: note = Description of Artificial Sequence: Synthetic coding sequence
  source 1..1443: mol_type = other DNA
atgaacgccagcgagttcagaagaagaggcaaggagatggtggactacatggccaactacatggagggcatcgagggcagacaggtgtaccccgacgtggagcccggctacctgagacccctgatccccgccgccgccccccaggagcccgacaccttcgaggacatcatcaacgacgtggagaagatcatcatgcccggcgtgacccactggcacagcccctacttcttcgcctacttccccaccgccagcagctaccccgccatgctggccgacatgctgtgcggcgccatcggctgcatcggcttcagctgggccgccagccccgcctgcaccgagctggagaccgtgatgatggactggctgggcaagatgctggagctgcccaaggccttcctgaacgagaaggccggcgagggcggcggcgtgatccagggcagcgccagcgaggccaccctggtggccctgctggccgccagaaccaaggtgatccacagactgcaggccgccagccccgagctgacccaggccgccatcatggagaagctggtggcctacagcagcgaccaggcccacagcagcgtggagagagccggcctgatcggcggcgtgaagctgaaggccatccccagcgacggcaacttcgccatgagagccagcgccctgcaggaggccctggagagagacaaggccgccggcctgatccccttcttcatggtggccaccctgggcaccaccacctgctgcagcttcgacaacctgctggaggtgggccccatctgcaacaaggaggacatctggctgcacgtggacgccgcctacgccggcagcgccttcatctgccccgagttcagacacctgctgaacggcgtggagttcgccgacagcttcaacttcaacccccacaagtggctgctggtgaacttcgactgcagcgccatgtgggtgaagaagagaaccgacctgaccggcgccttcagactggaccccacctacctgaagcacagccaccaggacagcggcctgatcaccgactacagacactggcagatccccctgggcagaagattcagaagcctgaagatgtggttcgtgttcagaatgtacggcgtgaagggcctgcaggcctacatcagaaagcacgtgcagctgagccacgagttcgagagcctggtgagacaggaccccagattcgagatctgcgtggaggtgatcctgggcctggtgtgcttcagactgaagggcagcaacaaggtgaacgaggccctgctgcagagaatcaacagcgccaagaagatccacctggtgccctgccacctgagagacaagttcgtgctgagattcgccatctgcagcagaaccgtggagagcgcccacgtgcagagagcctgggagcacatcaaggagctggccgccgacgtgctgagagccgagagagagtag

SEQ ID NO: 79581 - DNA, 96 bp, synthetic construct
  misc_feature 1..96: note = Description of Artificial Sequence: Synthetic coding sequence
  source 1..96: mol_type = other DNA
atgaacgccagcgagttcagaagaagaggcaaggagatggtggactacatggccaactacatggagggcatcgagggcagacaggtgtacccctag

SEQ ID NO: 79582 - DNA, 51 bp, synthetic construct
  misc_feature 1..51: note = Description of Artificial Sequence: Synthetic coding sequence
  source 1..51: mol_type = other DNA
atgaacgccagcgagttcagaagaagaggcaaggagatggtggactactag

SEQ ID NO: 79583 - DNA, 1443 bp, synthetic construct; identical to SEQ ID NO: 79580
  misc_feature 1..1443: note = Description of Artificial Sequence: Synthetic coding sequence
  source 1..1443: mol_type = other DNA

SEQ ID NO: 79584 - DNA, 1017 bp, synthetic construct
  misc_feature 1..1017: note = Description of Artificial Sequence: Synthetic coding sequence
  source 1..1017: mol_type = other DNA
atgaacgccagcgagttcagaagaagaggcaaggagatggtggactacatggccaactacatggagggcatcgagggcagacaggtgtaccccgacgtggagcccggctacctgagacccctgatccccgccgccgccccccaggagcccgacaccttcgaggacatcatcaacgacgtggagaagatcatcatgcccggcgtgacccactggcacagcccctacttcttcgcctacttccccaccgccagcagctaccccgccatgctggccgacatgctgtgcggcgccatcggctgcatcggcttcagctgggccgccagccccgcctgcaccgagctggagaccgtgatgatggactggctgggcaagatgctggagctgcccaaggccttcctgaacgagaaggccggcgagggcggcggcgtgatccagggcagcgccagcgaggccaccctggtggccctgctggccgccagaaccaaggtgatccacagactgcaggccgccagccccgagctgacccaggccgccatcatggagaagctggtggcctacagcagcgaccaggcccacagcagcgtggagagagccggcctgatcggcggcgtgaagctgaaggccatccccagcgacggcaacttcgccatgagagccagcgccctgcaggaggccctggagagagacaaggccgccggcctgatccccttcttcatggtggccaccctgggcaccaccacctgctgcagcttcgacaacctgctggaggtgggccccatctgcaacaaggaggacatctggctgcacgtggacgccgcctacgccggcagcgccttcatctgccccgagttcagacacctgctgaacggcgtggagttcgccgacagcttcaacttcaacccccacaagtggctgctggtgaacttcgactgcagcgccatgtggagcagacagcccgtgagaatgctgagactgaagaagacctgcctggtgagcgccgtggtgagaagaagctag

SEQ ID NO: 79585 - DNA, 1209 bp, synthetic construct
  misc_feature 1..1209: note = Description of Artificial Sequence: Synthetic coding sequence
  source 1..1209: mol_type = other DNA
atgaacgccagcgagttcagaagaagaggcaaggagatggtggactacatggccaactacatggagggcatcgagggcagacaggtgtaccccgacgtggagcccggctacctgagacccctgatccccgccgccgccccccaggagcccgacaccttcgaggacatcatcaacgacgtggagaagatcatcatgcccggcggcagcgccagcgaggccaccctggtggccctgctggccgccagaaccaaggtgatccacagactgcaggccgccagccccgagctgacccaggccgccatcatggagaagctggtggcctacagcagcgaccaggcccacagcagcgtggagagagccggcctgatcggcggcgtgaagctgaaggccatccccagcgacggcaacttcgccatgagagccagcgccctgcaggaggccctggagagagacaaggccgccggcctgatccccttcttcatggtggccaccctgggcaccaccacctgctgcagcttcgacaacctgctggaggtgggccccatctgcaacaaggaggacatctggctgcacgtggacgccgcctacgccggcagcgccttcatctgccccgagttcagacacctgctgaacggcgtggagttcgccgacagcttcaacttcaacccccacaagtggctgctggtgaacttcgactgcagcgccatgtgggtgaagaagagaaccgacctgaccggcgccttcagactggaccccacctacctgaagcacagccaccaggacagcggcctgatcaccgactacagacactggcagatccccctgggcagaagattcagaagcctgaagatgtggttcgtgttcagaatgtacggcgtgaagggcctgcaggcctacatcagaaagcacgtgcagctgagccacgagttcgagagcctggtgagacaggaccccagattcgagatctgcgtggaggtgatcctgggcctggtgtgcttcagactgaagggcagcaacaaggtgaacgaggccctgctgcagagaatcaacagcgccaagaagatccacctggtgccctgccacctgagagacaagttcgtgctgagattcgccatctgcagcagaaccgtggagagcgcccacgtgcagagagcctgggagcacatcaaggagctggccgccgacgtgctgagagccgagagagagtag

SEQ ID NO: 79586 - DNA, 1164 bp, synthetic construct
  misc_feature 1..1164: note = Description of Artificial Sequence: Synthetic coding sequence
  source 1..1164: mol_type = other DNA
atgaacgccagcgagttcagaagaagaggcaaggagatggtggactacatggccaactacatggagggcatcgagggcagacaggtgtaccccgacgtggagcccggctacctgagacccctgatccccgccgccgccccccaggagcccgacaccttcgaggacatcatcaacgacgtggagaagatcatcatgcccggcgtgacccactggcacagcccctacttcttcgcctacttccccaccgccagcagctaccccgccatgctggccgacatgctgtgcggcgccatcggctgcatcggcttcagctgggccgccagccccgcctgcaccgagctggagaccgtgatgatggactggctgggcaagatgctggagctgcccaaggccttcctgaacgagaaggccggcgagggcggcggcgtgatccagatggtggccaccctgggcaccaccacctgctgcagcttcgacaacctgctggaggtgggccccatctgcaacaaggaggacatctggctgcacgtggacgccgcctacgccggcagcgccttcatctgccccgagttcagacacctgctgaacggcgtggagttcgccgacagcttcaacttcaacccccacaagtggctgctggtgaacttcgactgcagcgccatgtgggtgaagaagagaaccgacctgaccggcgccttcagactggaccccacctacctgaagcacagccaccaggacagcggcctgatcaccgactacagacactggcagatccccctgggcagaagattcagaagcctgaagatgtggttcgtgttcagaatgtacggcgtgaagggcctgcaggcctacatcagaaagcacgtgcagctgagccacgagttcgagagcctggtgagacaggaccccagattcgagatctgcgtggaggtgatcctgggcctggtgtgcttcagactgaagggcagcaacaaggtgaacgaggccctgctgcagagaatcaacagcgccaagaagatccacctggtgccctgccacctgagagacaagttcgtgctgagattcgccatctgcagcagaaccgtggagagcgcccacgtgcagagagcctgggagcacatcaaggagctggccgccgacgtgctgagagccgagagagagtag

SEQ ID NO: 79587 - DNA, 735 bp, synthetic construct
  misc_feature 1..735: note = Description of Artificial Sequence: Synthetic coding sequence
  source 1..735: mol_type = other DNA
atgagagaggccgccttcatgtacagcaccgccgtggccatcttcctggtgatcctggtggccgccctgcagggcagcgcccccagagagagccccctgccctaccacatccccctggaccccgagggcagcctggagctgagctggaacgtgagctacacccaggaggccatccacttccagctgctggtgagaagactgaaggccggcgtgctgttcggcatgagcgacagaggcgagctggagaacgccgacctggtggtgctgtggaccgacggcgacaccgcctacttcgccgacggcaccgtgcacctggtgtacggcatcctggaggagcccttcagaagcctggaggccatcaacggcagcggcctgcagatgggcctgcagagagtgcagctgctgaagcccaacatccccgagcccgagctgcccagcgacgcctgcaccatggaggtgcaggcccccaacatccagatccccagccaggagaccacctactggtgctacatcaaggagctgcccaagggcttcagcagacaccacatcatcaagtacgagcccatcgtgaccaagggcaacgaggccctggtgcaccacatggaggtgttccagtgcgcccccgagatggacagcgtgccccacttcagcggcccctgcgacagcaagatgaagcccgacagactgaactactgcagacacgtgctggccgcctgggccctgggcgccaagtag

SEQ ID NO: 79588 - DNA, 1854 bp, synthetic construct
  misc_feature 1..1854: note = Description of Artificial Sequence: Synthetic coding sequence
  source 1..1854: mol_type = other DNA
atgcccgccctgagcagatgggccagcctgcccggccccagcatgagagaggccgccttcatgtacagcaccgccgtggccatcttcctggtgatcctggtggccgccctgcagggcagcgcccccagagagagccccctgccctaccacatccccctggaccccgagggcagcctggagctgagctggaacgtgagctacacccaggaggccatccacttccagctgctggtgagaagactgaaggccggcgtgctgttcggcatgagcgacagaggcgagctggagaacgccgacctggtggtgctgtggaccgacggcgacaccgcctacttcgccgacgcctggagcgaccagaagggccagatccacctggacccccagcaggactaccagctgctgcaggtgcagagaacccccgagggcctgaccctgctgttcaagagacccttcggcacctgcgaccccaaggactacctgatcgaggacggcaccgtgcacctggtgtacggcatcctggaggagcccttcagaagcctggaggccatcaacggcagcggcctgcagatgggcctgcagagagtgcagctgctgaagcccaacatccccgagcccgagctgcccagcgacgcctgcaccatggaggtgcaggcccccaacatccagatccccagccaggagaccacctactggtgctacatcaaggagctgcccaagggcttcagcagacaccacatcatcaagtacgagcccatcgtgaccaagggcaacgaggccctggtgcaccacatggaggtgttccagtgcgcccccgagatggacagcgtgccccacttcagcggcccctgcgacagcaagatgaagcccgacagactgaactactgcagacacgtgctggccgcctgggccctgggcgccaaggccttctactaccccgaggaggccggcctggccttcggcggccccggcagcagcagatacctgagactggaggtgcactaccacaaccccctggtgatcgagggcagaaacgacagcagcggcatcagactgtactacaccgccaagctgagaagattcaacgccggcatcatggagctgggcctggtgtacacccccgtgatggccatcccccccagagagaccgccttcatcctgaccggctactgcaccgacaagtgcacccagctggccctgccccccagcggcatccacatcttcgccagccagctgcacacccacctgaccggcagaaaggtggtgaccgtgctggtgagagacggcagagagtgggagatcgtgaaccaggacaaccactacagcccccacttccaggagatcagaatgctgaagaaggtggtgagcgtgcaccccggcgacgtgctgatcaccagctgcacctacaacaccgaggacagagagctggccaccgtgggcggcttcggcatcctggaggagatgtgcgtgaactacgtgcactactacccccagacccagctggagctgtgcaagagcgccgtggacgccggcttcctgcagaagtacttccacctgatcaacagattcaacaacgaggacgtgtgcacctgcccccaggccagcgtgagccagcagttcaccagcgtgccctggaacagcttcaacagagacgtgctgaaggccctgtacagcttcgcccccatcagcatgcactgcaacaagagcagcgccgtgagattccagggcgagtggaacctgcagcccctgcccaaggtgatcagcaccctggaggagcccaccccccagtgccccaccagccagggcagaagccccgccggccccaccgtggtgagcatcggcggcggcaagggctag

SEQ ID NO: 79589 - DNA, 1341 bp, synthetic construct
  misc_feature 1..1341: note = Description of Artificial Sequence: Synthetic coding sequence
  source 1..1341: mol_type = other DNA
atgagaaccctgaacaccagcgccatggacggcaccggcctggtggtggagagagacttcagcgtgagaatcctgaccgcctgcttcctgagcctgctgatcctgagcaccctgctgggcaacaccctggtgtgcgccgccgtgatcagattcagacacctgagaagcaaggtgaccaacttcttcgtgatcagcctggccgtgagcgacctgctggtggccgtgctggtgatgccctggaaggccgtggccgagatcgccggcttctggcccttcggcagcttctgcaacatctgggtggccttcgacatcatgtgcagcaccgccagcatcctgaacctgtgcgtgatcagcgtggacagatactgggccatcagcagccccttcagatacgagagaaagatgacccccaaggccgccttcatcctgatcagcgtggcctggaccctgagcgtgctgatcagcttcatccccgtgcagctgagctggcacaaggccaagcccaccagccccagcgacggcaacgccaccagcctggccgagaccatcgacaactgcgacagcagcctgagcagaacctacgccatcagcagcagcgtgatcagcttctacatccccgtggccatcatgatcgtgacctacaccagaatctacagaatcgcccagaagcagatcagaagaatcgccgccctggagagagccgccgtgcacgccaagaactgccagaccaccaccggcaacggcaagcccgtggagtgcagccagcccgagagcagcttcaagatgagcttcaagagagagaccaaggtgctgaagaccctgagcgtgatcatgggcgtgttcgtgtgctgctggctgcccttcttcatcctgaactgcatcctgcccttctgcggcagcggcgagacccagcccttctgcatcgacagcaacaccttcgacgtgttcgtgtggttcggctgggccaacagcagcctgaaccccatcatctacgccttcaacgccgacttcagaaaggccttcagcaccctgctgggctgctacagactgtgccccgccaccaacaacgccatcgagaccgtgagcatcaacaacaacggcgccgccatgttcagcagccaccacgagcccagaggcagcatcagcaaggagtgcaacctggtgtacctgatcccccacgccgtgggcagcagcgaggacctgaagaaggaggaggccgccggcatcgccagacccctggagaagctgagccccgccctgagcgtgatcctggactacgacaccgacgtgagcctggagaagatccagcccatcacccagaacggccagcaccccacctag

SEQ ID NO: 79590 - DNA, 1341 bp, synthetic construct; identical to SEQ ID NO: 79589
  misc_feature 1..1341: note = Description of Artificial Sequence: Synthetic coding sequence
  source 1..1341: mol_type = other DNA

SEQ ID NO: 79591 - DNA, 1245 bp, synthetic construct
  misc_feature 1..1245: note = Description of Artificial Sequence: Synthetic coding sequence
  source 1..1245: mol_type = other DNA
atggaccccctgaacctgagctggtacgacgacgacctggagagacagaactggagcagacccttcaacggcagcgacggcaaggccgacagaccccactacaactactacgccaccctgctgaccctgctgatcgccgtgatcgtgttcggcaacgtgctggtgtgcatggccgtgagcagagagaaggccctgcagaccaccaccaactacctgatcgtgagcctggccgtggccgacctgctggtggccaccctggtgatgccctgggtggtgtacctggaggtggtgggcgagtggaagttcagcagaatccactgcgacatcttcgtgaccctggacgtgatgatgtgcaccgccagcatcctgaacctgtgcgccatcagcatcgacagatacaccgccgtggccatgcccatgctgtacaacaccagatacagcagcaagagaagagtgaccgtgatgatcagcatcgtgtgggtgctgagcttcaccatcagctgccccctgctgttcggcctgaacaacgccgaccagaacgagtgcatcatcgccaaccccgccttcgtggtgtacagcagcatcgtgagcttctacgtgcccttcatcgtgaccctgctggtgtacatcaagatctacatcgtgctgagaagaagaagaaagagagtgaacaccaagagaagcagcagagccttcagagcccacctgagagcccccctgaaggaggccgccagaagagcccaggagctggagatggagatgctgagcagcaccagcccccccgagagaaccagatacagccccatcccccccagccaccaccagctgaccctgcccgaccccagccaccacggcctgcacagcacccccgacagccccgccaagcccgagaagaacggccacgccaaggaccaccccaagatcgccaagatcttcgagatccagaccatgcccaacggcaagaccagaaccagcctgaagaccatgagcagaagaaagctgagccagcagaaggagaagaaggccacccagatgctggccatcgtgctgggcgtgttcatcatctgctggctgcccttcttcatcacccacatcctgaacatccactgcgactgcaacatcccccccgtgctgtacagcgccttcacctggctgggctacgtgaacagcgccgtgaaccccatcatctacaccaccttcaacatcgagttcagaaaggccttcctgaagatcctgcactgctag

SEQ ID NO: 79592 - DNA, 1338 bp, synthetic construct
  misc_feature 1..1338: note = Description of Artificial Sequence: Synthetic coding sequence
  source 1..1338: mol_type = other DNA
atggaccccctgaacctgagctggtacgacgacgacctggagagacagaactggagcagacccttcaacggcagcgacggcaaggccgacagaccccactacaactactacgccaccctgctgaccctgctgatcgccgtgatcgtgttcggcaacgtgctggtgtgcatggccgtgagcagagagaaggccctgcagaccaccaccaactacctgatcgtgagcctggccgtggccgacctgctggtggccaccctggtgatgccctgggtggtgtacctggaggtggtgggcgagtggaagttcagcagaatccactgcgacatcttcgtgaccctggacgtgatgatgtgcaccgccagcatcctgaacctgtgcgccatcagcatcgacagatacaccgccgtggccatgcccatgctgtacaacaccagatacagcagcaagagaagagtgaccgtgatgatcagcatcgtgtgggtgctgagcttcaccatcagctgccccctgctgttcggcctgaacaacgccgaccagaacgagtgcatcatcgccaaccccgccttcgtggtgtacagcagcatcgtgagcttctacgtgcccttcatcgtgaccctgctggtgtacatcaagatctacatcgtgctgagaagaagaagaaagagagtgaacaccaagagaagcagcagagccttcagagcccacctgagagcccccctgaagggcaactgcacccaccccgaggacatgaagctgtgcaccgtgatcatgaagagcaacggcagcttccccgtgaacagaagaagagtggtgcaggaggccgccagaagagcccaggagctggagatggagatgctgagcagcaccagcccccccgagagaaccagatacagccccatcccccccagccaccaccagctgaccctgcccgaccccagccaccacggcctgcacagcacccccgacagccccgccaagcccgagaagaacggccacgccaaggaccaccccaagatcgccaagatcttcgagatccagaccatgcccaacggcaagaccagaaccagcctgaagaccatgagcagaagaaagctgagccagcagaaggagaagaaggccacccagatgctggccatcgtgctgggcgtgttcatcatctgctggctgcccttcttcatcacccacatcctgaacatccactgcgactgcaacatcccccccgtgctgtacagcgccttcacctggctgggctacgtgaacagcgccgtgaaccccatcatctacaccaccttcaacatcgagttcagaaaggccttcctgaagatcctgcactgctag

SEQ ID NO: 79593 - DNA, 1332 bp, synthetic construct
  misc_feature 1..1332: note = Description of Artificial Sequence: Synthetic coding sequence
  source 1..1332: mol_type = other DNA
atggaccccctgaacctgagctggtacgacgacgacctggagagacagaactggagcagacccttcaacggcagcgacggcaaggccgacagaccccactacaactactacgccaccctgctgaccctgctgatcgccgtgatcgtgttcggcaacgtgctggtgtgcatggccgtgagcagagagaaggccctgcagaccaccaccaactacctgatcgtgagcctggccgtggccgacctgctggtggccaccctggtgatgccctgggtggtgtacctggaggtggtgggcgagtggaagttcagcagaatccactgcgacatcttcgtgaccctggacgtgatgatgtgcaccgccagcatcctgaacctgtgcgccatcagcatcgacagatacaccgccgtggccatgcccatgctgtacaacaccagatacagcagcaagagaagagtgaccgtgatgatcagcatcgtgtgggtgctgagcttcaccatcagctgccccctgctgttcggcctgaacaacgccgaccagaacgagtgcatcatcgccaaccccgccttcgtggtgtacagcagcatcgtgagcttctacgtgcccttcatcgtgaccctgctggtgtacatcaagatctacatcgtgctgagaagaagaagaaagagagtgaacaccaagagaagcagcagagccttcagagcccacctgagagcccccctgaagggcaactgcacccaccccgaggacatgaagctgtgcaccgtgatcatgaagagcaacggcagcttccccgtgaacagaagaagagtggaggccgccagaagagcccaggagctggagatggagatgctgagcagcaccagcccccccgagagaaccagatacagccccatcccccccagccaccaccagctgaccctgcccgaccccagccaccacggcctgcacagcacccccgacagccccgccaagcccgagaagaacggccacgccaaggaccaccccaagatcgccaagatcttcgagatccagaccatgcccaacggcaagaccagaaccagcctgaagaccatgagcagaagaaagctgagccagcagaaggagaagaaggccacccagatgctggccatcgtgctgggcgtgttcatcatctgctggctgcccttcttcatcacccacatcctgaacatccactgcgactgcaacatcccccccgtgctgtacagcgccttcacctggctgggctacgtgaacagcgccgtgaaccccatcatctacaccaccttcaacatcgagttcagaaaggccttcctgaagatcctgcactgctag

SEQ ID NO: 79594 - DNA, 1338 bp, synthetic construct; identical to SEQ ID NO: 79592
  misc_feature 1..1338: note = Description of Artificial Sequence: Synthetic coding sequence
  source 1..1338: mol_type = other DNA

SEQ ID NO: 79595 - DNA, 24 bp, synthetic construct
  misc_feature 1..24: note = Description of Artificial Sequence: Synthetic coding sequence
  source 1..24: mol_type = other DNA
atggaccccctgaacctgagctag

SEQ ID NO: 79596 - DNA, 1332 bp, synthetic construct; identical to SEQ ID NO: 79593
  misc_feature 1..1332: note = Description of Artificial Sequence: Synthetic coding sequence
  source 1..1332: mol_type = other DNA

SEQ ID NO: 79597 - DNA, 534 bp, synthetic construct
  misc_feature 1..534: note = Description of Artificial Sequence: Synthetic coding sequence
  source 1..534: mol_type = other DNA
atggaccccctgaacctgagctggtacgacgacgacctggagagacagaactggagcagacccttcaacggcagcgacggcaaggccgacagaccccactacaactactacgccaccctgctgaccctgctgatcgccgtgatcgtgttcggcaacgtgctggtgtgcatggccgtgagcagagagaaggccctgcagaccaccaccaactacctgatcgtgagcctggccgtggccgacctgctggtggccaccctggtgatgccctgggtggtgtacctggaggtggtgggcgagtggaagttcagcagaatccactgcgacatcttcgtgaccctggacgtgatgatgtgcaccgccagcatcctgaacctgtgcgccatcagcatcgacagatacaccgccgtggccatgcccatgctgtacaacaccagatacagcagcaagagaagagtgaccgtgatgatcagcatcgtgtgggtgctgagcttcaccatcagctgccccctgctgttcggcctgaacaacgcctag

SEQ ID NO: 79598 - DNA, 1329 bp, synthetic construct
  misc_feature 1..1329: note = Description of Artificial Sequence: Synthetic coding sequence
  source 1..1329: mol_type = other DNA
atggaccccctgaacctgagctggtacgacgacgacctggagagacagaactggagcagacccttcaacggcagcgacggcaaggccgacagaccccactacaactactacgccaccctgctgaccctgctgatcgccgtgatcgtgttcggcaacgtgctggtgtgcatggccgtgagcagagagaaggccctgcagaccaccaccaactacctgatcgtgagcctggccgtggccgacctgctggtggccaccctggtgatgccctgggtggtgtacctggaggtgggcgagtggaagttcagcagaatccactgcgacatcttcgtgaccctggacgtgatgatgtgcaccgccagcatcctgaacctgtgcgccatcagcatcgacagatacaccgccgtggccatgcccatgctgtacaacaccagatacagcagcaagagaagagtgaccgtgatgatcagcatcgtgtgggtgctgagcttcaccatcagctgccccctgctgttcggcctgaacaacgccgaccagaacgagtgcatcatcgccaaccccgccttcgtggtgtacagcagcatcgtgagcttctacgtgcccttcatcgtgaccctgctggtgtacatcaagatctacatcgtgctgagaagaagaagaaagagagtgaacaccaagagaagcagcagagccttcagagcccacctgagagcccccctgaagggcaactgcacccaccccgaggacatgaagctgtgcaccgtgatcatgaagagcaacggcagcttccccgtgaacagaagaagagtggaggccgccagaagagcccaggagctggagatggagatgctgagcagcaccagcccccccgagagaaccagatacagccccatcccccccagccaccaccagctgaccctgcccgaccccagccaccacggcctgcacagcacccccgacagccccgccaagcccgagaagaacggccacgccaaggaccaccccaagatcgccaagatcttcgagatccagaccatgcccaacggcaagaccagaaccagcctgaagaccatgagcagaagaaagctgagccagcagaaggagaagaaggccacccagatgctggccatcgtgctgggcgtgttcatcatctgctggctgcccttcttcatcacccacatcctgaacatccactgcgactgcaacatcccccccgtgctgtacagcgccttcacctggctgggctacgtgaacagcgccgtgaaccccatcatctacaccaccttcaacatcgagttcagaaaggccttcctgaagatcctgcactgctag

SEQ ID NO: 79599 - DNA, 1029 bp, synthetic construct
  misc_feature 1..1029: note = Description of Artificial Sequence: Synthetic coding sequence
  source 1..1029: mol_type = other DNA
atggccagcctgagccagctgagcggccacctgaactacacctgcggcgccgagaacagcaccggcgccagccaggccagaccccacgcctactacgccctgagctactgcgccctgatcctggccatcgtgttcggcaacggcctggtgtgcatggccgtgctgaaggagagagccctgcagaccaccaccaactacctggtggtgagcctggccgtggccgacctgctggtggccaccctggtgatgccctgggtggtgtacctggaggtgaccggcggcgtgtggaacttcagcagaatctgctgcgacgtgttcgtgaccctggacgtgatgatgtgcaccgccagcatcctgaacctgtgcgccatcagcatcgacagatacaccgccgtggtgatgcccgtgcactaccagcacggcaccggccagagcagctgcagaagagtggccctgatgatcaccgccgtgtgggtgctggccttcgccgtgagctgccccctgctgttcggcttcaacaccaccggcgaccccaccgtgtgcagcatcagcaaccccgacttcgtgatctacagcagcgtggtgagcttctacctgcccttcggcgtgaccgtgctggtgtacgccagaatctacgtggtgctgaagcagagaagaagaaagagaatcctgaccagacagaacagccagtgcaacagcgtgagacccggcttcccccagcagaccctgagccccgaccccgcccacctggagctgaagagatactacagcatctgccaggacaccgccctgggcggccccggcttccaggagagaggcggcgagctgaagagagaggagaagaccagaaacagcctgagcgccaccagcggcgaggagggcaaccccaacggcggccactgcgcctggggcctgcactgcctgctggccgccctgctgctggacccctgcagccagtaccccctgcccgacatgcccagagtgcccagagccctgcagtgccacgacatggccggcctgagagagtag

SEQ ID NO: 79600 - DNA, 1104 bp, synthetic construct
  misc_feature 1..1104: note = Description of Artificial Sequence: Synthetic coding sequence
  source 1..1104: mol_type = other DNA
atggccagcctgagccagctgagcggccacctgaactacacctgcggcgccgagaacagcaccggcgccagccaggccagaccccacgcctactacgccctgagctactgcgccctgatcctggccatcgtgttcggcaacggcctggtgtgcatggccgtgctgaaggagagagccctgcagaccaccaccaactacctggtggtgagcctggccgtggccgacctgctggtggccaccctggtgatgccctgggtggtgtacctggaggtgaccggcggcgtgtggaacttcagcagaatctgctgcgacgtgttcgtgaccctggacgtgatgatgtgcaccgccagcatcctgaacctgtgcgccatcagcatcgacagatacaccgccgtggtgatgcccgtgcactaccagcacggcaccggccagagcagctgcagaagagtggccctgatgatcaccgccgtgtgggtgctggccttcgccgtgagctgccccctgctgttcggcttcaacaccaccggcgaccccaccgtgtgcagcatcagcaaccccgacttcgtgatctacagcagcgtggtgagcttctacctgcccttcggcgtgaccgtgctggtgtacgccagaatctacgtggtgctgaagcagagaagaagaaagagaatcctgaccagacagaacagccagtgcaacagcgtgagacccggcttcccccagcagaccctgagccccgaccccgcccacctggagctgaagagatactacagcatctgccaggacaccgccctgggcggccccggcttccaggagagaggcggcgagctgaagagagaggagaagaccagaaacagcctgatgcccctgagagagaagaaggccacccagatggtggccatcgtgctgggcgccttcatcgtgtgctggctgcccttcttcctgacccacgtgctgaacacccactgccagacctgccacgtgagccccgagctgtacagcgccaccacctggctgggctacgtgaacagcgccctgaaccccgtgatctacaccaccttcaacatcgagttcagaaaggccttcctgaagatcctgagctgctag

SEQ ID NO: 79601 - DNA, 1203 bp, synthetic construct
  misc_feature 1..1203: note = Description of Artificial Sequence: Synthetic coding sequence
  source 1..1203: mol_type = other DNA
atggccagcctgagccagctgagcggccacctgaactacacctgcggcgccgagaacagcaccggcgccagccaggccagaccccacgcctactacgccctgagctactgcgccctgatcctggccatcgtgttcggcaacggcctggtgtgcatggccgtgctgaaggagagagccctgcagaccaccaccaactacctggtggtgagcctggccgtggccgacctgctggtggccaccctggtgatgccctgggtggtgtacctggaggtgaccggcggcgtgtggaacttcagcagaatctgctgcgacgtgttcgtgaccctggacgtgatgatgtgcaccgccagcatcctgaacctgtgcgccatcagcatcgacagatacaccgccgtggtgatgcccgtgcactaccagcacggcaccggccagagcagctgcagaagagtggccctgatgatcaccgccgtgtgggtgctggccttcgccgtgagctgccccctgctgttcggcttcaacaccaccggcgaccccaccgtgtgcagcatcagcaaccccgacttcgtgatctacagcagcgtggtgagcttctacctgcccttcggcgtgaccgtgctggtgtacgccagaatctacgtggtgctgaagcagagaagaagaaagagaatcctgaccagacagaacagccagtgcaacagcgtgagacccggcttcccccagcagaccctgagccccgaccccgcccacctggagctgaagagatactacagcatctgccaggacaccgccctgggcggccccggcttccaggagagaggcggcgagctgaagagagaggagaagaccagaaacagcctgagccccaccatcgcccccaagctgagcctggaggtgagaaagctgagcaacggcagactgagcaccagcctgaagctgggccccctgcagcccagaggcgtgcccctgagagagaagaaggccacccagatggtggccatcgtgctgggcgccttcatcgtgtgctggctgcccttcttcctgacccacgtgctgaacacccactgccagacctgccacgtgagccccgagctgtacagcgccaccacctggctgggctacgtgaacagcgccctgaaccccgtgatctacaccaccttcaacatcgagttcagaaaggccttcctgaagatcctgagctgctag

SEQ ID NO: 79602 - DNA, 1203 bp, synthetic construct; identical to SEQ ID NO: 79601
  misc_feature 1..1203: note = Description of Artificial Sequence: Synthetic coding sequence
  source 1..1203: mol_type = other DNA

SEQ ID NO: 79603 - DNA, 1203 bp, synthetic construct; identical to SEQ ID NO: 79601
  misc_feature 1..1203: note = Description of Artificial Sequence: Synthetic coding sequence
  source 1..1203: mol_type = other DNA

SEQ ID NO: 79604 - DNA, 1260 bp, synthetic construct
  misc_feature 1..1260: note = Description of Artificial Sequence: Synthetic coding sequence
  source 1..1260: mol_type = other DNA
atgggcaacagaagcaccgccgacgccgacggcctgctggccggcagaggccccgccgccggcgccagcgccggcgccagcgccggcctggccggccagggcgccgccgccctggtgggcggcgtgctgctgatcggcgccgtgctggccggcaacagcctggtgtgcgtgagcgtggccaccgagagagccctgcagacccccaccaacagcttcatcgtgagcctggccgccgccgacctgctgctggccctgctggtgctgcccctgttcgtgtacagcgaggtgcagggcggcgcctggctgctgagccccagactgtgcgacgccctgatggccatggacgtgatgctgtgcaccgccagcatcttcaacctgtgcgccatcagcgtggacagattcgtggccgtggccgtgcccctgagatacaacagacagggcggcagcagaagacagctgctgctgatcggcgccacctggctgctgagcgccgccgtggccgcccccgtgctgtgcggcctgaacgacgtgagaggcagagaccccgccgtgtgcagactggaggacagagactacgtggtgtacagcagcgtgtgcagcttcttcctgccctgccccctgatgctgctgctgtactgggccaccttcagaggcctgcagagatgggaggtggccagaagagccaagctgcacggcagagcccccagaagacccagcggccccggcccccccagccccaccccccccgcccccagactgccccaggacccctgcggccccgactgcgccccccccgcccccggcctgcccagaggcccctgcggccccgactgcgcccccgccgcccccagcctgccccaggacccctgcggccccgactgcgccccccccgcccccggcctgccccccgacccctgcggcagcaactgcgccccccccgacgccgtgagagccgccgccctgcccccccagacccccccccagaccagaagaagaagaagagccaagatcaccggcagagagagaaaggccatgagagtgctgcccgtggtggtgggcgccttcctgctgtgctggacccccttcttcgtggtgcacatcacccaggccctgtgccccgcctgcagcgtgccccccagactggtgagcgccgtgacctggctgggctacgtgaacagcgccctgaaccccgtgatctacaccgtgttcaacgccgagttcagaaacgtgttcagaaaggccctgagagcctgctgctag

SEQ ID NO: 79605 - DNA, 1434 bp, synthetic construct
  misc_feature 1..1434: note = Description of Artificial Sequence: Synthetic coding sequence
  source 1..1434: mol_type = other DNA
atgctgccccccggcagcaacggcaccgcctaccccggccagttcgccctgtaccagcagctggcccagggcaacgccgtgggcggcagcgccggcgccccccccctgggccccagccaggtggtgaccgcctgcctgctgaccctgctgatcatctggaccctgctgggcaacgtgctggtgtgcgccgccatcgtgagaagcagacacctgagagccaacatgaccaacgtgttcatcgtgagcctggccgtgagcgacctgttcgtggccctgctggtgatgccctggaaggccgtggccgaggtggccggctactggcccttcggcgccttctgcgacgtgtgggtggccttcgacatcatgtgcagcaccgccagcatcctgaacctgtgcgtgatcagcgtggacagatactgggccatcagcagacccttcagatacaagagaaagatgacccagagaatggccctggtgatggtgggcctggcctggaccctgagcatcctgatcagcttcatccccgtgcagctgaactggcacagagaccaggccgccagctggggcggcctggacctgcccaacaacctggccaactggaccccctgggaggaggacttctgggagcccgacgtgaacgccgagaactgcgacagcagcctgaacagaacctacgccatcagcagcagcctgatcagcttctacatccccgtggccatcatgatcgtgacctacaccagaatctacagaatcgcccaggtgcagatcagaagaatcagcagcctggagagagccgccgagcacgcccagagctgcagaagcagcgccgcctgcgcccccgacaccagcctgagagccagcatcaagaaggagaccaaggtgctgaagaccctgagcgtgatcatgggcgtgttcgtgtgctgctggctgcccttcttcatcctgaactgcatggtgcccttctgcagcggccaccccgagggcccccccgccggcttcccctgcgtgagcgagaccaccttcgacgtgttcgtgtggttcggctgggccaacagcagcctgaaccccgtgatctacgccttcaacgccgacttccagaaggtgttcgcccagctgctgggctgcagccacttctgcagcagaacccccgtggagaccgtgaacatcagcaacgagctgatcagctacaaccaggacatcgtgttccacaaggagatcgccgccgcctacatccacatgatgcccaacgccgtgacccccggcaacagagaggtggacaacgacgaggaggagggccccttcgacagaatgttccagatctaccagaccagccccgacggcgaccccgtggccgagagcgtgtgggagctggactgcgagggcgagatcagcctggacaagatcacccccttcacccccaacggcttccactag

SEQ ID NO: 79606 - DNA, 438 bp, synthetic construct
  misc_feature 1..438: note = Description of Artificial Sequence: Synthetic coding sequence
  source 1..438: mol_type = other DNA
atggaccccgaggagcaggagctgctgaacgactacagatacagaagctacagcagcgtgatcgagaaggccctgagaaacttcgagagcagcagcgagtgggccgacctgatcagcagcctgggcaagctgaacaaggccctgcagagcaacctgagatacagcctgctgcccagaagactgctgatcagcaagagactggcccagtgcctgcaccccgccctgcccagcggcgtgcacctgaaggccctggagacctacgagatcatcttcaagatcgtgggcaccaagtggctggccaaggacctgttcctgtacagctgcggcctgttccccctgctggcccacgccgccgtgagcgtgagacccgtgctgctgaccctgtacgagaagtacttcctgcccctgcagaagctgctgctgcccagcctgcagtag

SEQ ID NO: 79607 - DNA, 6897 bp, synthetic construct
  misc_feature 1..6897: note = Description of Artificial Sequence: Synthetic coding sequence
  source 1..6897: mol_type = other DNA
atggaccccgaggagcaggagctgctgaacgactacagatacagaagctacagcagcgtgatcgagaaggccctgagaaacttcgagagcagcagcgagtgggccgacctgatcagcagcctgggcaagctgaacaaggccctgcagagcaacctgagatacagcctgctgcccagaagactgctgatcagcaagagactggcccagtgcctgcaccccgccctgcccagcggcgtgcacctgaaggccctggagacctacgagatcatcttcaagatcgtgggcaccaagtggctggccaaggacctgttcctgtacagctgcggcctgttccccctgctggcccacgccgccgtgagcgtgagacccgtgctgctgaccctgtacgagaagtacttcctgcccctgcagaagctgctgctgcccagcctgcaggccttcatcgtgggcctgctgcccggcctggaggagggcagcgagatcagcgacagaaccgacgccctgctgctgagactgagcctggtggtgggcaaggaggtgttctacaccgccctgtggggcagcgtgctggccagccccagcatcagactgcccgccagcgtgttcgtggtgggccacatcaacagagacgcccccggcagagagcagaagtacatgctgggcaccaaccaccagctgaccgtgaagagcctgagagccagcctgctggacagcaacgtgctggtgcagagaaacaacctggagatcgtgctgttcttcttccccttctacacctgcctggacagcaacgagagagccatccccctgctgagaagcgacatcgtgagaatcctgagcgccgccacccagaccctgctgagaagagacatgagcctgaacagaagactgtacgcctggctgctgggcagcgacatcaagggcaacaccgtggtgcccgagagcgagatcagcaacagctacgaggaccagagcagctacttcttcgagaagtacagcaaggacctgctggtggagggcctggccgagatcctgcaccagaagttcatcgacgccgacgtggaggagagacaccacgcctacctgaagcccttcagagtgctgatcagcctgctggacaagcccgagatcggcccccaggtggtgggcaacctgttcctggaggtgatcagagccttctacagctactgcagagacgccctgggcagcgacctgaagctgagctacacccagagcggcaacagcctgatcagcgccatcaaggagaacagaaacgccagcgagatcgtgaagaccgtgaacctgctgatcaccagcctgagcaccgacttcctgtgggactacatgaccagatgcttcgaggagtgcttcagacccgtgaagcagagatacagcgtgagaaacagcgtgagccccccccccaccgtgagcgagctgtgcgccctgctggtgttcctgctggacgtgatccccctggagctgtacagcgaggtgcagacccagtacctgccccaggtgctgggctgcctggtgcagcccctggccgaggacatggaggccctgagcctgcccgagctgacccacgccctgaagacctgcttcaaggtgctgagcaaggtgcagatgccccccagctacctggacaccgagagcaccagcggcaccagcagccccgtgaagggcgagaacggcaagatcatcctggagaccaaggccgtgatccccggcgacgaggacgccagcttcccccccctgaagagcgaggacagcggcatcggcctgagcgccagcagccccgagctgagcgagcacctgagagtgcccagagtgagcctggagagagacgacgtgtggaagaagggcggcagcatgcagagaaccttcctgtgcatccaggagctgatcgccaacttcgccagcaagaacatcttcggcgtgcagctgaccgccagcggcgaggagagcaagagcgaggagcccgccggcaagagagacagagacggcacccagagcctggccgccaacgacagcagcagaaagaacagctgggagcccaagcccatcaccgtgccccagttcaagcagatgctgagcgacctgttcaccgccagaggcagccccttcaagaccaagagcagcgagagccccagcagcagccccagcagccccgccagaaagaacggcggcgagtgggacgtggagaaggtggtgatcgacctgggcggcagcagagaggagagaagagaggccttcgccgccgcctgccacctgctgctggactgcgccaccttccccgtgtacctgagcgaggaggagaccgagcagctgtgcgccaccctgttccagctgcccggcgccggcgacagcagcttccccagctggctgaagagcctgatgaccatctgctgctgcgtgaccgactgctacctgcagaacgtggccatcagcaccctgctggaggtgatcaaccacagccagagcctggccctggtgatcgaggacaagatgaagagatacaagagcagcggccacaaccccttcttcggcaagctgcagatggtgaccgtgccccccatcgcccccggcatcctgaaggtgatcgccgagaagaccgacttctaccagagagtggccagagtgctgtggaaccagctgaacaaggagaccagagagcaccacgtgacctgcgtggagctgttctacagactgcactgcctggcccccaccgccaacatctgcgaggacatcatctgccacgccctgctggaccccgacaagggcaccagactggaggccctgttcagattcagcgtgatctggcacctgaccagagagatccagggcagcagagtgaccagccacaacagaagcttcgacagaagcctgttcgtggtgctggacagcctggcctgcaccgacggcgccatcggcgccgccgcccagggctggctggtgagagccctgagcctgggcgacgtggccagaatcctggagcccgtgctgctgctgctgctgcagcccaagacccagagaaccagcatccactgcctgaagcaggagaacagcgccgacgacctgcacagatggttcaacagaaagaagaccagcttcagagaggcctgcgccgtgcccgagccccaggagagcggcagcgaggagcacctgcccctgagccagttcaccaccgtggacagagaggccatctgggccgaggtggagaaggagcccgagaagtaccccctgagaggcgagctgagcgaggaggagctgccctactacgtggagctgcccgacagaaccgcccacggcgcccccgacagcagcgagcacaccgagagcgccgacaccagcagctgccacaccgacagcgagaacaccagcagcttcagcagccccagccacgacctgcaggagctgagcaacgaggagaactgctgcgcccccatccccatgggcggcagagcctaccccaagagaagcgccctgctggccgccttccagagcgagagcttcaaggccggcgccaagctgagcctggtgagagtggacagcgacaagacccaggccagcgagagcttcagcagcgacgaggaggccgacctggagctgcaggccctgaccaccagcagactgctgaagcagcagagagagagacaggaggccgtggaggccctgttcaagcacatcctgctgtacctgcagccctacgacagcagaagagtgctgtacgccttcagcgtgctggaggccgtgctgaagaccaaccccaaggagttcatcgaggccgtgagcagaaccagcatggacaccagcagcaccgcccacctgaacctgatcagcaacctgctggccagacaccaggaggccctgatcggccagagcttctacggcaagctgcagacccaggtgcccaacgtgtgcccccacagcctgctgctggagctgctgacctacctgtgcctgagcttcctgagaagctactacccctgctacctgaaggtgagccacagagacatcctgggcaacagagacgtgcaggtgaagagcgtggaggtgctgatcagaatcatgatgcagctggtgagcgtggccaagagcagcgagggcaagaacgtggagttcatccacagcctgctgcagagatgcaaggtgcaggagttcgtgctgctgagcctgagcgccagcatgtacaccagccagaagagatacggcctggccaccgcccaccacggcagagccctgcccgaggacagcctgttcgaggagagcctgatcaacctgggccaggaccagatctggagcgagcaccccctgcagatcgagctgctgaagctgctgcaggtgctgatcgtgctggagcaccacctgggcagagcccacgaggaggccgagaaccagcccgacctgagcagagagtggcagagagccctgaacttccagcaggccatcagcgccctgcagtacgtgcagccccaccccctgaccagccagggcctgctggtgagcgccgtggtgagaggcctgcagcccgcctacggctacggcatgcaccccgcctgggtgagcctggtgacccacagcctgccctacttcggcaagagcctgggctggaccgtgacccccttcgtggtgcagatctgcaagaacctggacgacctggtgaagcagtacgagagcgagagcgtgaagctgagcgtgagcaccaccagcaagagagagaacatcagccccgactaccccctgaccctgctggagggcctgaccaccatcagccacttctgcctgctggagcaggccaaccagaacaagaagaccatggccgccggcgaccccgccaacctgagaaacgccagaaacgccatcctggaggagctgcccagaaccgtgaacaccatggccctgctgtggaacgtgctgagaaaggaggagacccagaagagacccgtggacctgctgggcgccaccaagggcagcagcagcgtgtacttcaagaccaccaagaccatcagacagaagatcctggacttcctgaaccccctgaccgcccacctgggcgtgcagctgaccgccgccgtggccgccgtgtggagcagaaagaaggcccagagacacagcaagatgaagatcatccccaccgccagcgccagccagctgaccctggtggacctggtgtgcgccctgagcaccctgcagaccgacaccctgctgcacctggtgaaggaggtggtgaagagacccccccaggtgaagggcggcgacgagaagagccccctggtggacatccccgtgctgcagttctgctacgccttcctgcagagactgcccgtgcccgccctgcaggagaacttcagcagcctgctgggcgtgctgaaggagagcgtgcagctgaacctggccccccccggctacttcctgctgctgagcatgctgaacgacttcgtgaccagaacccccaacctggagaacaagaaggaccagaaggacctgcaggagatcacccagaagatcctggaggccgtgggcaacatcgccggcagcagcctggagcagaccagctggctgagcagaaacctggaggtgaaggcccagccccaggccagcctggaggagagcgacgccgaggaggacctgtacgacgccgccgccgccagcgccatggtgagcagcagcgcccccagcgtgtacagcgtgcaggccctgagcctgctggccgaggtgctggccagcctgctggacatggtgtacagaagcgacgagaaggagaaggccgtgcccctgatcagcagactgctgtactacgtgttcccctacctgagaaaccacagcgcctacaacgcccccagcttcagagccggcgcccagctgctgagcagcctgagcggctacgcctacaccaagagagcctggagaaaggaggtgctggagctgttcctggaccccgccttcttccagatggacaccagctgcgtgcactggaagagcatcatcgaccacctgctgacccacgagaagaccatgttcaaggacctgatgaacatgcagagcagcagcctgaagctgttcagcagcttcgagcagaaggccatgctgctgaagagacaggccttcgccgtgttcagcggcgagctggaccagtaccacctgtacctgcccctgatccaggagagactgaccgacaacctgagagtgggccagaccagcatcgtggccgcccagatgttcctgttcttcagagtgctgctgctgagaatcagcccccagcacctgaccagcctgtggcccatcatggtgagcgagctgatccagaccttcacccagctggaggaggacctgaaggacgaggacgagagcctgagaagcaccaacaaggtgaacagaaccaaggtgagcgtgcccgacgccaacggccccagcgtgggcgagatcccccagagcgagctgatcctgtacctgagcgcctgcaagttcctggacaccgccctgagcttcccccccgacaagatgcccctgttccagatctacagatgggccttcatccccgaggtggacaccgagggccccgccttcctgagcgacgtggaggagaaccaccaggagtgcaagccccacaccgtgagaatcctggagctgctgaagctgaagttcggcgagatcagcagcagcgacgagatcaccatgaagagcgagttccccctgctgagacagcacagcgtgagcagcatcagacagctgatgcccttcttcatgaccctgaacggcgccttcaagacccagagacagctgcccgccgacagccccggcacccccttcctggacttccccgtgaccgacagccccagaatcctgaagcagctggaggagtgcatcgagtacgacttcctggagcaccccgagtgctag

SEQ ID NO: 79608 - DNA, 792 bp, synthetic construct
  misc_feature 1..792: note = Description of Artificial Sequence: Synthetic coding sequence
  source 1..792: mol_type = other DNA
atgttctacttccactgccccccccagctggagggcaccgccaccttcggcaaccacagcagcggcgacttcgacgacggcttcctgagaagaaagcagagaagaaacagaaccaccttcaccctgcagcagctggaggccctggaggccgtgttcgcccagacccactaccccgacgtgttcaccagagaggagctggccatgaagatcaacctgaccgaggccagagtgcaggtgtggttccagaacagaagagccaagtggagaaagaccgagagaggcgccagcgaccaggagcccggcgccaaggagcccatggccgaggtgacccccccccccgtgagaaacatcaacagccccccccccggcgaccaggccagaagcaagaaggaggccctggaggcccagcagagcctgggcagaaccgtgggccccgccggccccttcttccccagctgcctgcccggcaccctgctgaacaccgccacctacgcccaggccctgagccacgtggccagcctgaagggcggccccctgtgcagctgctgcgtgcccgaccccatgggcctgagcttcctgcccacctacggctgccagagcaacagaaccgccagcgtggccaccctgagaatgaaggccagagagcacagcgaggccgtgctgcagagcgccaacctgctgcccagcaccagcagcagccccggccccgtggccaagcccgccccccccgacggcagccaggagaagaccagccccaccaaggagcagagcgaggccgagaagagcgtgtag

SEQ ID NO: 79609 - DNA, 807 bp, synthetic construct
  misc_feature 1..807: note = Description of Artificial Sequence: Synthetic coding sequence
  source 1..807: mol_type = other DNA
atggtgctgatgagctgcgaccagagactgatcagcctgctgctggtgggcaccgccaccttcggcaaccacagcagcggcgacttcgacgacggcttcctgagaagaaagcagagaagaaacagaaccaccttcaccctgcagcagctggaggccctggaggccgtgttcgcccagacccactaccccgacgtgttcaccagagaggagctggccatgaagatcaacctgaccgaggccagagtgcaggtgtggttccagaacagaagagccaagtggagaaagaccgagagaggcgccagcgaccaggagcccggcgccaaggagcccatggccgaggtgacccccccccccgtgagaaacatcaacagccccccccccggcgaccaggccagaagcaagaaggaggccctggaggcccagcagagcctgggcagaaccgtgggccccgccggccccttcttccccagctgcctgcccggcaccctgctgaacaccgccacctacgcccaggccctgagccacgtggccagcctgaagggcggccccctgtgcagctgctgcgtgcccgaccccatgggcctgagcttcctgcccacctacggctgccagagcaacagaaccgccagcgtggccaccctgagaatgaaggccagagagcacagcgaggccgtgctgcagagcgccaacctgctgcccagcaccagcagcagccccggccccgtggccaagcccgccccccccgacggcagccaggagaagaccagccccaccaaggagcagagcgaggccgagaagagcgtgtag

SEQ ID NO: 79610 - DNA, 384 bp, synthetic construct
  misc_feature 1..384: note = Description of Artificial Sequence: Synthetic coding sequence
  source 1..384: mol_type = other DNA
atgaagctgaacgtggacggcctgctggtgtacttcccctacgactacatctaccccgagcagttcagctacatgagagagctgaagagaaccctggacgccaagggccacggcgtgctggagatgcccagcggcaccggcaagaccgtgagcctgctggccctgatcatggcctaccagagagcctaccccctggaggtgaccaagctgatctactgcagcagaaccgtgcccgagatcgagaaggtgatcgaggagctgagaaagctgctgaacttctacgagaagcaggagggcgagaagctgcccttcctgggcctggccctgagcagcagaaagaacctgtgcatccaccccgagaccaccagcgccagcaccccctag

SEQ ID NO: 79611 - DNA, 4614 bp, synthetic construct
  misc_feature 1..4614: note = Description of Artificial Sequence: Synthetic coding sequence
  source 1..4614: mol_type = other DNA
atgggcgagaagctggagctgagactgaagagccccgtgggcgccgagcccgccgtgtacccctggcccctgcccgtgtacgacaagcaccacgacgccgcccacgagatcatcgagaccatcagatgggtgtgcgaggagatccccgacctgaagctggccatggagaactacgtgctgatcgactacgacaccaagagcttcgagagcatgcagagactgtgcgacaagtacaacagagccatcgacagcatccaccagctgtggaagggcaccacccagcccatgaagctgaacaccagacccagcaccggcctgctgagacacatcctgcagcaggtgtacaaccacagcgtgaccgaccccgagaagctgaacaactacgagcccttcagccccgaggtgtacggcgagaccagcttcgacctggtggcccagatgatcgacgagatcaagatgaccgacgacgacctgttcgtggacctgggcagcggcgtgggccaggtggtgctgcaggtggccgccgccaccaactgcaagcaccactacggcgtggagaaggccgacatccccgccaagtacgccgagaccatggacagagagttcagaaagtggatgaagtggtacggcaagaagcacgccgagtacaccctggagagaggcgacttcctgagcgaggagtggagagagagaatcgccaacaccagcgtgatcttcgtgaacaacttcgccttcggccccgaggtggaccaccagctgaaggagagattcgccaacatgaaggagggcggcagaatcgtgagcagcaagcccttcgcccccctgaacttcagaatcaacagcagaaacctgagcgacatcggcaccatcatgagagtggtggagctgagccccctgaagggcagcgtgagctggaccggcaagcccgtgagctactacctgcacaccatcgacagaaccatcctggagaactacttcagcagcctgaagaaccccaagctgagagaggagcaggaggccgccagaagaagacagcagagagagagcaagagcaacgccgccacccccaccaagggccccgagggcaaggtggccggccccgccgacgcccccatggacagcggcgccgaggaggagaaggccggcgccgccaccgtgaagaagcccagccccagcaaggccagaaagaagaagctgaacaagaagggcagaaagatggccggcagaaagagaggcagacccaagaagatgaacaccgccaaccccgagagaaagcccaagaagaaccagaccgccctggacgccctgcacgcccagaccgtgagccagaccgccgccagcagcccccaggacgcctacagaagcccccacagccccttctaccagctgccccccagcgtgcagagacacagccccaaccccctgctggtggcccccaccccccccgccctgcagaagctgctggagagcttcaagatccagtacctgcagttcctggcctacaccaagaccccccagtacaaggccagcctgcaggagctgctgggccaggagaaggagaagaacgcccagctgctgggcgccgcccagcagctgctgagccactgccaggcccagaaggaggagatcagaagactgttccagcagaagctggacgagctgggcgtgaaggccctgacctacaacgacctgatccaggcccagaaggagatcagcgcccacaaccagcagctgagagagcagagcgagcagctggagcaggacaacagagccctgagaggccagagcctgcagctgctgaaggccagatgcgaggagctgcagctggactgggccaccctgagcctggagaagctgctgaaggagaagcaggccctgaagagccagatcagcgagaagcagagacactgcctggagctgcagatcagcatcgtggagctggagaagagccagagacagcaggagctgctgcagctgaagagctgcgtgccccccgacgacgccctgagcctgcacctgagaggcaagggcgccctgggcagagagctggagcccgacgccagcagactgcacctggagctggactgcaccaagttcagcctgccccacctgagcagcatgagccccgagctgagcatgaacggccaggccgccggctacgagctgtgcggcgtgctgagcagacccagcagcaagcagaacaccccccagtacctggccagccccctggaccaggaggtggtgccctgcacccccagccacgtgggcagacccagactggagaagctgagcggcctggccgcccccgactacaccagactgagccccgccaagatcgtgctgagaagacacctgagccaggaccacaccgtgcccggcagacccgccgccagcgagctgcacagcagagccgagcacaccaaggagaacggcctgccctaccagagccccagcgtgcccggcagcatgaagctgagcccccaggaccccagacccctgagccccggcgccctgcagctggccggcgagaagagcagcgagaagggcctgagagagagagcctacggcagcagcggcgagctgatcaccagcctgcccatcagcatccccctgagcaccgtgcagcccaacaagctgcccgtgagcatccccctggccagcgtggtgctgcccagcagagccgagagagccagaagcacccccagccccgtgctgcagcccagagaccccagcagcaccctggagaagcagatcggcgccaacgcccacggcgccggcagcagaagcctggccctggcccccgccggcttcagctacgccggcagcgtggccatcagcggcgccctggccggcagccccgccagcctgacccccggcgccgagcccgccaccctggacgagagcagcagcagcggcagcctgttcgccaccgtgggcagcagaagcagcaccccccagcaccccctgctgctggcccagcccagaaacagcctgcccgccagccccgcccaccagctgagcagcagccccagactgggcggcgccgcccagggccccctgcccgaggccagcaagggcgacctgcccagcgacagcggcttcagcgaccccgagagcgaggccaagagaagaatcgtgttcaccatcaccaccggcgccggcagcgccaagcagagccccagcagcaagcacagccccctgaccgccagcgccagaggcgactgcgtgcccagccacggccaggacagcagaagaagaggcagaagaaagagagccagcgccggcacccccagcctgagcgccggcgtgagccccaagagaagagccctgcccagcgtggccggcctgttcacccagcccagcggcagccccctgaacctgaacagcatggtgagcaacatcaaccagcccctggagatcaccgccatcagcagccccgagaccagcctgaagagcagccccgtgccctaccaggaccacgaccagccccccgtgctgaagaaggagagacccctgagccagaccaacggcgcccactacagccccctgaccagcgacgaggagcccggcagcgaggacgagcccagcagcgccagaatcgagagaaagatcgccaccatcagcctggagagcaagagcccccccaagaccctggagaacggcggcggcctggccggcagaaagcccgcccccgccggcgagcccgtgaacagcagcaagtggaagagcaccttcagccccatcagcgacatcggcctggccaagagcgccgacagccccctgcaggccagcagcgccctgagccagaacagcctgttcaccttcagacccgccctggaggagcccagcgccgacgccaagctggccgcccaccccagaaagggcttccccggcagcctgagcggcgccgacggcctgagccccggcaccaaccccgccaacggctgcaccttcggcggcggcctggccgccgacctgagcctgcacagcttcagcgacggcgccagcctgccccacaagggccccgaggccgccggcctgagcagccccctgagcttccccagccagagaggcaaggagggcagcgacgccaaccccttcctgagcaagagacagctggacggcctggccggcctgaagggcgagggcagcagaggcaaggaggccggcgagggcggcctgcccctgtgcggccccaccgacaagacccccctgctgagcggcaaggccgccaaggccagagacagagaggtggacctgaagaacggccacaacctgttcatcagcgccgccgccgtgccccccggcagcctgctgagcggccccggcctggcccccgccgccagcagcgccggcggcgccgccagcagcgcccagacccacagaagcttcctgggccccttcccccccggcccccagttcgccctgggccccatgagcctgcaggccaacctgggcagcgtggccggcagcagcgtgctgcagagcctgttcagcagcgtgcccgccgccgccggcctggtgcacgtgagcagcgccgccaccagactgaccaacagccacgccatgggcagcttcagcggcgtggccggcggcaccgtgggcggcaactag

SEQ ID NO: 79612 - DNA, 1203 bp, synthetic construct
  misc_feature 1..1203: note = Description of Artificial Sequence: Synthetic coding sequence
  source 1..1203: mol_type = other DNA
atgagaggcagaagaggcgacagaatgaccatcaacatccaggagcacatggccatcaacgtgtgccccggccccatcagacccatcagacagatcagcgactacttccccagaggccccggccccgagggcggcggcggcggcggcggcgaggcccccgcccacctggtgcccctggccctggccccccccgccgccctgctgggcgccaccacccccgaggacggcgccgaggtggacagctacgacagcgacgacgccaccgccctgggcaccctggagttcgacctgctgtacgacagagccagctgcaccctgcactgcagcatcctgagagccaagggcctgaagcccatggacttcaacggcctggccgacccctacgtgaagctgcacctgctgcccggcgcctgcaaggccaacaagctgaagaccaagacccagagaaacaccctgaaccccgtgtggaacgaggacctgacctacagcggcatcaccgacgacgacatcacccacaaggtgctgagaatcgccgtgtgcgacgaggacaagctgagccacaacgagttcatcggcgagatcagagtgcccctgagaagactgaagcccagccagaagaagcacttcaacatctgcctggagagacaggtgcccctggccagccccagcagcatgagcgccgccctgagaggcatcagctgctacctgaaggagctggagcaggccgagcagggccagggcctgctggaggagagaggcagaatcctgctgagcctgagctacagcagcagaagaagaggcctgctggtgggcatcctgagatgcgcccacctggccgccatggacgtgaacggctacagcgacccctacgtgaagacctacctgagacccgacgtggacaagaagagcaagcacaagacctgcgtgaagaagaagaccctgaaccccgagttcaacgaggagttcttctacgagatcgagctgagcaccctggccaccaagaccctggaggtgaccgtgtgggactacgacatcggcaagagcaacgacttcatcggcggcgtgagcctgggccccggcgccagaggcgaggccagaaagcactggagcgactgcctgcagcagcccgacgccgccctggagagatggcacaccctgaccagcgagctgccccccgccgccggcgccctgagcagcgcctag

SEQ ID NO: 79613 - DNA, 927 bp, synthetic construct
  misc_feature 1..927: note = Description of Artificial Sequence: Synthetic coding sequence
  source 1..927: mol_type = other DNA
atgaccctgagaagaagaggcgagaaggccaccatcagcatccaggagcacatggccatcgacgtgtgccccggccccatcagacccatcaagcagatcagcgactacttccccagattccccagaggcctgccccccgacgccggccccagagccgccgccccccccgacgcccccgccagacccgccgtggccggcgccggcagaagaagccccagcgacggcgccagagaggacgacgaggacgtggaccagctgttcggcgcctacggcagcagccccggccccagccccggccccagccccgccagaccccccgccaagccccccgaggacgagcccgacgccgacggctacgagagcgacgactgcaccgccctgggcaccctggacttcagcctgctgtacgaccaggagaacaacgccctgcactgcaccatcaccaaggccaagggcctgaagcccatggaccacaacggcctggccgacccctacgtgaagctgcacctgctgcccggcgccagcaaggccaacaagctgagaaccaagaccctgagaaacaccctgaaccccacctggaacgagaccctgacctactacggcatcaccgacgaggacatgatcagaaagaccctgagaatcagcgtgtgcgacgaggacaagttcagacacaacgagttcatcggcgagaccagagtgcccctgaagaagctgaagcccaaccacaccaagaccttcagcatctgcctggagaagcagctgcccgtggacaagaccgaggacaagagcctggaggagagaggcagaatcctgatcagcctgaagtacagcagccagaagcagggcctgctggtgggcatcgtgagatgcgcccacctggccgccatggacgccaacggctacagcgacccctacgtgaagacctag

SEQ ID NO: 79614 - DNA, 927 bp, synthetic construct; identical to SEQ ID NO: 79613
  misc_feature 1..927: note = Description of Artificial Sequence: Synthetic coding sequence
  source 1..927: mol_type = other DNA

SEQ ID NO: 79615 - DNA, 1275 bp, synthetic construct
  misc_feature 1..1275: note = Description of Artificial Sequence: Synthetic coding sequence
  source 1..1275: mol_type = other DNA
atggccctgcccacccccagcgacagcaccctgcccgccgaggccagaggcagaggcagaagaagaagactggtgtggacccccagccagagcgaggccctgagagcctgcttcgagagaaacccctaccccggcatcgccaccagagagagactggcccaggccatcggcatccccgagcccagagtgcagatctggttccagaacgagagaagcagacagctgagacagcacagaagagagagcagaccctggcccggcagaagaggcccccccgagggcagaagaaagagaaccgccgtgaccggcagccagaccgccctgctgctgagagccttcgagaaggacagattccccggcatcgccgccagagaggagctggccagagagaccggcctgcccgagagcagaatccagatctggttccagaacagaagagccagacaccccggccagggcggcagagcccccgcccaggccggcggcctgtgcagcgccgcccccggcggcggccaccccgcccccagctgggtggccttcgcccacaccggcgcctggggcaccggcctgcccgccccccacgtgccctgcgcccccggcgccctgccccagggcgccttcgtgagccaggccgccagagccgcccccgccctgcagcccagccaggccgcccccgccgagggcgtgagccagcccgcccccgccagaggcgacttcgcctacgccgcccccgccccccccgacggcgccctgagccacccccaggcccccagatggcccccccaccccggcaagagcagagaggacagagacccccagagagacggcctgcccggcccctgcgccgtggcccagcccggccccgcccaggccggcccccagggccagggcgtgctggccccccccaccagccagggcagcccctggtggggctggggcagaggcccccaggtggccggcgccgcctgggagccccaggccggcgccgccccccccccccagcccgccccccccgacgccagcgccagcgccagacagggccagatgcagggcatccccgcccccagccaggccctgcaggagcccgccccctggagcgccctgccctgcggcctgctgctggacgagctgctggccagccccgagttcctgcagcaggcccagcccctgctggagaccgaggcccccggcgagctggaggccagcgaggaggccgccagcctggaggcccccctgagcgaggaggagtacagagccctgctggaggagctgtag

SEQ ID NO: 79616 - DNA, 1458 bp, synthetic construct
  misc_feature 1..1458: note = Description of Artificial Sequence: Synthetic coding sequence
  source 1..1458: mol_type = other DNA
atgaagggctggagcctgcccgcctgcggccccctgcagggcagactggccggctggctggccgtgagagccggcctgctggccgcccccgccgccgtgcacagccccgccgaggtgcacggcagcccccccgccagcctgtgccccagacccagcgtgaagttcagacccggcctgaccgccatggccctgcccacccccagcgacagcaccctgcccgccgaggccagaggcagaggcagaagaagaagactggtgtggacccccagccagagcgaggccctgagagcctgcttcgagagaaacccctaccccggcatcgccaccagagagagactggcccaggccatcggcatccccgagcccagagtgcagatctggttccagaacgagagaagcagacagctgagacagcacagaagagagagcagaccctggcccggcagaagaggcccccccgagggcagaagaaagagaaccgccgtgaccggcagccagaccgccctgctgctgagagccttcgagaaggacagattccccggcatcgccgccagagaggagctggccagagagaccggcctgcccgagagcagaatccagatctggttccagaacagaagagccagacaccccggccagggcggcagagcccccgcccaggccggcggcctgtgcagcgccgcccccggcggcggccaccccgcccccagctgggtggccttcgcccacaccggcgcctggggcaccggcctgcccgccccccacgtgccctgcgcccccggcgccctgccccagggcgccttcgtgagccaggccgccagagccgcccccgccctgcagcccagccaggccgcccccgccgagggcgtgagccagcccgcccccgccagaggcgacttcgcctacgccgcccccgccccccccgacggcgccctgagccacccccaggcccccagatggcccccccaccccggcaagagcagagaggacagagacccccagagagacggcctgcccggcccctgcgccgtggcccagcccggccccgcccaggccggcccccagggccagggcgtgctggccccccccaccagccagggcagcccctggtggggctggggcagaggcccccaggtggccggcgccgcctgggagccccaggccggcgccgccccccccccccagcccgccccccccgacgccagcgccagcgccagacagggccagatgcagggcatccccgcccccagccaggccctgcaggagcccgccccctggagcgccctgccctgcggcctgctgctggacgagctgctggccagccccgagttcctgcagcaggcccagcccctgctggagaccgaggcccccggcgagctggaggccagcgaggaggccgccagcctggaggcccccctgagcgaggaggagtacagagccctgctggaggagctgtag

SEQ ID NO: 79617 - DNA, 1326 bp, synthetic construct
  misc_feature 1..1326: note = Description of Artificial Sequence: Synthetic coding sequence
  source 1..1326: mol_type = other DNA
atgaagaccctgcccctgcacagccactgcaccgagatgcagagactgctgcccaagctggagatgctgaccctgggcagcagcttctgcagcctgcagggcgagttctgccaggccatggacagcttcaccaccgtgagccacgtgggcatgtgcgaggagaccgacgccagcttcaacgtgttcagccccaagttccagttcgacagaagccactgccagagcctgagattccaccagaacatggagctggacttcggccacttcgacgagagagacaagaccagcagaaacatgagaggcagcagaatgaacggcctgcccagccccacccacagcgcccactgcagcttctacagaaccagaaccctgcaggccctgagcaacgagaagaaggccaagaaggtgagattctacagaaacggcgacagatacttcaagggcatcgtgtacgccgtgagcagcgacagattcagaagcttcgacgccctgctggccgacctgaccagaagcctgagcgacaacatcaacctgccccagggcgtgagatacatctacaccatcgacggcagcagaaagatcggcagcatggacgagctggaggagggcgagagctacgtgtgcagcagcgacaacttcttcaagaaggtggagtacaccaagaacgtgaaccccaactggagcgtgaacgtgaagaccagcgccaacatgaaggccccccagagcctggccagcagcaacagcgcccaggccagagagaacaaggacttcgtgagacccaagctggtgaccatcatcagaagcggcgtgaagcccagaaaggccgtgagagtgctgctgaacaagaagaccgcccacagcttcgagcaggtgctgaccgacatcaccgaggccatcaagctggagaccggcgtggtgaagaagctgtacaccctggacggcaagcaggtgacctgcctgcacgacttcttcggcgacgacgacgtgttcatcgcctgcggccccgagaagttcagatacgcccaggacgacttcagcctggacgagaacgagtgcagagtgatgaagggcaaccccagcgccaccgccggccccaaggccagccccaccccccagaagaccagcgccaagagccccggccccatgagaagaagcaagagccccgccgacagcgccaacggcaccagcagcagccagctgagcacccccaagagcaagcagagccccatcagcacccccaccagccccggcagcctgagaaagcacaaggacctgtacctgcccctgagcctggacgacagcgacagcctgggcgacagcatgtag

SEQ ID NO: 79618 - DNA, 1098 bp, synthetic construct
  misc_feature 1..1098: note = Description of Artificial Sequence: Synthetic coding sequence
  source 1..1098: mol_type = other DNA
atggagctggacttcggccacttcgacgagagagacaagaccagcagaaacatgagaggcagcagaatgaacggcctgcccagccccacccacagcgcccactgcagcttctacagaaccagaaccctgcaggccctgagcaacgagaagaaggccaagaaggtgagattctacagaaacggcgacagatacttcaagggcatcgtgtacgccgtgagcagcgacagattcagaagcttcgacgccctgctggccgacctgaccagaagcctgagcgacaacatcaacctgccccagggcgtgagatacatctacaccatcgacggcagcagaaagatcggcagcatggacgagctggaggagggcgagagctacgtgtgcagcagcgacaacttcttcaagaaggtggagtacaccaagaacgtgaaccccaactggagcgtgaacgtgaagaccagcgccaacatgaaggccccccagagcctggccagcagcaacagcgcccaggccagagagaacaaggacttcgtgagacccaagctggtgaccatcatcagaagcggcgtgaagcccagaaaggccgtgagagtgctgctgaacaagaagaccgcccacagcttcgagcaggtgctgaccgacatcaccgaggccatcaagctggagaccggcgtggtgaagaagctgtacaccctggacggcaagcaggtgacctgcctgcacgacttcttcggcgacgacgacgtgttcatcgcctgcggccccgagaagttcagatacgcccaggacgacttcagcctggacgagaacgagtgcagagtgatgaagggcaaccccagcgccaccgccggccccaaggccagccccaccccccagaagaccagcgccaagagccccggccccatgagaagaagcaagagccccgccgacagcggcaacgaccaggacgccaacggcaccagcagcagccagctgagcacccccaagagcaagcagagccccatcagcacccccaccagccccggcagcctgagaaagcacaaggacctgtacctgcccctgagcctggacgacagcgacagcctgggcgacagcatgtag

SEQ ID NO: 79619 - DNA, 1098 bp, synthetic construct; identical to SEQ ID NO: 79618
  misc_feature 1..1098: note = Description of Artificial Sequence: Synthetic coding sequence
  source 1..1098: mol_type = other DNA

SEQ ID NO: 79620 - DNA, 1317 bp, synthetic construct
  misc_feature 1..1317: note = Description of Artificial Sequence: Synthetic coding sequence
  source 1..1317: mol_type = other DNA
tgatgcaccgagatgcagagactgctgcccaagctggagatgctgaccctgggcagcagcttctgcagcctgcagggcgagttctgccaggccatggacagcttcaccaccgtgagccacgtgggcatgtgcgaggagaccgacgccagcttcaacgtgttcagccccaagttccagttcgacagaagccactgccagagcctgagattccaccagaacatggagctggacttcggccacttcgacgagagagacaagaccagcagaaacatgagaggcagcagaatgaacggcctgcccagccccacccacagcgcccactgcagcttctacagaaccagaaccctgcaggccctgagcaacgagaagaaggccaagaaggtgagattctacagaaacggcgacagatacttcaagggcatcgtgtacgccgtgagcagcgacagattcagaagcttcgacgccctgctggccgacctgaccagaagcctgagcgacaacatcaacctgccccagggcgtgagatacatctacaccatcgacggcagcagaaagatcggcagcatggacgagctggaggagggcgagagctacgtgtgcagcagcgacaacttcttcaagaaggtggagtacaccaagaacgtgaaccccaactggagcgtgaacgtgaagaccagcgccaacatgaaggccccccagagcctggccagcagcaacagcgcccaggccagagagaacaaggacttcgtgagacccaagctggtgaccatcatcagaagcggcgtgaagcccagaaaggccgtgagagtgctgctgaacaagaagaccgcccacagcttcgagcaggtgctgaccgacatcaccgaggccatcaagctggagaccggcgtggtgaagaagctgtacaccctggacggcaagcaggtgacctgcctgcacgacttcttcggcgacgacgacgtgttcatcgcctgcggccccgagaagttcagatacgcccaggacgacttcagcctggacgagaacgagtgcagagtgatgaagggcaaccccagcgccaccgccggccccaaggccagccccaccccccagaagaccagcgccaagagccccggccccatgagaagaagcaagagccccgccgacagcggcaacgaccaggacgccaacggcaccagcagcagccagctgagcacccccaagagcaagcagagccccatcagcacccccaccagccccggcagcctgagaaagcacaaggacctgtacctgcccctgagcctggacgacagcgacagcctgggcgacagcatgtag

SEQ ID NO: 79621 - DNA, 1083 bp, synthetic construct
  misc_feature 1..1083: note = Description of Artificial Sequence: Synthetic coding sequence
  source 1..1083: mol_type = other DNA
atggagctggacttcggccacttcgacgagagagacaagaccagcagaaacatgagaggcagcagaatgaacggcctgcccagccccacccacagcgcccactgcagcttctacagaaccagaaccctgcaggccctgagcaacgagaagaaggccaagaaggtgagattctacagaaacggcgacagatacttcaagggcatcgtgtacgccgtgagcagcgacagattcagaagcttcgacgccctgctggccgacctgaccagaagcctgagcgacaacatcaacctgccccagggcgtgagatacatctacaccatcgacggcagcagaaagatcggcagcatggacgagctggaggagggcgagagctacgtgtgcagcagcgacaacttcttcaagaaggtggagtacaccaagaacgtgaaccccaactggagcgtgaacgtgaagaccagcgccaacatgaaggccccccagagcctggccagcagcaacagcgcccaggccagagagaacaaggacttcgtgagacccaagctggtgaccatcatcagaagcggcgtgaagcccagaaaggccgtgagagtgctgctgaacaagaagaccgcccacagcttcgagcaggtgctgaccgacatcaccgaggccatcaagctggagaccggcgtggtgaagaagctgtacaccctggacggcaagcaggtgacctgcctgcacgacttcttcggcgacgacgacgtgttcatcgcctgcggccccgagaagttcagatacgcccaggacgacttcagcctggacgagaacgagtgcagagtgatgaagggcaaccccagcgccaccgccggccccaaggccagccccaccccccagaagaccagcgccaagagccccggccccatgagaagaagcaagagccccgccgacagcgccaacggcaccagcagcagccagctgagcacccccaagagcaagcagagccccatcagcacccccaccagccccggcagcctgagaaagcacaaggacctgtacctgcccctgagcctggacgacagcgacagcctgggcgacagcatgtag

SEQ ID NO: 79622 - DNA, 342 bp, synthetic construct
  misc_feature 1..342: note = Description of Artificial Sequence: Synthetic coding sequence
  source 1..342: mol_type = other DNA
atggagctggacttcggccacttcgacgagagagacaagaccagcagaaacatgagaggcagcagaatgaacggcctgcccagccccacccacagcgcccactgcagcttctacagaaccagaaccctgcaggccctgagcaacgagaagaaggccaagaaggtgagattctacagaaacggcgacagatacttcaagggcatcgtgtacgccgtgagcagcgacagattcagaagcttcgacgccctgctggccgacctgaccagaagcctgagcgacaacatcaacctgccccagggcgtgagatacatctacaccatcgacggcagcagaaagatctag

SEQ ID NO: 79623 - DNA, 1083 bp, synthetic construct; identical to SEQ ID NO: 79621
  misc_feature 1..1083: note = Description of Artificial Sequence: Synthetic coding sequence
  source 1..1083: mol_type = other DNA

SEQ ID NO: 79624 - DNA, 1065 bp, synthetic construct
  misc_feature 1..1065: note = Description of Artificial Sequence: Synthetic coding sequence
  source 1..1065: mol_type = other DNA
atggccaagaccggcgccgaggaccacagagaggccctgagccagagcagcctgagcctgctgaccgaggccatggaggtgctgcagcagagcagccccgagggcaccctggacggcaacaccgtgaaccccatctacaagtacatcctgaacgacctgcccagagagttcatgagcagccaggccaaggccgtgatcaagaccaccgacgactacctgcagagccagttcggccccaacagactggtgcacagcgccgccgtgagcgagggcagcggcctgcaggactgcagcacccaccagaccgccagcgaccacagccacgacgagatcagcgacctggacagctacaagagcaacagcaagaacaacagctgcagcatcagcgccagcaagagaaacagacccgtgagcgcccccgtgggccagctgagagtggccgagttcagcagcctgaagttccagagcgccagaaactggcagaagctgagccagagacacaagctgcagcccagagtgatcaaggtgaccgcctacaagaacggcagcagaaccgtgttcgccagagtgaccgtgcccaccatcaccctgctgctggaggagtgcaccgagaagctgaacctgaacatggccgccagaagagtgttcctggccgacggcaaggaggccctggagcccgaggacatcccccacgaggccgacgtgtacgtgagcaccggcgagcccttcctgaaccccttcaagaagatcaaggaccacctgctgctgatcaagaaggtgacctggaccatgaacggcctgatgctgcccaccgacatcaagagaagaaagaccaagcccgtgctgagcatcagaatgaagaagctgaccgagagaaccagcgtgagaatcctgttcttcaagaacggcatgggccaggacggccacgagatcaccgtgggcaaggagaccatgaagaaggtgctggacacctgcaccatcagaatgaacctgaacctgcccgccagatacttctacgacctgtacggcagaaagatcgaggacatcagcaagggcaagcactag

SEQ ID NO: 79625 - DNA, 690 bp, synthetic construct
  misc_feature 1..690: note = Description of Artificial Sequence: Synthetic coding sequence
  source 1..690: mol_type = other DNA
atgaagatgtggaacaactggggctggtgcggcggcagaagaagaggctgcaccaagatcctgagcaccaagaagggcatccagatgagcatcaagaacaagcacctgatcgtgatccccgccttcagccacaccatgagccagctggacttcgacttccactgcgtgttcgtgagcatcgacgagggcatcttcaaggccggcgccgagagaagcgagaccagaggcgccgccgaggtgcaggaggacgaggacacccaggtggaggtgcccgtggaccagagacccgccgagatcgtggacgaggaggaggacggcgagaaggccaacaaggacgccgagcagaaggaggacttcagcggcatgaacggcgacctggaggaggagggcggcagagaggccaccgacgcccccgagcaggtggaggagatcctggaccacagcgagcagcaggccagacccgccagagtgaacggcggcaccgacgaggagaacggcgaggagctgcagcaggtgaacaacgagctgcagctggtgctggacaaggagagaaagagccagggcgccggcagcggccaggacgaggccgacgtggacccccagagaccccccagacccgaggtgaagatcaccagccccgaggagaacgagaacaaccagcagaacaaggactacgccgccgtggcctag

SEQ ID NO: 79626 - DNA, 1431 bp, synthetic construct
  misc_feature 1..1431: note = Description of Artificial Sequence: Synthetic coding sequence
  source 1..1431: mol_type = other DNA
atgagcggcagcagcgccagaagcagccacctgagccagcccgtggtgaagagcgtgctggtgtacagaaacggcgaccccttctacgccggcagaagagtggtgatccacgagaagaaggtgagcagcttcgaggtgttcctgaaggaggtgaccggcggcgtgcaggcccccttcggcgccgtgagaaacatctacacccccagaaccggccacagaatcagaaagctggaccagatccagagcggcggcaactacgtggccggcggccaggaggccttcaagaagctgaactacctggacatcggcgagatcaagaagagacccatggaggtggtgaacaccgaggtgaagcccgtgatccacagcagaatcaacgtgagcgccagattcagaaagcccctgcaggagccctgcaccatcttcctgatcgccaacggcgacctgatcaaccccgccagcagactgctgatccccagaaagaccctgaaccagtgggaccacgtgctgcagatggtgaccgagaagatcaccctgagaagcggcgccgtgcacagactgtacaccctggagggcaagctggtggagagcggcgccgagctggagaacggccagttctacgtggccgtgggcagagacaagttcaagaagctgccctacagcgagctgctgttcgacaagagcaccatgagaagacccttcggccagaaggccagcagcctgccccccatcgtgggcagcagaaagagcaagggcagcggcaacgacagacacagcaagagcaccgtgggcagcagcgacaacagcagcccccagcccctgaagagaaagggcaagaaggaggacgtgaacagcgagaagctgaccaagctgaagcagaacgtgaagctgaagaacagccaggagaccatccccaacagcgacgagggcatcttcaaggccggcgccgagagaagcgagaccagaggcgccgccgaggtgcaggaggacgaggacacccaggtggaggtgcccgtggaccagagacccgccgagatcgtggacgaggaggaggacggcgagaaggccaacaaggacgccgagcagaaggaggacttcagcggcatgaacggcgacctggaggaggagggcggcagagaggccaccgacgcccccgagcaggtggaggagatcctggaccacagcgagcagcaggccagacccgccagagtgaacggcggcaccgacgaggagaacggcgaggagctgcagcaggtgaacaacgagctgcagctggtgctggacaaggagagaaagagccagggcgccggcagcggccaggacgaggccgacgtggacccccagagaccccccagacccgaggtgaagatcaccagccccgaggagaacgagaacaaccagcagaacaaggactacgccgccgtggcctag

SEQ ID NO: 79627 - DNA, 267 bp, synthetic construct
  misc_feature 1..267: note = Description of Artificial Sequence: Synthetic coding sequence
  source 1..267: mol_type = other DNA
tgagtggtgatccacgagaagaaggtgagcagcttcgaggtgttcctgaaggaggtgaccggcggcgtgcaggcccccttcggcgccgtgagaaacatctacacccccagaaccggccacagaatcagaaagctggaccagatccagagcggcggcaactacgtggccggcggccaggaggccttcaagaagctgaactacctggacatcggcgagatcaagaagagacccatggaggtggtgaacaccgagctgcacgtgctgtag

SEQ ID NO: 79628 - DNA, 363 bp, synthetic construct
  misc_feature 1..363: note = Description of Artificial Sequence: Synthetic coding sequence
  source 1..363: mol_type = other DNA
atgagcggcagcagcgccagaagcagccacctgagccagcccgtggtgaagagcgtgctggtgtacagaaacggcgaccccttctacgccggcagaagagtggtgatccacgagaagaaggtgagcagcttcgaggtgttcctgaaggaggtgaccggcggcgtgcaggcccccttcggcgccgtgagaaacatctacacccccagaaccggccacagaatcagaaagctggaccagatccagagcggcggcaactacgtggccggcggccaggaggccttcaagaagctgaactacctggacatcggcgagatcaagaagagacccatggaggtggtgaacaccgagctgcacgtgctgtag

SEQ ID NO: 79629 - DNA, 1947 bp, synthetic construct
  misc_feature 1..1947: note = Description of Artificial Sequence: Synthetic coding sequence
  source 1..1947: mol_type = other DNA
atgaagaagcccatctgcaagaccaccgagccctacgcccccgtgagactgagagtgctgcagaacggcgagaagaacaagaacagaagcgtgaccatcctgggccccgacatcagccccggcagaaagacccagtgcaccgagatcctgaacctgcccagcgccgccagaagactgtacaacgagaagggcaaggagatcttcgccctgaaggacctgcagagagacgagctggtgtacgtgagctgcggcgagctgtggatcaaccccgacctgagcatcgcccagcagaagaagcagatcttcctgagaaacctggagagcgacatcgccaagatccagatcttctgcagcacccacaagatcgaggccctggtgctggaggtgcagagcgacatcgtgagcggcagcaagctggccgtgcacaagcccgtggccatcttcggcgaggagaagcaggtgaccgagcccgaggagaagcagatgcaggaggaccccctgaccaccgagaacgccagcagcgagatcctggacagccacgtgagagcccacctgagaatgaaggcctgccacaccctgcccagatacgcctggcaggagaccagccacgacttcgacgaggacgacagcctgcccaagaagaccgagaagggcctgttcgagaacgtggagccccagaagaagcacagctgcagccccaagcacagcaagctgcacaagcactgccaccagcagttcgagtacagagacggccagatcatcagccacgccgccccccagctggtgctgggcgtgcagggccccaacctgagaagcggcatggaggtggtgctggtggagaagaagagcgacggcagccaccagagatggatccaccaggaggacagcagaaccttccacctggtgagcaaccccgacctggtgctggccgtgagcatgaccaagaccagaaacgaggtgtgcggctaccccgtgatcgtgcagaagtacaagccctacaacaacggcgccgccaaccagaagtggcactacatgaagaacatcaaggccctggtggccttccacagcaccgccctggacaaggagatcaccagcgccaactacgccggcgtgtgcaccagcagcgtgatcaaggaggagaacatcgaccagcccggctactgctacctgagccccgacggcaagagaaagaccatgctgtgcctggcctgcggccagagcatgagaaccgagaagggcctgaagcagctgctgcccggcgtgcccttcctgtgcatcagcggcaccaagacccagaagcccttcctgcagggccccttcaaggtgatcagcgtggccgaggtggacctgagctgcgacaaggccgagaagaccctgagctactaccaggccagactgctgagcctgagaatgaagacctgcacccaggccgccagccacagcggcatggccgccacccaccagaaggccgtgaagatcatcgcctacaagaacggcgacggctacagaaacggcaagctgatcgtggccggcaccttccccatgctgctgaccgagtgcaccgagcagctgggcctggccagagccgccagcaaggtgtacaccaaggacggcacccccatcttcaccctgagagacctggtgctgtgggccctggacgagagcttcctgcagagagacagcgagaagcagaagcaggacgccgcccccgtgggcaaggagcagatcatcgtggagaagaaccccagaatgaaggtgaagaacagactgttcgccaagagcgtgaccagcgacagcctggacggcatcgacaagagcctgctgaccctgatcctgagaaaccccatcgccatctgggtgagctgcggcgagcccttcctgccccccaacgagagcagaaagatcagagagaccgagctggccaagaagggccagaacttcggctag

SEQ ID NO: 79630 - DNA, 1365 bp, synthetic construct
  misc_feature 1..1365: note = Description of Artificial Sequence: Synthetic coding sequence
  source 1..1365: mol_type = other DNA
atgaagaacatcaaggccctggtggccttccacagcaccgccctggacaaggagatcaccagcgccaactacgccggcgtgtgcaccagcagcgtgatcaaggaggagaacatcgaccagcccggctactgctacctgagccccgacggcaagagaaagaccatgctgtgcctggcctgcggccagagcatgagaaccgagaagggcctgaagcagctgctgcccggcgtgcccttcctgtgcatcagcggcaccaagacccagaagcccttcctgcagggccccttcaaggtgatcagcgtggccgaggtggacctgagctgcgacaaggccgagaagaccctgagctactaccaggccagactgctgagcctgagaatgaagacctgcacccaggccgccagccacagcggcatggccgccacccaccagaaggccgtgaagatcatcgcctacaagaacggcgacggctacagaaacggcaagctgatcgtggccggcaccttccccatgctgctgaccgagtgcaccgagcagctgggcctggccagagccgccagcaaggtgtacaccaaggacggcacccccatcttcaccctgagagacctggtgctgtgggccctggacgagagcttcctgcagagagacagcgagaagcagaagcaggacgccgcccccgtgggcaaggagcagatcatcgtggagagcatggaggagaaccccagaatgaaggtgaagaacagactgttcgccaagagcgtgaccagcgacagcctggacggcatcgacaagagcctgctgaccctgatcctgagaaaccccatcgccatctgggtgagctgcggcgagcccttcctgccccccaacgccctgcagaaggccgagaagctggagaagcagaactggctgaagaaggacagaatcctggccgacctggacaccatgagacacaagatgagacagctgaagggcagaagagtggccgcctgccagcccgccaccatggtgcccaccaagagccccgtgcagcccgtggtggtggagggcggctggaccgagcagacccagcaggagatcaagctgatggagctgatcagacacaccgaggcccacctgagcgagatccaggagatggagagcaagatcaacttccccatcgccaccaagagaatcgccgtgaagcccagcaacctgtacaagcagcccaacaccaagagagtgtggatctacctgaacggcggcagacccgaggacggcacctacgcctggggcaagaccatcagcgaggtgagcctgctgtacctgaagacctggatcttcatctggagcagaaaggtgttcttctacttcctgatcaccgcctag

SEQ ID NO: 79631 - DNA, 2190 bp, synthetic construct
  misc_feature 1..2190: note = Description of Artificial Sequence: Synthetic coding sequence
  source 1..2190: mol_type = other DNA
atgagcttcggcagagacatggagctggagcacttcgacgagagagacaaggcccagagatacagcagaggcagcagagtgaacggcctgcccagccccacccacagcgcccactgcagcttctacagaaccagaaccctgcagaccctgagcagcgagaagaaggccaagaaggtgagattctacagaaacggcgacagatacttcaagggcatcgtgtacgccatcagccccgacagattcagaagcttcgaggccctgctggccgacctgaccagaaccctgagcgacaacgtgaacctgccccagggcgtgagaaccatctacaccatcgacggcctgaagaagatcagcagcctggaccagctggtggagggcgagagctacgtgtgcggcagcatcgagcccttcaagaagctggagtacaccaagaacgtgaaccccaactggagcgtgaacgtgaagaccaccagcgccagcagagccgtgagcagcctggccaccgccaagggcagccccagcgaggtgagagagaacaaggacttcatcagacccaagctggtgaccatcatcagaagcggcgtgaagcccagaaaggccgtgagaatcctgctgaacaagaagaccgcccacagcttcgagcaggtgctgaccgacatcaccgacgccatcaagctggacagcggcgtggtgaagagactgtacaccctggacggcaagcaggtgatgtgcctgcaggacttcttcggcgacgacgacatcttcatcgcctgcggccccgagaagttcagataccaggacgacttcctgctggacgagagcgagtgcagagtggtgaagagcaccagctacaccaagatcgccagcagcagcagaagaagcaccaccaagagccccggccccagcagaagaagcaagagccccgccagcaccagcagcgtgaacggcacccccggcagccagctgagcacccccagaagcggcaagagccccagccccagccccaccagccccggcagcctgagaaagcagagaagcagccagcacggcggcagcagcaccagcctggccagcaccaaggtgtgcagcagcatggacgagaacgacggccccggcgaggaggtgagcgaggagggcttccagatccccgccaccatcaccgagagatacaaggtgggcagaaccatcggcgacggcaacttcgccgtggtgaaggagtgcgtggagagaagcaccgccagagagtacgccctgaagatcatcaagaagagcaagtgcagaggcaaggagcacatgatccagaacgaggtgagcatcctgagaagagtgaagcaccccaacatcgtgctgctgatcgaggagatggacgtgcccaccgagctgtacctggtgatggagctggtgaagggcggcgacctgttcgacgccatcaccagcaccaacaagtacaccgagagagacgccagcggcatgctgtacaacctggccagcgccatcaagtacctgcacagcctgaacatcgtgcacagagacatcaagcccgagaacctgctggtgtacgagcaccaggacggcagcaagagcctgaagctgggcgacttcggcctggccaccatcgtggacggccccctgtacaccgtgtgcggcacccccacctacgtggcccccgagatcatcgccgagaccggctacggcctgaaggtggacatctgggccgccggcgtgatcacctacatcctgctgtgcggcttcccccccttcagaggcagcggcgacgaccaggaggtgctgttcgaccagatcctgatgggccaggtggacttccccagcccctactgggacaacgtgagcgacagcgccaaggagctgatcaccatgatgctgctggtggacgtggaccagagattcagcgccgtgcaggtgctggagcacccctgggtgaacgacgacggcctgcccgagaacgagcaccagctgagcgtggccggcaagatcaagaagcacttcaacaccggccccaagcccaacagcaccgccgccggcgtgagcgtgatcgccctggaccacggcttcaccatcaagagaagcggcagcctggactactaccagcagcccggcatgtactggatcagaccccccctgctgatcagaagaggcagattcagcgacgaggacgccaccagaatgtag

SEQ ID NO: 79632 - DNA, 2223 bp, synthetic construct
  misc_feature 1..2223: note = Description of Artificial Sequence: Synthetic coding sequence
  source 1..2223: mol_type = other DNA
atgagcttcggcagagacatggagctggagcacttcgacgagagagacaaggcccagagatacagcagaggcagcagagtgaacggcctgcccagccccacccacagcgcccactgcagcttctacagaaccagaaccctgcagaccctgagcagcgagaagaaggccaagaaggtgagattctacagaaacggcgacagatacttcaagggcatcgtgtacgccatcagccccgacagattcagaagcttcgaggccctgctggccgacctgaccagaaccctgagcgacaacgtgaacctgccccagggcgtgagaaccatctacaccatcgacggcctgaagaagatcagcagcctggaccagctggtggagggcgagagctacgtgtgcggcagcatcgagcccttcaagaagctggagtacaccaagaacgtgaaccccaactggagcgtgaacgtgaagaccaccagcgccagcagagccgtgagcagcctggccaccgccaagggcagccccagcgaggtgagagagaacaaggacttcatcagacccaagctggtgaccatcatcagaagcggcgtgaagcccagaaaggccgtgagaatcctgctgaacaagaagaccgcccacagcttcgagcaggtgctgaccgacatcaccgacgccatcaagctggacagcggcgtggtgaagagactgtacaccctggacggcaagcaggtgatgtgcctgcaggacttcttcggcgacgacgacatcttcatcgcctgcggccccgagaagttcagataccaggacgacttcctgctggacgagagcgagtgcagagtggtgaagagcaccagctacaccaagatcgccagcagcagcagaagaagcaccaccaagagccccggccccagcagaagaagcaagagccccgccagcaccagcagcgtgaacggcacccccggcagccagctgagcacccccagaagcggcaagagccccagccccagccccaccagccccggcagcctgagaaagcagagaagcagccagcacggcggcagcagcaccagcctggccagcaccaaggtgtgcagcagcatggacgagaacgacggccccggcgaggaggtgagcgaggagggcttccagatccccgccaccatcaccgagagatacaaggtgggcagaaccatcggcgacggcaacttcgccgtggtgaaggagtgcgtggagagaagcaccgccagagagtacgccctgaagatcatcaagaagagcaagtgcagaggcaaggagcacatgatccagaacgaggtgagcatcctgagaagagtgaagcaccccaacatcgtgctgctgatcgaggagatggacgtgcccaccgagctgtacctggtgatggagctggtgaagggcggcgacctgttcgacgccatcaccagcaccaacaagtacaccgagagagacgccagcggcatgctgtacaacctggccagcgccatcaagtacctgcacagcctgaacatcgtgcacagagacatcaagcccgagaacctgctggtgtacgagcaccaggacggcagcaagagcctgaagctgggcgacttcggcctggccaccatcgtggacggccccctgtacaccgtgtgcggcacccccacctacgtggcccccgagatcatcgccgagaccggctacggcctgaaggtggacatctgggccgccggcgtgatcacctacatcctgctgtgcggcttcccccccttcagaggcagcggcgacgaccaggaggtgctgttcgaccagatcctgatgggccaggtggacttccccagcccctactgggacaacgtgagcgacagcgccaaggagctgatcaccatgatgctgctggtggacgtggaccagagattcagcgccgtgcaggtgctggagcacccctgggtgaacgacgacggcctgcccgagaacgagcaccagctgagcgtggccggcaagatcaagaagcacttcaacaccggccccaagcccaacagcaccgccgccggcgtgagcgtgatcgccaccaccgccctggacaaggagagacaggtgttcagaagaagaagaaaccaggacgtgagaagcagatacaaggcccagcccgccccccccgagctgaacagcgagagcgaggactacagccccagcagcagcgagaccgtgagaagccccaacagccccttctag

SEQ ID NO: 79633 - DNA, 1092 bp, synthetic construct
  misc_feature 1..1092: note = Description of Artificial Sequence: Synthetic coding sequence
  source 1..1092: mol_type = other DNA
atgagcttcggcagagacatggagctggagcacttcgacgagagagacaaggcccagagatacagcagaggcagcagagtgaacggcctgcccagccccacccacagcgcccactgcagcttctacagaaccagaaccctgcagaccctgagcagcgagaagaaggccaagaaggtgagattctacagaaacggcgacagatacttcaagggcatcgtgtacgccatcagccccgacagattcagaagcttcgaggccctgctggccgacctgaccagaaccctgagcgacaacgtgaacctgccccagggcgtgagaaccatctacaccatcgacggcctgaagaagatcagcagcctggaccagctggtggagggcgagagctacgtgtgcggcagcatcgagcccttcaagaagctggagtacaccaagaacgtgaaccccaactggagcgtgaacgtgaagaccaccagcgccagcagagccgtgagcagcctggccaccgccaagggcagccccagcgaggtgagagagaacaaggacttcatcagacccaagctggtgaccatcatcagaagcggcgtgaagcccagaaaggccgtgagaatcctgctgaacaagaagaccgcccacagcttcgagcaggtgctgaccgacatcaccgacgccatcaagctggacagcggcgtggtgaagagactgtacaccctggacggcaagcaggtgatgtgcctgcaggacttcttcggcgacgacgacatcttcatcgcctgcggccccgagaagttcagataccaggacgacttcctgctggacgagagcgagtgcagagtggtgaagagcaccagctacaccaagatcgccagcagcagcagaagaagcaccaccaagagccccggccccagcagaagaagcaagagccccgccagcaccagcagcgtgaacggcacccccggcagccagctgagcacccccagaagcggcaagagccccagccccagccccaccagccccggcagcctgagaaagcagagagacctgtacagacccctgagcagcgacgacctggacagcgtgggcgacagcgtgtag

SEQ ID NO: 79634 - DNA, 1302 bp, synthetic construct
  misc_feature 1..1302: note = Description of Artificial Sequence: Synthetic coding sequence
  source 1..1302: mol_type = other DNA
atgctggagctgatcgaggtgaacggcacccccggcagccagctgagcacccccagaagcggcaagagccccagccccagccccaccagccccggcagcctgagaaagcagagaagcagccagcacggcggcagcagcaccagcctggccagcaccaaggtgtgcagcagcatggacgagaacgacggccccggcgaggaggtgagcgaggagggcttccagatccccgccaccatcaccgagagatacaaggtgggcagaaccatcggcgacggcaacttcgccgtggtgaaggagtgcgtggagagaagcaccgccagagagtacgccctgaagatcatcaagaagagcaagtgcagaggcaaggagcacatgatccagaacgaggtgagcatcctgagaagagtgaagcaccccaacatcgtgctgctgatcgaggagatggacgtgcccaccgagctgtacctggtgatggagctggtgaagggcggcgacctgttcgacgccatcaccagcaccaacaagtacaccgagagagacgccagcggcatgctgtacaacctggccagcgccatcaagtacctgcacagcctgaacatcgtgcacagagacatcaagcccgagaacctgctggtgtacgagcaccaggacggcagcaagagcctgaagctgggcgacttcggcctggccaccatcgtggacggccccctgtacaccgtgtgcggcacccccacctacgtggcccccgagatcatcgccgagaccggctacggcctgaaggtggacatctgggccgccggcgtgatcacctacatcctgctgtgcggcttcccccccttcagaggcagcggcgacgaccaggaggtgctgttcgaccagatcctgatgggccaggtggacttccccagcccctactgggacaacgtgagcgacagcgccaaggagctgatcaccatgatgctgctggtggacgtggaccagagattcagcgccgtgcaggtgctggagcacccctgggtgaacgacgacggcctgcccgagaacgagcaccagctgagcgtggccggcaagatcaagaagcacttcaacaccggccccaagcccaacagcaccgccgccggcgtgagcgtgatcgccaccaccgccctggacaaggagagacaggtgttcagaagaagaagaaaccaggacgtgagaagcagatacaaggcccagcccgccccccccgagctgaacagcgagagcgaggactacagccccagcagcagcgagaccgtgagaagccccaacagccccttctag

SEQ ID NO: 79635 - DNA, 1266 bp, synthetic construct
  misc_feature 1..1266: note = Description of Artificial Sequence: Synthetic coding sequence
  source 1..1266: mol_type = other DNA
ctgagcctgatcaagttcaacggcacccccggcagccagctgagcacccccagaagcggcaagagccccagccccagccccaccagccccggcagcctgagaaagcagagaagcagccagcacggcggcagcagcaccagcctggccagcaccaaggtgtgcagcagcatggacgagaacgacggccccggcgaggaggtgagcgaggagggcttccagatccccgccaccatcaccgagagatacaaggtgggcagaaccatcggcgacggcaacttcgccgtggtgaaggagtgcgtggagagaagcaccgccagagagtacgccctgaagatcatcaagaagagcaagtgcagaggcaaggagcacatgatccagaacgaggtgagcatcctgagaagagtgaagcaccccaacatcgtgctgctgatcgaggagatggacgtgcccaccgagctgtacctggtgatggagctggtgaagggcggcgacctgttcgacgccatcaccagcaccaacaagtacaccgagagagacgccagcggcatgctgtacaacctggccagcgccatcaagtacctgcacagcctgaacatcgtgcacagagacatcaagcccgagaacctgctggtgtacgagcaccaggacggcagcaagagcctgaagctgggcgacttcggcctggccaccatcgtggacggccccctgtacaccgtgtgcggcacccccacctacgtggcccccgagatcatcgccgagaccggctacggcctgaaggtggacatctgggccgccggcgtgatcacctacatcctgctgtgcggcttcccccccttcagaggcagcggcgacgaccaggaggtgctgttcgaccagatcctgatgggccaggtggacttccccagcccctactgggacaacgtgagcgacagcgccaaggagctgatcaccatgatgctgctggtggacgtggaccagagattcagcgccgtgcaggtgctggagcacccctgggtgaacgacgacggcctgcccgagaacgagcaccagctgagcgtggccggcaagatcaagaagcacttcaacaccggccccaagcccaacagcaccgccgccggcgtgagcgtgatcgccctggaccacggcttcaccatcaagagaagcggcagcctggactactaccagcagcccggcatgtactggatcagaccccccctgctgatcagaagaggcagattcagcgacgaggacgccaccagaatgtag

SEQ ID NO: 79636 - DNA, 1860 bp, synthetic construct
  misc_feature 1..1860: note = Description of Artificial Sequence: Synthetic coding sequence
  source 1..1860: mol_type = other DNA
atgagcttcggcagagacatggagctggagcacttcgacgagagagacaaggcccagagatacagcagaggcagcagagtgaacggcctgcccagccccacccacagcgcccactgcagcttctacagaaccagaaccctgcagaccctgagcagcgagaagaaggccaagaaggtgagattctacagaaacggcgacagatacttcaagggcatcgtgtacgccatcagccccgacagattcagaagcttcgaggccctgctggccgacctgaccagaaccctgagcgacaacgtgaacctgccccagggcgtgagaaccatctacaccatcgacggcctgaagaagatcagcagcctggaccagctggtggagggcgagagctacgtgtgcggcagcatcgagcccttcaagaagctggagtacaccaagaacgtgaaccccaactggagcgtgaacgtgaagaccaccagcgccagcagagccgtgagcagcctggccaccgccaagggcagccccagcgaggtgagagagaacaaggacttcatcagacccaagctggtgaccatcatcagaagcggcgtgaagcccagaaaggccgtgagaatcctgctgaacaagaagaccgcccacagcttcgagcaggtgctgaccgacatcaccgacgccatcaagctggacagcggcgtggtgaagagactgtacaccctggacggcaagcaggtgatgtgcctgcaggacttcttcggcgacgacgacatcttcatcgcctgcggccccgagaagttcagataccaggacgacttcctgctggacgagagcgagtgcagagtggtgaagagcaccagctacaccaagatcgccagcagcagcagaagaagcaccaccaagagccccggccccagcagaagaagcaagagccccgccagcaccagcagcgtgaacggcacccccggcagccagctgagcacccccagaagcggcaagagccccagccccagccccaccagccccggcagcctgagaaagcagagaagcagccagcacggcggcagcagcaccagcctggccagcaccaaggtgtgcagcagcatggacgagaacgacggccccggcgaggaggtgagcgaggagggcttccagatccccgccaccatcaccgagagatacaaggtgggcagaaccatcggcgacggcaacttcgccgtggtgaaggagtgcgtggagagaagcaccgccagagagtacgccctgaagatcatcaagaagagcaagtgcagaggcaaggagcacatgatccagaacgaggtgagcatcctgagaagagtgaagcaccccaacatcgtgctgctgatcgaggagatggacgtgcccaccgagctgtacctggtgatggagctggtgaagggcggcgacctgttcgacgccatcaccagcaccaacaagtacctgcacagcctgaacatcgtgcacagagacatcaagcccgagaacctgctggtgtacgagcaccaggacggcagcaagagcctgaagctgggcgacttcggcctggccaccatcgtggacggccccctgtacaccgtgtgcggcacccccacctacgtggcccccgagatcatcgccgagaccggctacggcctgaaggtggacatctgggccgccggcgtgatcacctacatcctgctgtgcggcttcccccccttcagaggcagcggcgacgaccaggaggtgctgttcgaccagatcctgatgggccaggtggacttccccagcccctactgggacaacgtgagcgacagcgccaaggagctgatcaccatgatggccagccagaagatgaacatcagctgccagtag

SEQ ID NO: 79637 - DNA, 2301 bp, synthetic construct
  misc_feature 1..2301: note = Description of Artificial Sequence: Synthetic coding sequence
  source 1..2301: mol_type = other DNA
atggccagcaccagaagcatcgagctggagcacttcgaggagagagacaagagacccagacccggcagcagaagaggcgcccccagcagcagcggcggcagcagcagcagcggccccaagggcaacggcctgatccccagccccgcccacagcgcccactgcagcttctacagaaccagaaccctgcaggccctgagcagcgagaagaaggccaagaaggccagattctacagaaacggcgacagatacttcaagggcctggtgttcgccatcagcagcgacagattcagaagcttcgacgccctgctgatcgagctgaccagaagcctgagcgacaacgtgaacctgccccagggcgtgagaaccatctacaccatcgacggcagcagaaaggtgaccagcctggacgagctgctggagggcgagagctacgtgtgcgccagcaacgagcccttcagaaaggtggactacaccaagaacatcaaccccaactggagcgtgaacatcaagggcggcaccagcagagccctggccgccgccagcagcgtgaagagcgaggtgaaggagagcaaggacttcatcaagcccaagctggtgaccgtgatcagaagcggcgtgaagcccagaaaggccgtgagaatcctgctgaacaagaagaccgcccacagcttcgagcaggtgctgaccgacatcaccgaggccatcaagctggacagcggcgtggtgaagagactgtgcaccctggacggcaagcaggtgacctgcctgcaggacttcttcggcgacgacgacgtgttcatcgcctgcggccccgagaagttcagatacgcccaggacgacttcgtgctggaccacagcgagtgcagagtgctgaagagcagctacagcagaagcagcgccgtgaagtacagcggcagcaagagccccggccccagcagaagaagcaagagccccgccagcgtgaacggcacccccagcagccagctgagcacccccaagagcaccaagagcagcagcagcagccccaccagccccggcagcttcagaggcctgaagcagatcagcgcccacggcagaagcagcagcaacgtgaacggcggccccgagctggacagatgcatcagccccgagggcgtgaacggcaacagatgcagcgagagcagcaccctgctggagaagtacaagatcggcaaggtgatcggcgacggcaacttcgccgtggtgaaggagtgcatcgacagaagcaccggcaaggagttcgccctgaagatcatcgacaaggccaagtgctgcggcaaggagcacctgatcgagaacgaggtgagcatcctgagaagagtgaagcaccccaacatcatcatgctggtggaggagatggagaccgccaccgagctgttcctggtgatggagctggtgaagggcggcgacctgttcgacgccatcaccagcagcaccaagtacaccgagagagacggcagcgccatggtgtacaacctggccaacgccctgagatacctgcacggcctgagcatcgtgcacagagacatcaagcccgagaacctgctggtgtgcgagtaccccgacggcaccaagagcctgaagctgggcgacttcggcctggccaccgtggtggagggccccctgtacaccgtgtgcggcacccccacctacgtggcccccgagatcatcgccgagaccggctacggcctgaaggtggacatctgggccgccggcgtgatcacctacatcctgctgtgcggcttcccccccttcagaagcgagaacaacctgcaggaggacctgttcgaccagatcctggccggcaagctggagttccccgccccctactgggacaacatcaccgacagcgccaaggagctgatcagccagatgctgcaggtgaacgtggaggccagatgcaccgccggccagatcctgagccacccctgggtgagcgacgacgccagccaggagaacaacatgcaggccgaggtgaccggcaagctgaagcagcacttcaacaacgccctgcccaagcagaacagcaccaccaccggcgtgagcgtgatcatgaacaccgccctggacaaggagggccagatcttctgcagcaagcactgccaggacagcggcagacccggcatggagcccatcagccccgtgccccccagcgtggaggagatccccgtgcccggcgaggccgtgcccgcccccaccccccccgagagccccaccccccaccccccccccgccgcccccggcggcgagagagccggcacctggagaagacacagagactag

SEQ ID NO: 79638 - DNA, 2352 bp, synthetic construct
  misc_feature 1..2352: note = Description of Artificial Sequence: Synthetic coding sequence
  source 1..2352: mol_type = other DNA
atggccagcaccagaagcatcgagctggagcacttcgaggagagagacaagagacccagacccggcagcagaagaggcgcccccagcagcagcggcggcagcagcagcagcggccccaagggcaacggcctgatccccagccccgcccacagcgcccactgcagcttctacagaaccagaaccctgcaggccctgagcagcgagaagaaggccaagaaggccagattctacagaaacggcgacagatacttcaagggcctggtgttcgccatcagcagcgacagattcagaagcttcgacgccctgctgatcgagctgaccagaagcctgagcgacaacgtgaacctgccccagggcgtgagaaccatctacaccatcgacggcagcagaaaggtgaccagcctggacgagctgctggagggcgagagctacgtgtgcgccagcaacgagcccttcagaaaggtggactacaccaagaacatcaaccccaactggagcgtgaacatcaagggcggcaccagcagagccctggccgccgccagcagcgtgaagagcgaggtgaaggagagcaaggacttcatcaagcccaagctggtgaccgtgatcagaagcggcgtgaagcccagaaaggccgtgagaatcctgctgaacaagaagaccgcccacagcttcgagcaggtgctgaccgacatcaccgaggccatcaagctggacagcggcgtggtgaagagactgtgcaccctggacggcaagcaggtgacctgcctgcaggacttcttcggcgacgacgacgtgttcatcgcctgcggccccgagaagttcagatacgcccaggacgacttcgtgctggaccacagcgagtgcagagtgctgaagagcagctacagcagaagcagcgccgtgaagtacagcggcagcaagagccccggccccagcagaagaagcaagagccccgccagcgtgaagagaggcggccactacagcagcgcctacagcaccgccaagagccccgtgaacggcacccccagcagccagctgagcacccccaagagcaccaagagcagcagcagcagccccaccagccccggcagcttcagaggcctgaagcagatcagcgcccacggcagaagcagcagcaacgtgaacggcggccccgagctggacagatgcatcagccccgagggcgtgaacggcaacagatgcagcgagagcagcaccctgctggagaagtacaagatcggcaaggtgatcggcgacggcaacttcgccgtggtgaaggagtgcatcgacagaagcaccggcaaggagttcgccctgaagatcatcgacaaggccaagtgctgcggcaaggagcacctgatcgagaacgaggtgagcatcctgagaagagtgaagcaccccaacatcatcatgctggtggaggagatggagaccgccaccgagctgttcctggtgatggagctggtgaagggcggcgacctgttcgacgccatcaccagcagcaccaagtacaccgagagagacggcagcgccatggtgtacaacctggccaacgccctgagatacctgcacggcctgagcatcgtgcacagagacatcaagcccgagaacctgctggtgtgcgagtaccccgacggcaccaagagcctgaagctgggcgacttcggcctggccaccgtggtggagggccccctgtacaccgtgtgcggcacccccacctacgtggcccccgagatcatcgccgagaccggctacggcctgaaggtggacatctgggccgccggcgtgatcacctacatcctgctgtgcggcttcccccccttcagaagcgagaacaacctgcaggaggacctgttcgaccagatcctggccggcaagctggagttccccgccccctactgggacaacatcaccgacagcgccaaggagctgatcagccagatgctgcaggtgaacgtggaggccagatgcaccgccggccagatcctgagccacccctgggtgagcgacgacgccagccaggagaacaacatgcaggccgaggtgaccggcaagctgaagcagcacttcaacaacgccctgcccaagcagaacagcaccaccaccggcgtgagcgtgatcatgaacaccgccctggacaaggagggccagatcttctgcagcaagcactgccaggacagcggcagacccggcatggagcccatcagccccgtgccccccagcgtggaggagatccccgtgcccggcgaggccgtgcccgcccccaccccccccgagagccccaccccccaccccccccccgccgcccccggcggcgagagagccggcacctggagaagacacagagactag

SEQ ID NO: 79639 - DNA, 2298 bp, synthetic construct
  misc_feature 1..2298: note = Description of Artificial Sequence: Synthetic coding sequence
  source 1..2298: mol_type = other DNA
atggccagcaccagaagcatcgagctggagcacttcgaggagagagacaagagacccagacccggcagcagaagaggcgcccccagcagcagcggcggcagcagcagcagcggccccaagggcaacggcctgatccccagccccgcccacagcgcccactgcagcttctacagaaccagaaccctgcaggccctgagcagcgagaagaaggccaagaaggccagattctacagaaacggcgacagatacttcaagggcctggtgttcgccatcagcagcgacagattcagaagcttcgacgccctgctgatcgagctgaccagaagcctgagcgacaacgtgaacctgccccagggcgtgagaaccatctacaccatcgacggcagcagaaaggtgaccagcctggacgagctgctggagggcgagagctacgtgtgcgccagcaacgagcccttcagaaaggtggactacaccaagaacatcaaccccaactggagcgtgaacatcaagggcggcaccagcagagccctggccgccgccagcagcgtgaagagcgaggtgaaggagagcaaggacttcatcaagcccaagctggtgaccgtgatcagaagcggcgtgaagcccagaaaggccgtgagaatcctgctgaacaagaagaccgcccacagcttcgagcaggtgctgaccgacatcaccgaggccatcaagctggacagcggcgtggtgaagagactgtgcaccctggacggcaagcaggtgacctgcctgcaggacttcttcggcgacgacgacgtgttcatcgcctgcggccccgagaagttcagatacgcccaggacgacttcgtgctggaccacagcgagtgcagagtgctgaagagcagctacagcagaagcagcgccgtgaagtacagcggcagcaagagccccggccccagcagaagaagcaagagccccgccagcgtgaacggcacccccagcagccagctgagcacccccaagagcaccaagagcagcagcagcagccccaccagccccggcagcttcagaggcctgaagatcagcgcccacggcagaagcagcagcaacgtgaacggcggccccgagctggacagatgcatcagccccgagggcgtgaacggcaacagatgcagcgagagcagcaccctgctggagaagtacaagatcggcaaggtgatcggcgacggcaacttcgccgtggtgaaggagtgcatcgacagaagcaccggcaaggagttcgccctgaagatcatcgacaaggccaagtgctgcggcaaggagcacctgatcgagaacgaggtgagcatcctgagaagagtgaagcaccccaacatcatcatgctggtggaggagatggagaccgccaccgagctgttcctggtgatggagctggtgaagggcggcgacctgttcgacgccatcaccagcagcaccaagtacaccgagagagacggcagcgccatggtgtacaacctggccaacgccctgagatacctgcacggcctgagcatcgtgcacagagacatcaagcccgagaacctgctggtgtgcgagtaccccgacggcaccaagagcctgaagctgggcgacttcggcctggccaccgtggtggagggccccctgtacaccgtgtgcggcacccccacctacgtggcccccgagatcatcgccgagaccggctacggcctgaaggtggacatctgggccgccggcgtgatcacctacatcctgctgtgcggcttcccccccttcagaagcgagaacaacctgcaggaggacctgttcgaccagatcctggccggcaagctggagttccccgccccctactgggacaacatcaccgacagcgccaaggagctgatcagccagatgctgcaggtgaacgtggaggccagatgcaccgccggccagatcctgagccacccctgggtgagcgacgacgccagccaggagaacaacatgcaggccgaggtgaccggcaagctgaagcagcacttcaacaacgccctgcccaagcagaacagcaccaccaccggcgtgagcgtgatcatgaacaccgccctggacaaggagggccagatcttctgcagcaagcactgccaggacagcggcagacccggcatggagcccatcagccccgtgccccccagcgtggaggagatccccgtgcccggcgaggccgtgcccgcccccaccccccccgagagccccaccccccaccccccccccgccgcccccggcggcgagagagccggcacctggagaagacacagagactag

SEQ ID NO: 79640 - DNA, 1947 bp, synthetic construct
  misc_feature 1..1947: note = Description of Artificial Sequence: Synthetic coding sequence
  source 1..1947: mol_type = other DNA
atgggcaaggagcccctgaccctgaagagcatccaggtggccgtggaggagctgtaccccaacaaggccagagccctgaccctggcccagcacagcagagcccccagccccagactgagaagcagactgttcagcaaggccctgaagggcgaccacagatgcggcgagaccgagacccccaagagctgcagcgaggtggccggctgcaaggccgccatgagacaccagggcaagatccccgaggagctgagcctggacgacagagccagaacccagaagaagtggggcagaggcaagtgggagcccgagcccagcagcaagccccccagagaggccaccctggaggagagacacgccagaggcgagaagcacctgggcgtggagatcgagaagaccagcggcgagatcatcagatgcgagaagtgcaagagagagagagagctgcagcagagcctggagagagagagactgagcctgggcaccagcgagctggacatgggcaagggccccatgtacgacgtggagaagctggtgagaaccagaagctgcagaagaagccccgaggccaaccccgccagcggcgaggagggctggaagggcgacagccacagaagcagccccagaaaccccacccaggagctgagaagacccagcaagagcatggacaagaaggaggacagaggccccgaggaccaggagagccacgcccagggcgccgccaaggccaagaaggacctggtggaggtgctgcccgtgaccgaggagggcctgagagaggtgaagaaggacaccagacccatgagcagaagcaagcacggcggctggctgctgagagagcaccaggccggcttcgagaagctgagaagaaccagaggcgaggagaaggaggccgagaaggagaagaagccctgcatgagcggcggcagaagaatgaccctgagagacgaccagcccgccaagctggagaaggagcccaagaccagacccgaggagaacaagcccgagagacccagcggcagaaagcccagacccatgggcatcatcgccgccaacgtggagaagcactacgagaccggcagagtgatcggcgacggcaacttcgccgtggtgaaggagtgcagacacagagagaccagacaggcctacgccatgaagatcatcgacaagagcagactgaagggcaaggaggacatggtggacagcgagatcctgatcatccagagcctgagccaccccaacatcgtgaagctgcacgaggtgtacgagaccgacatggagatctacctgatcctggagtacgtgcagggcggcgacctgttcgacgccatcatcgagagcgtgaagttccccgagcccgacgccgccctgatgatcatggacctgtgcaaggccctggtgcacatgcacgacaagagcatcgtgcacagagacctgaagcccgagaacctgctggtgcagagaaacgaggacaagagcaccaccctgaagctggccgacttcggcctggccaagcacgtggtgagacccatcttcaccgtgtgcggcacccccacctacgtggcccccgagatcctgagcgagaagggctacggcctggaggtggacatgtgggccgccggcgtgatcctgtacatcctgctgtgcggcttcccccccttcagaagccccgagagagaccaggacgagctgttcaacatcatccagctgggccacttcgagttcctgcccccctactgggacaacatcagcgacgccgccaaggacctggtgagcagactgctggtggtggaccccaagaagagatacaccgcccaccaggtgctgcagcacccctggatcgagaccgccggcaagaccaacaccgtgaagagacagaagcaggtgagccccagcagcgagggccacttcagaagccagcacaagagagtggtggagcaggtgagctag

SEQ ID NO: 79641 - DNA, 1122 bp, synthetic construct
  misc_feature 1..1122: note = Description of Artificial Sequence: Synthetic coding sequence
  source 1..1122: mol_type = other DNA
atgcccaacgacgaggccttcagcaagcccagcacccccagcgaggccccccacgcccccggcgtgcccccccagggcagagccggcggcttcggcaaggccagcggcgccctggtgggcgccgccagcggcagcagcgccggcggcagcagcagaggcggcggcagcggcagcggcgccagcgacctgggcgccggcagcaagaagagccccagactgcccaagtgcgccagatgcagaaaccacggctacgccagccccctgaagggccacaagagattctgcatgtggagagactgccagtgcaagaagtgcaacctgatcgccgagagacagagagtgatggccgcccaggtggccctgagaagacagcaggcccaggaggaggagctgggcatcagccaccccatccccctgcccagcgccgccgagctgctggtgaagagagagaacaacggcagcaacccctgcctgatgaccgagtgcagcggcaccagccagcccccccccgccagcgtgcccaccaccgccgccagcgagggcagaatggtgatccaggacatccccgccgtgaccagcagaggccacgtggagaacacccccgacctggtgagcgacagcacctactacagcagcttctaccagcccagcctgttcccctactacaacaacctgtacaactgcccccagtacagcatggccctggccgccgacagcgccagcggcgaggtgggcaaccccctgggcggcagccccgtgaagaacagcctgagaggcctgcccggcccctacgtgcccggccagaccggcaaccagtggcagatgaagaacatggagaacagacacgccatgagcagccagtacagaatgcacagctactaccccccccccagctacctgggccagagcgtgccccagttcttcaccttcgaggacgcccccagctaccccgaggccagagccagcgtgttcagcccccccagcagccaggacagcggcctggtgagcctgagcagcagcagccccatcagcaacaagagcaccaaggccgtgctggagtgcgagcccgccagcgagcccagcagcttcaccgtgacccccgtgatcgaggaggacgagtag

SEQ ID NO: 79642 - DNA, 525 bp, synthetic construct
  misc_feature 1..525: note = Description of Artificial Sequence: Synthetic coding sequence
  source 1..525: mol_type = other DNA
atgcccaacgacgaggccttcagcaagcccagcacccccagcgaggccccccacgcccccggcgtgcccccccagggcagagccggcggcttcggcaaggccagcggcgccctggtgggcgccgccagcggcagcagcgccggcggcagcagcagaggcggcggcagcggcagcggcgccagcgacctgggcgccggcagcaagaagagccccagactgcccaagtgcgccagatgcagaaaccacggctacgccagccccctgaagggccacaagagattctgcatgtggagagactgccagtgcaagaagtgcaacctgatcgccgagagacagagagtgatggccgcccaggtgggcgccggcgtgagagagcccggcttcagcctgagcttcttcttcttcttcttcttcagatggagcctggccagactgcccagactgcagtgcagcggcgccatcctggcccactgcaacagcgccagcagagtgcaggccatcctgctgccccagccccccaagtag

SEQ ID NO: 79643 - DNA, 681 bp, synthetic construct
  misc_feature 1..681: note = Description of Artificial Sequence: Synthetic coding sequence
  source 1..681: mol_type = other DNA
atggccgacccccaggccggcagcgccgccggcgactgggagatcgacgtggagagcctggagctggaggaggacgtgtgcggcgcccccagaagcaccccccccggccccagccccccccccgccgacggcgactgcgaggacgacgaggacgacgacggcgtggacgaggacgccgaggaggagggcgacggcgaggaggccggcgccagccccggcatgcccggccagcccgagcagagaggcggcccccagcccagaccccccctggccccccaggccagccccgccggcaccggccccagagagagatgcacccccgccggcggcggcgccgagcccagaaagctgagcagaacccccaagtgcgccagatgcagaaaccacggcgtggtgagctgcctgaagggccacaagagattctgcagatggagagactgccagtgcgccaactgcctgctggtggtggagagacagagagtgatggccgcccaggtggccctgagaagacagcaggccaccgaggacaagaagggcctgagcggcaagcagaacaacttcgagagaaaggccgtgtaccagagacaggtgagagcccccagcctgctggccaagagcatcctggaggtgctgctgggcctgttctacagctactacgtgtacatcatgaaccacctgtag

SEQ ID NO: 79644 - DNA, 1686 bp, synthetic construct
  misc_feature 1..1686: note = Description of Artificial Sequence: Synthetic coding sequence
  source 1..1686: mol_type = other DNA
atggccgacccccaggccggcagcgccgccggcgactgggagatcgacgtggagagcctggagctggaggaggacgtgtgcggcgcccccagaagcaccccccccggccccagccccccccccgccgacggcgactgcgaggacgacgaggacgacgacggcgtggacgaggacgccgaggaggagggcgacggcgaggaggccggcgccagccccggcatgcccggccagcccgagcagagaggcggcccccagcccagaccccccctggccccccaggccagccccgccggcaccggccccagagagagatgcacccccgccggcggcggcgccgagcccagaaagctgagcagaacccccaagtgcgccagatgcagaaaccacggcgtggtgagctgcctgaagggccacaagagattctgcagatggagagactgccagtgcgccaactgcctgctggtggtggagagacagagagtgatggccgcccaggtggccctgagaagacagcaggccaccgaggacaagaagggcctgagcggcaagcagaacaacttcgagagaaaggccgtgtaccagagacaggtgagagcccccagcctgctggccaagagcatcctggagggctacagacccatccccgccgagacctacgtgggcggcaccttccccctgcccccccccgtgagcgacagaatgagaaagagaagagccttcgccgacaaggagctggagaacatcatgctggagagagagtacaaggagagagagatgctggagaccagccaggccgccgccctgttcctgcccaacagaatggtgcccggccccgactacaacagctacaagagcgcctacagccccagccccgtggagccccccagcaaggacttctgcaacttcctgcccacctgcctggacctgaccatgcagtacagcggcagcggcaacatggagctgatcagcagcaacgtgagcgtggccaccacctacagacagtaccccctgagcagcagattcctggtgtggcccaagtgcggccccatcagcgacaccctgctgtaccagcagtgcctgctgaacgccaccaccagcgtgcaggccctgaagcccggcgccagctgggacctgaagggcgccagagtgcaggacggcctgagcgccgagcaggacatgatgcccagcaagctggagggcagcctggtgctgccccacacccccgagatccagaccaccagaagcgacctgcagggccaccaggccgtgcccgagagaagcgccttcagcccccccagaagaaacttcagccccatcgtggacaccgacagcctggccgcccagggccacgtgctgaccaagatcagcaaggagaacaccagacaccccctgcccctgagacacaaccccttccacagcctgttccagcagaccctgaccgacaagagcggccccgagctgaagacccccttcgtgaaggaggccttcgaggagacccccaagaagcacagagagtgcctggtgaaggacaaccagaagtacaccttcaccatcgacagatgcgccaaggacctgttcgtggccaagcaggtgggcaccaagctgagcgtgaacgagcccctgagcttcagcgtggagagcatcctgaagagacccagcagcgccatcaccagagtgagccagtag

SEQ ID NO: 79645 - DNA, 1686 bp, synthetic construct; identical to SEQ ID NO: 79644
  misc_feature 1..1686: note = Description of Artificial Sequence: Synthetic coding sequence
  source 1..1686: mol_type = other DNA

SEQ ID NO: 79646 - DNA, 1686 bp, synthetic construct; identical to SEQ ID NO: 79644
  misc_feature 1..1686: note = Description of Artificial Sequence: Synthetic coding sequence
  source 1..1686: mol_type = other DNA

SEQ ID NO: 79647 - DNA, 681 bp, synthetic construct; identical to SEQ ID NO: 79643
  misc_feature 1..681: note = Description of Artificial Sequence: Synthetic coding sequence
  source 1..681: mol_type = other DNA

SEQ ID NO: 79648 - DNA, 681 bp, synthetic construct; identical to SEQ ID NO: 79643
  misc_feature 1..681: note = Description of Artificial Sequence: Synthetic coding sequence
  source 1..681: mol_type = other DNA

SEQ ID NO: 79649 - DNA, 6039 bp, synthetic construct
  misc_feature 1..6039: note = Description of Artificial Sequence: Synthetic coding sequence
  source 1..6039: mol_type = other DNA
atgtggatcctggccctgagcctgttccagagcttcgccaacgtgttcagcgaggacctgcacagcagcctgtacttcgtgaacgccagcctgcaggaggtggtgttcgccagcaccaccggcaccctggtgccctgccccgccgccggcatcccccccgtgaccctgagatggtacctggccaccggcgaggagatctacgacgtgcccggcatcagacacgtgcaccccaacggcaccctgcagatcttccccttcccccccagcagcttcagcaccctgatccacgacaacacctactactgcaccgccgagaaccccagcggcaagatcagaagccaggacgtgcacatcaaggccgtgctgagagagccctacaccgtgagagtggaggaccagaagaccatgagaggcaacgtggccgtgttcaagtgcatcatccccagcagcgtggaggcctacatcaccgtggtgagctgggagaaggacaccgtgagcctggtgagcggcagcagattcctgatcaccagcaccggcgccctgtacatcaaggacgtgcagaacgaggacggcctgtacaactacagatgcatcaccagacacagatacaccggcgagaccagacagagcaacagcgccagactgttcgtgagcgaccccgccaacagcgcccccagcatcctggacggcttcgaccacagaaaggccatggccggccagagagtggagctgccctgcaaggccctgggccaccccgagcccgactacagatggctgaaggacaacatgcccctggagctgagcggcagattccagaagaccgtgaccggcctgctgatcgagaacatcagacccagcgacagcggcagctacgtgtgcgaggtgagcaacagatacggcaccgccaaggtgatcggcagactgtacgtgaagcagcccctgaaggccaccatcagccccagaaaggtgaagagcagcgtgggcagccaggtgagcctgagctgcagcgtgaccggcaccgaggaccaggagctgagctggtacagaaacggcgagatcctgaaccccggcaagaacgtgagaatcaccggcatcaaccacgagaacctgatcatggaccacatggtgaagagcgacggcggcgcctaccagtgcttcgtgagaaaggacaagctgagcgcccaggactacgtgcaggtggtgctggaggacggcacccccaagatcatcagcgccttcagcgagaaggtggtgagccccgccgagcccgtgagcctgatgtgcaacgtgaagggcacccccctgcccaccatcacctggaccctggacgacgaccccatcctgaagggcggcagccacagaatcagccagatgatcaccagcgagggcaacgtggtgagctacctgaacatcagcagcagccaggtgagagacggcggcgtgtacagatgcaccgccaacaacagcgccggcgtggtgctgtaccaggccagaatcaacgtgagaggccccgccagcatcagacccatgaagaacatcaccgccatcgccggcagagacacctacatccactgcagagtgatcggctacccctactacagcatcaagtggtacaagaacagcaacctgctgcccttcaaccacagacaggtggccttcgagaacaacggcaccctgaagctgagcgacgtgcagaaggaggtggacgagggcgagtacacctgcaacgtgctggtgcagccccagctgagcaccagccagagcgtgcacgtgaccgtgaaggtgccccccttcatccagcccttcgagttccccagattcagcatcggccagagagtgttcatcccctgcgtggtggtgagcggcgacctgcccatcaccatcacctggcagaaggacggcagacccatccccggcagcctgggcgtgaccatcgacaacatcgacttcaccagcagcctgagaatcagcaacctgagcctgatgcacaacggcaactacacctgcatcgccagaaacgaggccgccgccgtggagcaccagagccagctgatcgtgagagtgccccccaagttcgtggtgcagcccagagaccaggacggcatctacggcaaggccgtgatcctgaactgcagcgccgagggctaccccgtgcccaccatcgtgtggaagttcagcaagggcgccggcgtgccccagttccagcccatcgccctgaacggcagaatccaggtgctgagcaacggcagcctgctgatcaagcacgtggtggaggaggacagcggctactacctgtgcaaggtgagcaacgacgtgggcgccgacgtgagcaagagcatgtacctgaccgtgaagatccccgccatgatcaccagctaccccaacaccaccctggccacccagggccagaagaaggagatgagctgcaccgcccacggcgagaagcccatcatcgtgagatgggagaaggaggacagaatcatcaaccccgagatggccagatacctggtgagcaccaaggaggtgggcgaggaggtgatcagcaccctgcagatcctgcccaccgtgagagaggacagcggcttcttcagctgccacgccatcaacagctacggcgaggacagaggcatcatccagctgaccgtgcaggagccccccgacccccccgagatcgagatcaaggacgtgaaggccagaaccatcaccctgagatggaccatgggcttcgacggcaacagccccatcaccggctacgacatcgagtgcaagaacaagagcgacagctgggacagcgcccagagaaccaaggacgtgagcccccagctgaacagcgccaccatcatcgacatccaccccagcagcacctacagcatcagaatgtacgccaagaacagaatcggcaagagcgagcccagcaacgagctgaccatcaccgccgacgaggccgcccccgacggccccccccaggaggtgcacctggagcccatcagcagccagagcatcagagtgacctggaaggcccccaagaagcacctgcagaacggcatcatcagaggctaccagatcggctacagagagtacagcaccggcggcaacttccagttcaacatcatcagcgtggacaccagcggcgacagcgaggtgtacaccctggacaacctgaacaagttcacccagtacggcctggtggtgcaggcctgcaacagagccggcaccggccccagcagccaggagatcatcaccaccaccctggaggacgtgcccagctacccccccgagaacgtgcaggccatcgccaccagccccgagagcatcagcatcagctggagcaccctgagcaaggaggccctgaacggcatcctgcagggcttcagagtgatctactgggccaacctgatggacggcgagctgggcgagatcaagaacatcaccaccacccagcccagcctggagctggacggcctggagaagtacaccaactacagcatccaggtgctggccttcaccagagccggcgacggcgtgagaagcgagcagatcttcaccagaaccaaggaggacgtgcccggcccccccgccggcgtgaaggccgccgccgccagcgccagcatggtgttcgtgagctggctgccccccctgaagctgaacggcatcatcagaaagtacaccgtgttctgcagccacccctaccccaccgtgatcagcgagttcgaggccagccccgacagcttcagctacagaatccccaacctgagcagaaacagacagtacagcgtgtgggtggtggccgtgaccagcgccggcagaggcaacagcagcgagatcatcaccgtggagcccctggccaaggcccccgccagaatcctgaccttcagcggcaccgtgaccaccccctggatgaaggacatcgtgctgccctgcaaggccgtgggcgaccccagccccgccgtgaagtggatgaaggacagcaacggcacccccagcctggtgaccatcgacggcagaagaagcatcttcagcaacggcagcttcatcatcagaaccgtgaaggccgaggacagcggctactacagctgcatcgccaacaacaactggggcagcgacgagatcatcctgaacctgcaggtgcaggtgccccccgaccagcccagactgaccgtgagcaagaccaccagcagcagcatcaccctgagctggctgcccggcgacaacggcggcagcagcatcagaggctacatcctgcagtacagcgaggacaacagcgagcagtggggcagcttccccatcagccccagcgagagaagctacagactggagaacctgaagtgcggcacctggtacaagttcaccctgaccgcccagaacggcgtgggccccggcagaatcagcgagatcatcgaggccaagaccctgggcaaggagccccagttcagcaaggagcaggagctgttcgccagcatcaacaccaccagagtgagactgaacctgatcggctggaacgacggcggctgccccatcaccagcttcaccctggagtacagacccttcggcaccaccgtgtggaccaccgcccagagaaccagcctgagcaagagctacatcctgtacgacctgcaggaggccacctggtacgagctgcagatgagagtgtgcaacagcgccggctgcgccgagaagcaggccaacttcgccaccctgaactacgacggcagcaccatcccccccctgatcaagagcgtggtgcagaacgaggagggcctgaccaccaacgagggcctgaagatgctggtgaccatcagctgcatcctggtgggcgtgctgctgctgttcgtgctgctgctggtggtgagaagaagaagaagagagcagagactgaagagactgagagacgccaagagcctggccgagatgctgatgagcaagaacaccagaaccagcgacaccctgagcaagcagcagcagaccctgagaatgcacatcgacatccccagagcccagctgctgatcgaggagagagacaccatggagaccatcgacgacagaagcaccgtgctgctgaccgacgccgacttcggcgaggccgccaagcagaagagcctgaccgtgacccacaccgtgcactaccagagcgtgagccaggccaccggccccctggtggacgtgagcgacgccagacccggcaccaaccccaccaccagaagaaacgccaaggccggccccaccgccagaaacagatacgccagccagtggaccctgaacagaccccaccccaccatcagcgcccacaccctgaccaccgactggagactgcccacccccagagccgccggcagcgtggacaaggagagcgacagctacagcgtgagccccagccaggacaccgacagagccagaagcagcatggtgagcaccgagagcgccagcagcacctacgaggagctggccagagcctacgagcacgccaagatggaggagcagctgagacacgccaagttcaccatcaccgagtgcttcatcagcgacaccagcagcgagcagctgaccgccggcaccaacgagtacaccgacagcctgaccagcagcacccccagcgagagcggcatctgcagattcaccgccagcccccccaagccccaggacggcggcagagtgatgaacatggccgtgcccaaggcccacagacccggcgacctgatccacctgcccccctacctgagaatggacttcctgctgaacagaggcggccccggcaccagcagagacctgagcctgggccaggcctgcctggagccccagaagagcagaaccctgaagagacccaccgtgctggagcccatccccatggaggccgccagcagcgccagcagcaccagagagggccagagctggcagcccggcgccgtggccaccctgccccagagagagggcgccgagctgggccaggccgccaagatgagcagcagccaggagagcctgctggacagcagaggccacctgaagggcaacaacccctacgccaagagctacaccctggtgtag

SEQ ID NO: 79650 - DNA, 6342 bp, synthetic construct
  misc_feature 1..6342: note = Description of Artificial Sequence: Synthetic coding sequence
  source 1..6342: mol_type = other DNA
atgaccggcgccggcgagcccagaagagaggagccccccccccagcccagcgccggcctgagaagcagagagagcggcgcccccagcgccggcggctgggagagagccgagagaggcagaggcgccgccgccagacccgccaccggccccccccccagaagaatcggccccctgtacggcatgtggctggtgaccttcctgctgctgctggacagcctgcacaaggccagacccgaggacgtgggcaccagcctgtacttcgtgaacgacagcctgcagcaggtgaccttcagcagcagcgtgggcgtggtggtgccctgccccgccgccggcagccccagcgccgccctgagatggtacctggccaccggcgacgacatctacgacgtgccccacatcagacacgtgcacgccaacggcaccctgcagctgtaccccttcagccccagcgccttcaacagcttcatccacgacaacgactacttctgcaccgccgagaacgccgccggcaagatcagaagccccaacatcagagtgaaggccgtgttcagagagccctacaccgtgagagtggaggaccagagaagcatgagaggcaacgtggccgtgttcaagtgcctgatccccagcagcgtgcaggagtacgtgagcgtggtgagctgggagaaggacaccgtgagcatcatccccgagcacagattcttcatcacctaccacggcggcctgtacatcagcgacgtgcagaaggaggacgccctgagcacctacagatgcatcaccaagcacaagtacagcggcgagaccagacagagcaacggcgccagactgagcgtgaccgaccccgccgagagcatccccaccatcctggacggcttccacagccaggaggtgtgggccggccacaccgtggagctgccctgcaccgccagcggctaccccatccccgccatcagatggctgaaggacggcagacccctgcccgccgacagcagatggaccaagagaatcaccggcctgaccatcagcgacctgagaaccgaggacagcggcacctacatctgcgaggtgaccaacaccttcggcagcgccgaggccaccggcatcctgatggtgatcgaccccctgcacgtgaccctgacccccaagaagctgaagaccggcatcggcagcaccgtgatcctgagctgcgccctgaccggcagccccgagttcaccatcagatggtacagaaacaccgagctggtgctgcccgacgaggccatcagcatcagaggcctgagcaacgagaccctgctgatcaccagcgcccagaagagccacagcggcgcctaccagtgcttcgccaccagaaaggcccagaccgcccaggacttcgccatcatcgccctggaggacggcacccccagaatcgtgagcagcttcagcgagaaggtggtgaaccccggcgagcagttcagcctgatgtgcgccgccaagggcgcccccccccccaccgtgacctgggccctggacgacgagcccatcgtgagagacggcagccacagaaccaaccagtacaccatgagcgacggcaccaccatcagccacatgaacgtgaccggcccccagatcagagacggcggcgtgtacagatgcaccgccagaaacctggtgggcagcgccgagtaccaggccagaatcaacgtgagaggcccccccagcatcagagccatgagaaacatcaccgccgtggccggcagagacaccctgatcaactgcagagtgatcggctacccctactacagcatcaagtggtacaaggacgccctgctgctgcccgacaaccacagacaggtggtgttcgagaacggcaccctgaagctgaccgacgtgcagaagggcatggacgagggcgagtacctgtgcagcgtgctgatccagccccagctgagcatcagccagagcgtgcacgtggccgtgaaggtgccccccctgatccagcccttcgagttcccccccgccagcatcggccagctgctgtacatcccctgcgtggtgagcagcggcgacatgcccatcagaatcacctggagaaaggacggccaggtgatcatcagcggcagcggcgtgaccatcgagagcaaggagttcatgagcagcctgcagatcagcagcgtgagcctgaagcacaacggcaactacacctgcatcgccagcaacgccgccgccaccgtgagcagagagagacagctgatcgtgagagtgccccccagattcgtggtgcagcccaacaaccaggacggcatctacggcaaggccggcgtgctgaactgcagcgtggacggctaccccccccccaaggtgatgtggaagcacgccaagggcagcggcaacccccagcagtaccaccccgtgcccctgaccggcagaatccagatcctgcccaacagcagcctgctgatcagacacgtgctggaggaggacatcggctactacctgtgccaggccagcaacggcgtgggcaccgacatcagcaagagcatgttcctgaccgtgaagatccccgccatgatcaccagccaccccaacaccaccatcgccatcaagggccacgccaaggagctgaactgcaccgccagaggcgagagacccatcatcatcagatgggagaagggcgacaccgtgatcgaccccgacagagtgatgagatacgccatcgccaccaaggacaacggcgacgaggtggtgagcaccctgaagctgaagcccgccgacagaggcgacagcgtgttcttcagctgccacgccatcaacagctacggcgaggacagaggcctgatccagctgaccgtgcaggagccccccgacccccccgagctggagatcagagaggtgaaggccagaagcatgaacctgagatggacccagagattcgacggcaacagcatcatcaccggcttcgacatcgagtacaagaacaagagcgacagctgggacttcaagcagagcaccagaaacatcagccccaccatcaaccaggccaacatcgtggacctgcaccccgccagcgtgtacagcatcagaatgtacagcttcaacaagatcggcagaagcgagcccagcaaggagctgaccatcagcaccgaggaggccgcccccgacggcccccccatggacgtgaccctgcagcccgtgaccagccagagcatccaggtgacctggaaggcccccaagaaggagctgcagaacggcgtgatcagaggctaccagatcggctacagagagaacagccccggcagcaacggccagtacagcatcgtggagatgaaggccaccggcgacagcgaggtgtacaccctggacaacctgaagaagttcgcccagtacggcgtggtggtgcaggccttcaacagagccggcaccggccccagcagcagcgagatcaacgccaccaccctggaggacgtgcccagccagccccccgagaacgtgagagccctgagcatcaccagcgacgtggccgtgatcagctggagcgagccccccagaagcaccctgaacggcgtgctgaagggctacagagtgatcttctggagcctgtacgtggacggcgagtggggcgagatgcagaacatcaccaccaccagagagagagtggagctgagaggcatggagaagttcaccaactacagcgtgcaggtgctggcctacacccaggccggcgacggcgtgagaagcagcgtgctgtacatccagaccaaggaggacgtgcccggcccccccgccggcatcaaggccgtgcccagcagcgccagcagcgtggtggtgagctggctgccccccaccaagcccaacggcgtgatcagaaagtacaccatcttctgcagcagccccggcagcggccagcccgcccccagcgagtacgagaccagccccgagcagctgttctacagaatcgcccacctgaacagaggccagcagtacctgctgtgggtggccgccgtgaccagcgccggcagaggcaacagcagcgagaaggtgaccatcgagcccgccggcaaggcccccgccaagatcatcagcttcggcggcaccgtgaccaccccctggatgaaggacgtgagactgccctgcaacagcgtgggcgaccccgcccccgccgtgaagtggaccaaggacagcgaggacagcgccatccccgtgagcatggacggccacagactgatccacaccaacggcaccctgctgctgagagccgtgaaggccgaggacagcggctactacacctgcaccgccaccaacaccggcggcttcgacaccatcatcgtgaacctgctggtgcaggtgccccccgaccagcccagactgaccgtgagcaagaccagcgccagcagcatcaccctgacctggatccccggcgacaacggcggcagcagcatcagaggcttcgtgctgcagtacagcgtggacaacagcgaggagtggaaggacgtgttcatcagcagcagcgagagaagcttcaagctggacagcctgaagtgcggcacctggtacaaggtgaagctggccgccaagaacagcgtgggcagcggcagaatcagcgagatcatcgaggccaagacccacggcagagagcccagcttcagcaaggaccagcacctgttcacccacatcaacagcacccacgccagactgaacctgcagggctggaacaacggcggctgccccatcaccgccatcgtgctggagtacagacccaagggcacctgggcctggcagggcctgagagccaacagcagcggcgaggtgttcctgaccgagctgagagaggccacctggtacgagctgagaatgagagcctgcaacagcgccggctgcggcaacgagaccgcccagttcgccaccctggactacgacggcagcaccatcccccccatcaagagcgcccagggcgagggcgacgacgtgaagaagctgttcaccatcggctgccccgtgatcctggccaccctgggcgtggccctgctgttcatcgtgagaaagaagagaaaggagaagagactgaagagactgagagacgccaagagcctggccgagatgctgatcagcaagaacaacagaagcttcgacacccccgtgaagggccccccccagggccccagactgcacatcgacatccccagagtgcagctgctgatcgaggacaaggagggcatcaagcagctgggcgacgacaaggccaccatccccgtgaccgacgccgagttcagccaggccgtgaacccccagagcttctgcaccggcgtgagcctgcaccaccccaccctgatccagagcaccggccccctgatcgacatgagcgacatcagacccggcaccaaccccgtgagcagaaagaacgtgaagagcgcccacagcaccagaaacagatacagcagccagtggaccctgaccaagtgccaggccagcacccccgccagaaccctgaccagcgactggagaaccgtgggcagccagcacggcgtgaccgtgaccgagagcgacagctacagcgccagcctgagccaggacaccgacaagggcagaaacagcatggtgagcaccgagagcgccagcagcacctacgaggagctggccagagcctacgagcacgccaagctggaggagcagctgcagcacgccaagttcgagatcaccgagtgcttcatcagcgacagcagcagcgaccagatgaccaccggcaccaacgagaacgccgacagcatgaccagcatgagcacccccagcgagcccggcatctgcagattcaccgccagcccccccaagccccaggacgccgacagaggcaagaacgtggccgtgcccatcccccacagagccaacaagagcgactactgcaacctgcccctgtacgccaagagcgaggccttcttcagaaaggccgacggcagagagccctgccccgtggtgccccccagagaggccagcatcagaaacctggccagaacctaccacacccaggccagacacctgaccctggaccccgccagcaagagcctgggcctgccccaccccggcgcccccgccgccgccagcaccgccaccctgccccagagaaccctggccatgcccgccccccccgccggcaccgccccccccgcccccggccccacccccgccgagccccccaccgcccccagcgccgccccccccgcccccagcaccgagccccccagagccggcggcccccacaccaagatgggcggcagcagagacagcctgctggagatgagcaccagcggcgtgggcagaagccagaagcagggcgccggcgcctacagcaagagctacaccctggtgtag

SEQ ID NO: 79651 - DNA, 5463 bp, synthetic construct
  misc_feature 1..5463: note = Description of Artificial Sequence: Synthetic coding sequence
  source 1..5463: mol_type = other DNA
atgctgccctactgggccggccacaccgtggagctgccctgcaccgccagcggctaccccatccccgccatcagatggctgaaggacggcagacccctgcccgccgacagcagatggaccaagagaatcaccggcctgaccatcagcgacctgagaaccgaggacagcggcacctacatctgcgaggtgaccaacaccttcggcagcgccgaggccaccggcatcctgatggtgatcgaccccctgcacgtgaccctgacccccaagaagctgaagaccggcatcggcagcaccgtgatcctgagctgcgccctgaccggcagccccgagttcaccatcagatggtacagaaacaccgagctggtgctgcccgacgaggccatcagcatcagaggcctgagcaacgagaccctgctgatcaccagcgcccagaagagccacagcggcgcctaccagtgcttcgccaccagaaaggcccagaccgcccaggacttcgccatcatcgccctggaggacggcacccccagaatcgtgagcagcttcagcgagaaggtggtgaaccccggcgagcagttcagcctgatgtgcgccgccaagggcgcccccccccccaccgtgacctgggccctggacgacgagcccatcgtgagagacggcagccacagaaccaaccagtacaccatgagcgacggcaccaccatcagccacatgaacgtgaccggcccccagatcagagacggcggcgtgtacagatgcaccgccagaaacctggtgggcagcgccgagtaccaggccagaatcaacgtgagaggcccccccagcatcagagccatgagaaacatcaccgccgtggccggcagagacaccctgatcaactgcagagtgatcggctacccctactacagcatcaagtggtacaaggacgccctgctgctgcccgacaaccacagacaggtggtgttcgagaacggcaccctgaagctgaccgacgtgcagaagggcatggacgagggcgagtacctgtgcagcgtgctgatccagccccagctgagcatcagccagagcgtgcacgtggccgtgaaggtgccccccctgatccagcccttcgagttcccccccgccagcatcggccagctgctgtacatcccctgcgtggtgagcagcggcgacatgcccatcagaatcacctggagaaaggacggccaggtgatcatcagcggcagcggcgtgaccatcgagagcaaggagttcatgagcagcctgcagatcagcagcgtgagcctgaagcacaacggcaactacacctgcatcgccagcaacgccgccgccaccgtgagcagagagagacagctgatcgtgagagtgccccccagattcgtggtgcagcccaacaaccaggacggcatctacggcaaggccggcgtgctgaactgcagcgtggacggctaccccccccccaaggtgatgtggaagcacgccaagggcagcggcaacccccagcagtaccaccccgtgcccctgaccggcagaatccagatcctgcccaacagcagcctgctgatcagacacgtgctggaggaggacatcggctactacctgtgccaggccagcaacggcgtgggcaccgacatcagcaagagcatgttcctgaccgtgaagatccccgccatgatcaccagccaccccaacaccaccatcgccatcaagggccacgccaaggagctgaactgcaccgccagaggcgagagacccatcatcatcagatgggagaagggcgacaccgtgatcgaccccgacagagtgatgagatacgccatcgccaccaaggacaacggcgacgaggtggtgagcaccctgaagctgaagcccgccgacagaggcgacagcgtgttcttcagctgccacgccatcaacagctacggcgaggacagaggcctgatccagctgaccgtgcaggagccccccgacccccccgagctggagatcagagaggtgaaggccagaagcatgaacctgagatggacccagagattcgacggcaacagcatcatcaccggcttcgacatcgagtacaagaacaagagcgacagctgggacttcaagcagagcaccagaaacatcagccccaccatcaaccaggccaacatcgtggacctgcaccccgccagcgtgtacagcatcagaatgtacagcttcaacaagatcggcagaagcgagcccagcaaggagctgaccatcagcaccgaggaggccgcccccgacggcccccccatggacgtgaccctgcagcccgtgaccagccagagcatccaggtgacctggaaggcccccaagaaggagctgcagaacggcgtgatcagaggctaccagatcggctacagagagaacagccccggcagcaacggccagtacagcatcgtggagatgaaggccaccggcgacagcgaggtgtacaccctggacaacctgaagaagttcgcccagtacggcgtggtggtgcaggccttcaacagagccggcaccggccccagcagcagcgagatcaacgccaccaccctggaggacgtgcccagccagccccccgagaacgtgagagccctgagcatcaccagcgacgtggccgtgatcagctggagcgagccccccagaagcaccctgaacggcgtgctgaagggctacagagtgatcttctggagcctgtacgtggacggcgagtggggcgagatgcagaacatcaccaccaccagagagagagtggagctgagaggcatggagaagttcaccaactacagcgtgcaggtgctggcctacacccaggccggcgacggcgtgagaagcagcgtgctgtacatccagaccaaggaggacgtgcccggcccccccgccggcatcaaggccgtgcccagcagcgccagcagcgtggtggtgagctggctgccccccaccaagcccaacggcgtgatcagaaagtacaccatcttctgcagcagccccggcagcggccagcccgcccccagcgagtacgagaccagccccgagcagctgttctacagaatcgcccacctgaacagaggccagcagtacctgctgtgggtggccgccgtgaccagcgccggcagaggcaacagcagcgagaaggtgaccatcgagcccgccggcaaggcccccgccaagatcatcagcttcggcggcaccgtgaccaccccctggatgaaggacgtgagactgccctgcaacagcgtgggcgaccccgcccccgccgtgaagtggaccaaggacagcgaggacagcgccatccccgtgagcatggacggccacagactgatccacaccaacggcaccctgctgctgagagccgtgaaggccgaggacagcggctactacacctgcaccgccaccaacaccggcggcttcgacaccatcatcgtgaacctgctggtgcaggtgccccccgaccagcccagactgaccgtgagcaagaccagcgccagcagcatcaccctgacctggatccccggcgacaacggcggcagcagcatcagaggcttcgtgctgcagtacagcgtggacaacagcgaggagtggaaggacgtgttcatcagcagcagcgagagaagcttcaagctggacagcctgaagtgcggcacctggtacaaggtgaagctggccgccaagaacagcgtgggcagcggcagaatcagcgagatcatcgaggccaagacccacggcagagagcccagcttcagcaaggaccagcacctgttcacccacatcaacagcacccacgccagactgaacctgcagggctggaacaacggcggctgccccatcaccgccatcgtgctggagtacagacccaagggcacctgggcctggcagggcctgagagccaacagcagcggcgaggtgttcctgaccgagctgagagaggccacctggtacgagctgagaatgagagcctgcaacagcgccggctgcggcaacgagaccgcccagttcgccaccctggactacgacggcagcaccatcccccccatcaagagcgcccagggcgagggcgacgacgtgaagaagctgttcaccatcggctgccccgtgatcctggccaccctgggcgtggccctgctgttcatcgtgagaaagaagagaaaggagaagagactgaagagactgagagacgccaagagcctggccgagatgctgatcagcaagaacaacagaagcttcgacacccccgtgaagggccccccccagggccccagactgcacatcgacatccccagagtgcagctgctgatcgaggacaaggagggcatcaagcagctgggcgacgacaaggccaccatccccgtgaccgacgccgagttcagccaggccgtgaacccccagagcttctgcaccggcgtgagcctgcaccaccccaccctgatccagagcaccggccccctgatcgacatgagcgacatcagacccggcaccaaccccgtgagcagaaagaacgtgaagagcgcccacagcaccagaaacagatacagcagccagtggaccctgaccaagtgccaggccagcacccccgccagaaccctgaccagcgactggagaaccgtgggcagccagcacggcgtgaccgtgaccgagagcgacagctacagcgccagcctgagccaggacaccgacaagggcagaaacagcatggtgagcaccgagagcgccagcagcacctacgaggagctggccagagcctacgagcacgccaagctggaggagcagctgcagcacgccaagttcgagatcaccgagtgcttcatcagcgacagcagcagcgaccagatgaccaccggcaccaacgagaacgccgacagcatgaccagcatgagcacccccagcgagcccggcatctgcagattcaccgccagcccccccaagccccaggacgccgacagaggcaagaacgtggccgtgcccatcccccacagagccaacaagagcgactactgcaacctgcccctgtacgccaagagcgaggccttcttcagaaaggccgacggcagagagccctgccccgtggtgccccccagagaggccagcatcagaaacctggccagaacctaccacacccaggccagacacctgaccctggaccccgccagcaagagcctgggcctgccccaccccggcgcccccgccgccgccagcaccgccaccctgccccagagaaccctggccatgcccgccccccccgccggcaccgccccccccgcccccggccccacccccgccgagccccccaccgcccccagcgccgccccccccgcccccagcaccgagccccccagagccggcggcccccacaccaagatgggcggcagcagagacagcctgctggagatgagcaccagcggcgtgggcagaagccagaagcagggcgccggcgcctacagcaagagctacaccctggtgtag

SEQ ID NO: 79652 - DNA, 762 bp, synthetic construct
  misc_feature 1..762: note = Description of Artificial Sequence: Synthetic coding sequence
  source 1..762: mol_type = other DNA
atggagggcaccgtgaacctgcagctgagcgccaagagcgtgggcgtgttcgaggccttctacaacagcgtgaagcccatccagatcatcaacagcaccatcgagatggtgaagcccggcaagttccccagcggcaagaccgagatccccttcgagttccccctgcacctgaagggcaacaaggtgctgtacgagacctaccacggcgtgttcgtgaacatccagtacaccctgagatgcgacatgaagagaagcctgctggccaaggacctgaccaagacctgcgagttcatcgtgcacagcgccccccagaagggcaagttcacccccagccccgtggacttcaccatcacccccgagaccctgcagaacgtgaaggagagagccctgctgcccaagttcctgctgagaaccagccagctgaacaagctgtgccaccacgccgccaccaacggcagagccggcggcggcgagctgggcagcagacaccagaagagaggcgccgccgccggcgccagaggcgacgtgagagtgtgcagatacgccagagacgccaccgagatccagaacatccagatcgccgacggcgacgtgtgcagaggcctgagcgtgcccatctacatggtgttccccagactgttcacctgccccaccctggagaccaccaacttcaaggtggagttcgaggtgaacatcgtggtgctgctgcaccccgaccacctgatcaccgagaacttccccctgaagctgtgcagaatctag

SEQ ID NO: 79653 - DNA, 894 bp, synthetic construct
  misc_feature 1..894: note = Description of Artificial Sequence: Synthetic coding sequence
  source 1..894: mol_type = other DNA
atgggcaccgccctggacatcaagatcaagagagccaacaaggtgtaccacgccggcgaggtgctgagcggcgtggtggtgatcagcagcaaggacagcgtgcagcaccagggcgtgagcctgaccatggagggcaccgtgaacctgcagctgagcgccaagagcgtgggcgtgttcgaggccttctacaacagcgtgaagcccatccagatcatcaacagcaccatcgagatggtgaagcccggcaagttccccagcggcaagaccgagatccccttcgagttccccctgcacctgaagggcaacaaggtgctgtacgagacctaccacggcgtgttcgtgaacatccagtacaccctgagatgcgacatgaagagaagcctgctggccaaggacctgaccaagacctgcgagttcatcgtgcacagcgccccccagaagggcaagttcacccccagccccgtggacttcaccatcacccccgagaccctgcagaacgtgaaggagagagccctgctgcccaagttcctgctgagaggccacctgaacagcaccaactgcgtgatcacccagcccctgaccggcgagctggtggtggagagcagcgaggccgccatcagaagcgtggagctgcagctggtgagagtggagacctgcggctgcgccgagggctacgccagagacgccaccgagatccagaacatccagatcgccgacggcgacgtgtgcagaggcctgagcgtgcccatctacatggtgttccccagactgttcacctgccccaccctggagaccaccaacttcaaggtggagttcgaggtgaacatcgtggtgctgctgcaccccgaccacctgatcaccgagaacttccccctgaagctgtgcagaatctag

SEQ ID NO: 79654 - DNA, 519 bp, synthetic construct
  misc_feature 1..519: note = Description of Artificial Sequence: Synthetic coding sequence
  source 1..519: mol_type = other DNA
atgggcaccgccctggacatcaagatcaagagagccaacaaggtgtaccacgccggcccccagaagggcaagttcacccccagccccgtggacttcaccatcacccccgagaccctgcagaacgtgaaggagagagccctgctgcccaagttcctgctgagaggccacctgaacagcaccaactgcgtgatcacccagcccctgaccggcgagctggtggtggagagcagcgaggccgccatcagaagcgtggagctgcagctggtgagagtggagacctgcggctgcgccgagggctacgccagagacgccaccgagatccagaacatccagatcgccgacggcgacgtgtgcagaggcctgagcgtgcccatctacatggtgttccccagactgttcacctgccccaccctggagaccaccaacttcaaggtggagttcgaggtgaacatcgtggtgctgctgcaccccgaccacctgatcaccgagaacttccccctgaagctgtgcagaatctag

SEQ ID NO: 79655 - DNA, 813 bp, synthetic construct
  misc_feature 1..813: note = Description of Artificial Sequence: Synthetic coding sequence
  source 1..813: mol_type = other DNA
atgggcaccgccctggacatcaagatcaagagagccaacaaggtgtaccacgccggcgaggtgctgagcggcgtggtggtgatcagcagcaaggacagcgtgcagcaccagggcgtgagcctgaccatggagggcaccgtgaacctgcagctgagcgccaagagcgtgggcgtgttcgaggccttctacaacagcgtgaagcccatccagatcatcaacagcaccatcgagatggtgaagcccggcaagttccccagcggcaagaccgagatccccttcgagttccccctgcacctgaagggcaacaaggtgctgtacgagacctaccacggcgtgttcgtgaacatccagccccagaagggcaagttcacccccagccccgtggacttcaccatcacccccgagaccctgcagaacgtgaaggagagagccctgctgcccaagttcctgctgagaggccacctgaacagcaccaactgcgtgatcacccagcccctgaccggcgagctggtggtggagagcagcgaggccgccatcagaagcgtggagctgcagctggtgagagtggagacctgcggctgcgccgagggctacgccagagacgccaccgagatccagaacatccagatcgccgacggcgacgtgtgcagaggcctgagcgtgcccatctacatggtgttccccagactgttcacctgccccaccctggagaccaccaacttcaaggtggagttcgaggtgaacatcgtggtgctgctgcaccccgaccacctgatcaccgagaacttccccctgaagctgtgcagaatctag

SEQ ID NO: 79656 - DNA, 663 bp, synthetic construct
  misc_feature 1..663: note = Description of Artificial Sequence: Synthetic coding sequence
  source 1..663: mol_type = other DNA
atgggcaccgccctggacatcaagatcaagagagccaacaaggtgtaccacgccggcgaggtgctgagcggcgtggtggtgatcagcagcaaggacagcgtgcagcaccagggcgtgagcctgaccatggagggcaccgtgaacctgcagctgagcgccaagagcgtgggcgtgttcgaggccttctacaacagcgtgaagccccagaagggcaagttcacccccagccccgtggacttcaccatcacccccgagaccctgcagaacgtgaaggagagagccctgctgcccaagttcctgctgagaggccacctgaacagcaccaactgcgtgatcacccagcccctgaccggcgagctggtggtggagagcagcgaggccgccatcagaagcgtggagctgcagctggtgagagtggagacctgcggctgcgccgagggctacgccagagacgccaccgagatccagaacatccagatcgccgacggcgacgtgtgcagaggcctgagcgtgcccatctacatggtgttccccagactgttcacctgccccaccctggagaccaccaacttcaaggtggagttcgaggtgaacatcgtggtgctgctgcaccccgaccacctgatcaccgagaacttccccctgaagctgtgcagaatctag

SEQ ID NO: 79657 - DNA, 357 bp, synthetic construct
  misc_feature 1..357: note = Description of Artificial Sequence: Synthetic coding sequence
  source 1..357: mol_type = other DNA
atgagcctgatcatcctgaccagagacgacgagcccagaatcttcacccccgacagcgacgccgccagccccgccctgcacagcaccagccccctgcccgaccccgccagcgccagccccctgcacagagaggagaagatcctgcccaaggtgtgcaacatcgtgagctgcctgagcttcagcctgcccgccagccccaccgacagcggcctggccagccccaccatcatcaccagagagggccagcagttctgggccaagtgcctgatctggaagtaccagctgtacctgcacggcctgcacaagaagagcgacggcagaagagacaagcagatcagcgccagccccagcacctag

SEQ ID NO: 79658 - DNA, 573 bp, synthetic construct
  misc_feature 1..573: note = Description of Artificial Sequence: Synthetic coding sequence
  source 1..573: mol_type = other DNA
atggagcccgaggccgccgccggcgccagaaaggccagaggcagaggctgccactgccccggcgacgccccctggagaccccccccccccagaggccccgagagccccgccccctggagaccctggatccagacccccggcgacgccgagctgaccagaaccggcagacccctggagcccagagccgaccagcacaccttcggcagcaagggcgccttcggcttccagcaccccgtgagagtgtacctgcccatgagcaagagacaggagtacctgagaagcagcggcgagcaggtgctggccagcttccccgtgcaggccaccatcgacttctacgacgacgagagcaccgagagcgccagcgaggccgaggagcccgaggagggccccccccccctgcacctgctgccccaggaggtgggcggcagacaggagaacggccccggcggcaagggcagagaccagggcatcaaccagggccagagaagcagcggcggcggcgaccactggggcgagggccccctgccccagggcgtgagcagcagaggcggcaagtgcagcagcagcaagtag

SEQ ID NO: 79659 - DNA, 294 bp, synthetic construct
  misc_feature 1..294: note = Description of Artificial Sequence: Synthetic coding sequence
  source 1..294: mol_type = other DNA
atgaaggagcccggccccaacttcgtgaccgtgagaaagggcctgcacagcttcaagatggccttcgtgaagcacctgctgctgttcctgagccccagactggagtgcagcggcagcatcaccgaccactgcagcctgcacctgcccgtgcaggagatcctgatgagccagccccccgagcagctgggcctgcagaccaacctgggcaaccaggagagcagcggcatgatgaagctgttcatgcccagacccaaggtgctggcccagtacgagagcatccagttcatgccctag

SEQ ID NO: 79660 - DNA, 276 bp, synthetic construct
  misc_feature 1..276: note = Description of Artificial Sequence: Synthetic coding sequence
  source 1..276: mol_type = other DNA
atgaaggagcccggccccaacttcgtgaccgtgagaaagggcctgcacagcttcaagatggccttcgtgaagcacctgctgctggagtgcagcggcagcatcaccgaccactgcagcctgcacctgcccgtgcaggagatcctgatgagccagccccccgagcagctgggcctgcagaccaacctgggcaaccaggagagcagcggcatgatgaagctgttcatgcccagacccaaggtgctggcccagtacgagagcatccagttcatgccctag

SEQ ID NO: 79661 - DNA, 531 bp, synthetic construct
  misc_feature 1..531: note = Description of Artificial Sequence: Synthetic coding sequence
  source 1..531: mol_type = other DNA
atggccagcagcagcggcaacgacgacgacctgaccatccccagagccgccatcaacaagatgatcaaggagaccctgcccaacgtgagagtggccaacgacgccagagagctggtggtgaactgctgcaccgagttcatccacctgatcagcagcgaggccaacgagatctgcaacaagagcgagaagaagaccatcagccccgagcacgtgatccaggccctggagagcctgggcttcggcagctacatcagcgaggtgaaggaggtgctgcaggagtgcaagaccgtggccctgaagagaagaaaggccagcagcagactggagaacctgggcatccccgaggaggagctgctgagacagcagcaggagctgttcgccaaggccagacagcagcaggccgagctggcccagcaggagtggctgcagatgcagcaggccgcccagcaggcccagctggccgccgccagcgccagcgccagcaaccaggccggcagcagccaggacgaggaggacgacgacgacatctag

SEQ ID NO: 79662 - DNA, 531 bp, synthetic construct; identical to SEQ ID NO: 79661
  misc_feature 1..531: note = Description of Artificial Sequence: Synthetic coding sequence
  source 1..531: mol_type = other DNA

SEQ ID NO: 79663 - DNA, 1470 bp, synthetic construct
  misc_feature 1..1470: note = Description of Artificial Sequence: Synthetic coding sequence
  source 1..1470: mol_type = other DNA
atggagagcatgttcagcagccccgccgaggccgccctgcagagagagaccggcgtgcccggcctgctgacccccctgcccgacctggacggcgtgtacgagctggagagagtggccggcttcgtgagagacctgggctgcgagagagtggccctgcagttccccgaccagctgctgggcgacgccgtggccgtggccgccagactggaggagaccaccggcagcaagatgttcatcctgggcgacaccgcctacggcagctgctgcgtggacgtgctgggcgccgagcaggccggcgcccaggccctgatccacttcggccccgcctgcctgagcccccccgccagacccctgcccgtggccttcgtgctgagacagagaagcgtggccctggagctgtgcgtgaaggccttcgaggcccagaaccccgaccccaaggcccccgtggtgctgctgagcgagcccgcctgcgcccacgccctggaggccctggccaccctgctgagacccagatacctggacctgctggtgagcagccccgccttcccccagcccgtgggcagcctgagccccgagcccatgcccctggagagattcggcagaagattccccctggcccccggcagaagactggaggagtacggcgccttctacgtgggcggcagcaaggccagccccgaccccgacctggaccccgacctgagcagactgctgctgggctgggcccccggccagcccttcagcagctgctgccccgacaccggcaagacccaggacgagggcgccagagccggcagactgagagccagaagaagatacctggtggagagagccagagacgccagagtggtgggcctgctggccggcaccctgggcgtggcccagcacagagaggccctggcccacctgagaaacctgacccaggccgccggcaagagaagctacgtgctggccctgggcagacccacccccgccaagctggccaacttccccgaggtggacgtgttcgtgctgctggcctgccccctgggcgccctggccccccagctgagcggcagcttcttccagcccatcctggccccctgcgagctggaggccgcctgcaaccccgcctggcccccccccggcctggccccccacctgacccactacgccgacctgctgcccggcagccccttccacgtggccctgcccccccccgagagcgagctgtgggagacccccgacgtgagcctgatcaccggcgacctgagacccccccccgcctggaagagcagcaacgaccacggcagcctggccctgacccccagaccccagctggagctggccgagagcagccccgccgccagcttcctgagcagcagaagctggcagggcctggagcccagactgggccagacccccgtgaccgaggccgtgagcggcagaagaggcatcgccatcgcctacgaggacgagggcagcggctag

SEQ ID NO: 79664 - DNA, 786 bp, synthetic construct
  misc_feature 1..786: note = Description of Artificial Sequence: Synthetic coding sequence
  source 1..786: mol_type = other DNA
atggagagcatgttcagcagccccgccgaggccgccctgcagagagagaccggcgtgcccggcctgctgacccccctgcccgacctggacggcgtgtacgagctggagagagtggccggcttcgtgagagacctgggctgcgagagagtggccctgcagttccccgaccagctgctgggcgacgccgtggccgtggccgccagactggaggagaccaccggcagcaagatgttcatcctgggcgacaccgcctacggcagctgctgcgtggacgtgctgggcgccgagcaggccggcgcccaggccctgatccacttcggccccgcctgcctgagcccccccgccagacccctgcccgtggccttcgtgctgagacagagaagcgtggccctggagctgtgcgtgaaggccttcgaggcccagaaccccgaccccaaggcccccgtggtgctgctgagcgagcccgcctgcgcccacgccctgggcagccccttccacgtggccctgcccccccccgagagcgagctgtgggagacccccgacgtgagcctgatcaccggcgacctgagacccccccccgcctggaagagcagcaacgaccacggcagcctggccctgacccccagaccccagctggagctggccgagagcagccccgccgccagcttcctgagcagcagaagctggcagggcctggagcccagactgggccagacccccgtgaccgaggccgtgagcggcagaagaggcatcgccatcgcctacgaggacgagggcagcggctag

SEQ ID NO: 79665 - DNA, 1065 bp, synthetic construct
  misc_feature 1..1065: note = Description of Artificial Sequence: Synthetic coding sequence
  source 1..1065: mol_type = other DNA
atgctgtggctgtggctgcacgactggagaagaagacagggccagagatgcagcttctgggtgacccagcccaccgccgaggccctggccaccctgctgagacccagatacctggacctgctggtgagcagccccgccttcccccagcccgtgggcagcctgagccccgagcccatgcccctggagagattcggcagaagattccccctggcccccggcagaagactggaggagtacggcgccttctacgtgggcggcagcaaggccagccccgaccccgacctggaccccgacctgagcagactgctgctgggctgggcccccggccagcccttcagcagctgctgccccgacaccggcaagacccaggacgagggcgccagagccggcagactgagagccagaagaagatacctggtggagagagccagagacgccagagtggtgggcctgctggccggcaccctgggcgtggcccagcacagagaggccctggcccacctgagaaacctgacccaggccgccggcaagagaagctacgtgctggccctgggcagacccacccccgccaagctggccaacttccccgaggtggacgtgttcgtgctgctggcctgccccctgggcgccctggccccccagctgagcggcagcttcttccagcccatcctggccccctgcgagctggaggccgcctgcaaccccgcctggcccccccccggcctggccccccacctgacccactacgccgacctgctgcccggcagccccttccacgtggccctgcccccccccgagagcgagctgtgggagacccccgacgtgagcctgatcaccggcgacctgagacccccccccgcctggaagagcagcaacgaccacggcagcctggccctgacccccagaccccagctggagctggccgagagcagccccgccgccagcttcctgagcagcagaagctggcagggcctggagcccagactgggccagacccccgtgaccgaggccgtgagcggcagaagaggcatcgccatcgcctacgaggacgagggcagcggctag

SEQ ID NO: 79666 - DNA, 174 bp, synthetic construct
  misc_feature 1..174: note = Description of Artificial Sequence: Synthetic coding sequence
  source 1..174: mol_type = other DNA
atggccgtgttccacgacgaggtggagatcgaggacttccagtacgacgaggacagcgagacctacttctacccctgcccctgcggcgacaacttcagcatcaccaaggaccagttcgtgtgcggcgagaccgtgcccgcccccagcgccaacaaggagctggtgaagtgctag

SEQ ID NO: 79667 - DNA, 249 bp, synthetic construct
  misc_feature 1..249: note = Description of Artificial Sequence: Synthetic coding sequence
  source 1..249: mol_type = other DNA
atggccgtgttccacgacgaggtggagatcgaggacttccagtacgacgaggacagcgagacctacttctacccctgcccctgcggcgacaacttcagcatcaccaaggaggacctggagaacggcgaggacgtggccacctgccccagctgcagcctgatcatcaaggtgatctacgacaaggaccagttcgtgtgcggcgagaccgtgcccgcccccagcgccaacaaggagctggtgaagtgctag

SEQ ID NO: 79668 - DNA, 855 bp, synthetic construct
  misc_feature 1..855: note = Description of Artificial Sequence: Synthetic coding sequence
  source 1..855: mol_type = other DNA
atgctgtacctgatcggcctgggcctgggcgacgccaaggacatcaccgtgaagggcctggaggtggtgagaagatgcagcagagtgtacctggaggcctacaccagcgtgctgaccgtgggcaaggaggccctggaggagttctacggcagaaagctggtggtggccgacagagaggaggtggagcaggaggccgacaacatcctgaaggacgccgacatcagcgacgtggccttcctggtggtgggcgaccccttcggcgccaccacccacagcgacctggtgctgagagccaccaagctgggcatcccctacagagtgatccacaacgccagcatcatgaacgccgtgggctgctgcggcctgcagctgtacaagttcggcgagaccgtgagcatcgtgttctggaccgacacctggagacccgagagcttcttcgacaaggtgaagaagaacagacagaacggcatgcacaccctgtgcctgctggacatcaaggtgaaggagcagagcctggagaacctgatcaagggcagaaagatctacgagccccccagatacatgagcgtgaaccaggccgcccagcagctgctggagatcgtgcagaaccagagaatcagaggcgaggagcccgtgaccgaggagaccctgtgcgtgggcctggccagagtgggcgccgacgaccagaagatcgccgccggcaccctgagacagatgtgcaccgtggacctgggcgagcccctgcacagcctgatcatcaccggcggcagcatccaccccatggagatggagatgctgagcctgttcagcatccccgagaacagcagcgagagccagagcatcaacggcctgtag

SEQ ID NO: 79669 - DNA, 858 bp, synthetic construct
  misc_feature 1..858: note = Description of Artificial Sequence: Synthetic coding sequence
  source 1..858: mol_type = other DNA
atgctgtacctgatcggcctgggcctgggcgacgccaaggacatcaccgtgaagggcctggaggtggtgagaagatgcagcagagtgtacctggaggcctacaccagcgtgctgaccgtgggcaaggaggccctggaggagttctacggcagaaagctggtggtggccgacagagaggaggtggagcaggaggccgacaacatcctgaaggacgccgacatcagcgacgtggccttcctggtggtgggcgaccccttcggcgccaccacccacagcgacctggtgctgagagccaccaagctgggcatcccctacagagtgatccacaacgccagcatcatgaacgccgtgggctgctgcggcctgcagctgtacaagttcggcgagaccgtgagcatcgtgttctggaccgacacctggagacccgagagcttcttcgacaaggtgaagaagaacagacagaacggcatgcacaccctgtgcctgctggacatcaaggtgaaggagcagagcctggagaacctgatcaagggcagaaagatctacgagccccccagatacatgagcgtgaaccaggccgcccagcagctgctggagatcgtgcagaaccagagaatcagaggcgaggagcccgccgtgaccgaggagaccctgtgcgtgggcctggccagagtgggcgccgacgaccagaagatcgccgccggcaccctgagacagatgtgcaccgtggacctgggcgagcccctgcacagcctgatcatcaccggcggcagcatccaccccatggagatggagatgctgagcctgttcagcatccccgagaacagcagcgagagccagagcatcaacggcctgtag

SEQ ID NO: 79670 - DNA, 705 bp, synthetic construct
  misc_feature 1..705: note = Description of Artificial Sequence: Synthetic coding sequence
  source 1..705: mol_type = other DNA
atgctgtacctgatcggcctgggcctgggcgacgccaaggacatcaccgtgaagggcctggaggtggtgagaagatgcagcagagtgtacctggaggcctacaccagcgtgctgaccgtgggcaaggaggccctggaggagttctacggcagaaagctggtggtggccgacagagaggaggtggagcaggaggccgacaacatcctgaaggacgccgacatcagcgacgtggccttcctggtggtgggcgaccccaccgacacctggagacccgagagcttcttcgacaaggtgaagaagaacagacagaacggcatgcacaccctgtgcctgctggacatcaaggtgaaggagcagagcctggagaacctgatcaagggcagaaagatctacgagccccccagatacatgagcgtgaaccaggccgcccagcagctgctggagatcgtgcagaaccagagaatcagaggcgaggagcccgccgtgaccgaggagaccctgtgcgtgggcctggccagagtgggcgccgacgaccagaagatcgccgccggcaccctgagacagatgtgcaccgtggacctgggcgagcccctgcacagcctgatcatcaccggcggcagcatccaccccatggagatggagatgctgagcctgttcagcatccccgagaacagcagcgagagccagagcatcaacggcctgtag

SEQ ID NO: 79671 - DNA, 141 bp, synthetic construct
  misc_feature 1..141: note = Description of Artificial Sequence: Synthetic coding sequence
  source 1..141: mol_type = other DNA
atgtgcaccgtggacctgggcgagcccctgcacagcctgatcatcaccggcggcagcatccaccccatggagatggagatgctgagcctgttcagcatccccgagaacagcagcgagagccagagcatcaacggcctgtag

SEQ ID NO: 79672 - DNA, 855 bp, synthetic construct
  misc_feature 1..855: note = Description of Artificial Sequence: Synthetic coding sequence
  source 1..855: mol_type = other DNA
atgctgtacctgatcggcctgggcctgggcgacgccaaggacatcaccgtgaagggcctggaggtggtgagaagatgcagcagagtgtacctggaggcctacaccagcgtgctgaccgtgggcaaggaggccctggaggagttctacggcagaaagctggtggtggccgacagagaggaggtggagcaggaggccgacaacatcctgaaggacgccgacatcagcgacgtggccttcctggtggtgggcgaccccttcggcgccaccacccacagcgacctggtgctgagagccaccaagctgggcatcccctacagagtgatccacaacgccagcatcatgaacgccgtgggctgctgcggcctgcagtacatcagcctggagagacagttcctgctgttcttcggccagaccctgggccccgagagcttcttcgacaaggtgaagaagaacagacagaacggcatgcacaccctgtgcctgctggacatcaaggtgaaggagcagagcctggagaacctgatcaagggcagaaagatctacgagccccccagatacatgagcgtgaaccaggccgcccagcagctgctggagatcgtgcagaaccagagaatcagaggcgaggagcccgccgtgaccgaggagaccctgtgcgtgggcctggccagagtgggcgccgacgaccagaagatcgccgccggcaccctgagacagatgtgcaccgtggacctgggcgagcccctgcacagcctgatcatcaccggcggcagcatccaccccatggagatggagatgctgagcctgttcagcatccccgagaacagcagcgagagccagagcatcaacggcctgtag

SEQ ID NO: 79673 - DNA, 858 bp, synthetic construct; identical to SEQ ID NO: 79669
  misc_feature 1..858: note = Description of Artificial Sequence: Synthetic coding sequence
  source 1..858: mol_type = other DNA

SEQ ID NO: 79674 - DNA, 2028 bp, synthetic construct
  misc_feature 1..2028: note = Description of Artificial Sequence: Synthetic coding sequence
  source 1..2028: mol_type = other DNA
atggagggcagacccccccccgagggcagacccccccccagacccagaaccggcagagcccccagaggcagaagaagagccgtgttcgccgccgtgctgcactggagccacatcacccacctgttcgagaacgacagacacttcagccacctgagcaccctggagagagagatggccttcagaaccgagatgggcctgtactacagctacttcaagaccatcgtggaggcccccagcttcctgaacggcgtgtggatgatcatgaacgacaagctgaccgagtaccccctggtgatcaacaccctgaagagattcaacctgtaccccgaggtgatcctggccagctggtacagaatctacaccaagatcatggacctgatcggcatccagaccaagatctgctggaccgtgaccagaggcgagggcctgagccccatcgagagctgcgagggcctgggcgaccccgcctgcttctacgtggccgtgatcttcatcctgaacggcctgatgatggccctgttcttcatctacggcacctacctgagcggcagcagactgggcggcctggtgaccgtgctgtgcttcttcttcaaccacggcgagtgcaccagagtgatgtggaccccccccctgagagagagcttcagctaccccttcctggtgctgcagatgctgctggtgacccacatcctgagagccaccaagctgtacagaggcagcctgatcgccctgtgcatcagcaacgtgttcttcatgctgccctggcagttcgcccagttcgtgctgctgacccagatcgccagcctgttcgccgtgtacgtggtgggctacatcgacatctgcaagctgagaaagatcatctacatccacatgatcagcctggccctgtgcttcgtgctgatgttcggcaacagcatgctgctgaccagctactacgccagcagcctggtgatcatctggggcatcctggccatgaagccccacttcctgaagatcaacgtgagcgagctgagcctgtgggtgatccagggctgcttctggctgttcggcaccgtgatcctgaagtacctgaccagcaagatcttcggcatcgccgacgacgcccacatcggcaacctgctgaccagcaagttcttcagctacaaggacttcgacaccctgctgtacacctgcgccgccgagttcgacttcatggagaaggagacccccctgagatacaccaagaccctgctgctgcccgtggtgctggtggtgttcgtggccatcgtgagaaagatcatcagcgacatgtggggcgtgctggccaagcagcagacccacgtgagaaagcaccagttcgaccacggcgagctggtgtaccacgccctgcagctgctggcctacaccgccctgggcatcctgatcatgagactgaagctgttcctgaccccccacatgtgcgtgatggccagcctgatctgcagcagacagctgttcggctggctgttctgcaaggtgcaccccggcgccatcgtgttcgccatcctggccgccatgagcatccagggcagcgccaacctgcagacccagtggaacatcgtgggcgagttcagcaacctgccccaggaggagctgatcgagtggatcaagtacagcaccaagcccgacgccgtgttcgccggcgccatgcccaccatggccagcgtgaagctgagcgccctgagacccatcgtgaaccacccccactacgaggacgccggcctgagagccagaaccaagatcgtgtacagcatgtacagcagaaaggccgccgaggaggtgaagagagagctgatcaagctgaaggtgaactactacatcctggaggagagctggtgcgtgagaagaagcaagcccggctgcagcatgcccgagatctgggacgtggaggaccccgccaacgccggcaagacccccctgtgcaacctgctggtgaaggacagcaagccccacttcaccaccgtgttccagaacagcgtgtacaaggtgctggaggtggtgaaggagtag

SEQ ID NO: 79675 - DNA, 258 bp, synthetic construct
  misc_feature 1..258: note = Description of Artificial Sequence: Synthetic coding sequence
  source 1..258: mol_type = other DNA
atgtacagcagaaaggccgccgaggaggtgaagagagagctgatcaagctgaaggtgaactactacatcctggaggagagctggtgcgtgagaagaagcaagcccggctgcagcatgcccgagatctgggacgtggaggaccccgccaacgccggcaagacccccctgtgcaacctgctggtgaaggacagcaagccccacttcaccaccgtgttccagaacagcgtgtacaaggtgctggaggtggtgaaggagtag

SEQ ID NO: 79676 - DNA, 2277 bp, synthetic construct
  misc_feature 1..2277: note = Description of Artificial Sequence: Synthetic coding sequence
  source 1..2277: mol_type = other DNA
atgagaaagcagggcgtgagcagcaagagactgcagagcagcggcagaagccagagcaagggcagaagaggcgccagcctggccagagagcccgaggtggaggaggagatggagaagagcgccctgggcggcggcaagctgcccagaggcagctggagaagcagccccggcagaatccagagcctgaaggagagaaagggcctggagctggaggtggtggccaagaccttcctgctgggccccttccagttcgtgagaaacagcctggcccagctgagagagaaggtgcaggagctgcaggccagaagattcagcagcagaaccaccctgggcatcgccgtgttcgtggccatcctgcactggctgcacctggtgaccctgttcgagaacgacagacacttcagccacctgagcagcctggagagagagatgaccttcagaaccgagatgggcctgtactacagctacttcaagaccatcatcgaggcccccagcttcctggagggcctgtggatgatcatgaacgacagactgaccgagtaccccctgatcatcaacgccatcaagagattccacctgtaccccgaggtgatcatcgccagctggtactgcaccttcatgggcatcatgaacctgttcggcctggagaccaagacctgctggaacgtgaccagaatcgagcccctgaacgaggtgcagagctgcgagggcctgggcgaccccgcctgcttctacgtgggcgtgatcttcatcctgaacggcctgatgatgggcctgttcttcatgtacggcgcctacctgagcggcacccagctgggcggcctgatcaccgtgctgtgcttcttcttcaaccacggcgaggccaccagagtgatgtggaccccccccctgagagagagcttcagctaccccttcctggtgctgcagatgtgcatcctgaccctgatcctgagaaccagcagcaacgacagaagacccttcatcgccctgtgcctgagcaacgtggccttcatgctgccctggcagttcgcccagttcatcctgttcacccagatcgccagcctgttccccatgtacgtggtgggctacatcgagcccagcaagttccagaagatcatctacatgaacatgatcagcgtgaccctgagcttcatcctgatgttcggcaacagcatgtacctgagcagctactacagcagcagcctgctgatgacctgggccatcatcctgaagagaaacgagatccagaagctgggcgtgagcaagctgaacttctggctgatccagggcagcgcctggtggtgcggcaccatcatcctgaagttcctgaccagcaagatcctgggcgtgagcgaccacatcagactgagcgacctgatcgccgccagaatcctgagatacaccgacttcgacaccctgatctacacctgcgcccccgagttcgacttcatggagaaggccacccccctgagatacaccaagaccctgctgctgcccgtggtgatggtgatcacctgcttcatcttcaagaagaccgtgagagacatcagctacgtgctggccaccaacatctacctgagaaagcagctgctggagcacagcgagctggccttccacaccctgcagctgctggtgttcaccgccctggccatcctgatcatgagactgaagatgttcctgaccccccacatgtgcgtgatggccagcctgatctgcagcagacagctgttcggctggctgttcagaagagtgagattcgagaaggtgatcttcggcatcctgaccgtgatgagcatccagggctacgccaacctgagaaaccagtggagcatcatcggcgagttcaacaacctgccccaggaggagctgctgcagtggatcaagtacagcaccaccagcgacgccgtgttcgccggcgccatgcccaccatggccagcatcaagctgagcaccctgcaccccatcgtgaaccacccccactacgaggacgccgacctgagagccagaaccaagatcgtgtacagcacctacagcagaaagagcgccaaggaggtgagagacaagctgctggagctgcacgtgaactactacgtgctggaggaggcctggtgcgtggtgagaaccaagcccggctgcagcatgctggagatctgggacgtggaggaccccagcaacgccgccaacccccccctgtgcagcgtgctgctggaggacgccagaccctacttcaccaccgtgttccagaacagcgtgtacagagtgctgaaggtgaactag

SEQ ID NO: 79677 - DNA, 618 bp, synthetic construct
  misc_feature 1..618: note = Description of Artificial Sequence: Synthetic coding sequence
  source 1..618: mol_type = other DNA
atgagactgaagatgttcctgaccccccacatgtgcgtgatggccagcctgatctgcagcagacagctgttcggctggctgttcagaagagtgagattcgagaaggtgatcttcggcatcctgaccgtgatgagcatccagggctacgccaacctgagaaaccagtggagcatcatcggcgagttcaacaacctgccccaggaggagctgctgcagtggatcaagtacagcaccaccagcgacgccgtgttcgccggcgccatgcccaccatggccagcatcaagctgagcaccctgcaccccatcgtgaaccacccccactacgaggacgccgacctgagagccagaaccaagatcgtgtacagcacctacagcagaaagagcgccaaggaggtgagagacaagctgctggagctgcacgtgaactactacgtgctggaggaggcctggtgcgtggtgagaaccaagcccggctgcagcatgctggagatctgggacgtggaggaccccagcaacgccgccaacccccccctgtgcagcgtgctgctggaggacgccagaccctacttcaccaccgtgttccagaacagcgtgtacagagtgctgaaggtgaactag

SEQ ID NO: 79678 - DNA, 273 bp, synthetic construct
  misc_feature 1..273: note = Description of Artificial Sequence: Synthetic coding sequence
  source 1..273: mol_type = other DNA
atgagaaagcagggcgtgagcagcaagagactgcagagcagcggcagaagccagagcaagggcagaagaggcgccagcctggccagagagcccgaggtggaggaggagatggagaagagcgccctgggcggcggcaagctgcccagaggcagctggagaagcagccccggcagaatccagagcctgaaggagagaaagggcctggagctggaggtggtggccaagaccttcctgctgggccccttccagttcgtgagaaacagcctggcctag

SEQ ID NO: 79679 - DNA, 1629 bp, synthetic construct
  misc_feature 1..1629: note = Description of Artificial Sequence: Synthetic coding sequence
  source 1..1629: mol_type = other DNA
atgatgagcatcagacagagaagagagatcagagccaccgaggtgagcgaggacttccccgcccaggaggagaacgtgaagctggagaacaagctgcccagcggctgcaccagcagaagactgtggaagatcctgagcctgaccatcggcggcaccatcgccctgtgcatcggcctgctgaccagcgtgtacctggccaccctgcacgagaacgacctgtggttcagcaacatcaaggaggtggagagagagatcagcttcagaaccgagtgcggcctgtactacagctactacaagcagatgctgcaggcccccaccctggtgcagggcttccacggcctgatctacgacaacaagaccgagagcatgaagaccatcaacctgctgcagagaatgaacatctaccaggaggtgttcctgagcatcctgtacagagtgctgcccatccagaagtacctggagcccgtgtacttctacatctacaccctgttcggcctgcaggccatctacgtgaccgccctgtacatcaccagctggctgctgagcggcacctggctgagcggcctgctggccgccttctggtacgtgaccaacagaatcgacaccaccagagtggagttcaccatccccctgagagagaactgggccctgcccttcttcgccatccagatcgccgccatcacctacttcctgagacccaacctgcagcccctgagcgagagactgaccctgctggccatcttcatcagcaccttcctgttcagcctgacctggcagttcaaccagttcatgatgctgatgcaggccctggtgctgttcaccctggacagcctggacatgctgcccgccgtgaaggccacctggctgtacggcatccagatcaccagcctgctgctggtgtgcatcctgcagttcttcaacagcatgatcctgggcagcctgctgatcagcttcaacctgagcgtgttcatcgccagaaagctgcagaagaacctgaagaccggcagcttcctgaacagactgggcaagctgctgctgcacctgttcatggtgctgtgcctgaccctgttcctgaacaacatcatcaagaagatcctgaacctgaagagcgacgagcacatcttcaagttcctgaaggccaagttcggcctgggcgccaccagagacttcgacgccaacctgtacctgtgcgaggaggccttcggcctgctgcccttcaacaccttcggcagactgagcgacaccctgctgttctacgcctacatcttcgtgctgagcatcaccgtgatcgtggccttcgtggtggccttccacaacctgagcgacagcaccaaccagcagagcgtgggcaagatggagaagggcaccgtggacctgaagcccgagaccgcctacaacctgatccacaccatcctgttcggcttcctggccctgagcaccatgagaatgaagtacctgtggaccagccacatgtgcgtgttcgccagcttcggcctgtgcagccccgagatctgggagctgctgctgaagagcgtgcacctgtacaaccccaagagaatctgcatcatgagatacagcgtgcccatcctgatcctgctgtacctgtgctacaagaaccagaagagctag

SEQ ID NO: 79680 - DNA, 2151 bp, synthetic construct
  misc_feature 1..2151: note = Description of Artificial Sequence: Synthetic coding sequence
  source 1..2151: mol_type = other DNA
atgatgagcatcagacagagaagagagatcagagccaccgaggtgagcgaggacttccccgcccaggaggagaacgtgaagctggagaacaagctgcccagcggctgcaccagcagaagactgtggaagatcctgagcctgaccatcggcggcaccatcgccctgtgcatcggcctgctgaccagcgtgtacctggccaccctgcacgagaacgacctgtggttcagcaacatcaaggaggtggagagagagatcagcttcagaaccgagtgcggcctgtactacagctactacaagcagatgctgcaggcccccaccctggtgcagggcttccacggcctgatctacgacaacaagaccgagagcatgaagaccatcaacctgctgcagagaatgaacatctaccaggaggtgttcctgagcatcctgtacagagtgctgcccatccagaagtacctggagcccgtgtacttctacatctacaccctgttcggcctgcaggccatctacgtgaccgccctgtacatcaccagctggctgctgagcggcacctggctgagcggcctgctggccgccttctggtacgtgaccaacagaatcgacaccaccagagtggagttcaccatccccctgagagagaactgggccctgcccttcttcgccatccagatcgccgccatcacctacttcctgagacccaacctgcagcccctgagcgagagactgaccctgctggccatcttcatcagcaccttcctgttcagcctgacctggcagttcaaccagttcatgatgctgatgcaggccctggtgctgttcaccctggacagcctggacatgctgcccgccgtgaaggccacctggctgtacggcatccagatcaccagcctgctgctggtgtgcatcctgcagttcttcaacagcatgatcctgggcagcctgctgatcagcttcaacctgagcgtgttcatcgccagaaagctgcagaagaacctgaagaccggcagcttcctgaacagactgggcaagctgctgctgcacctgttcatggtgctgtgcctgaccctgttcctgaacaacatcatcaagaagatcctgaacctgaagagcgacgagcacatcttcaagttcctgaaggccaagttcggcctgggcgccaccagagacttcgacgccaacctgtacctgtgcgaggaggccttcggcctgctgcccttcaacaccttcggcagactgagcgacaccctgctgttctacgcctacatcttcgtgctgagcatcaccgtgatcgtggccttcgtggtggccttccacaacctgagcgacagcaccaaccagcagagcgtgggcaagatggagaagggcaccgtggacctgaagcccgagaccgcctacaacctgatccacaccatcctgttcggcttcctggccctgagcaccatgagaatgaagtacctgtggaccagccacatgtgcgtgttcgccagcttcggcctgtgcagccccgagatctgggagctgctgctgaagagcgtgcacctgtacaaccccaagagaatctgcatcatgagatacagcgtgcccatcctgatcctgctgtacctgtgctacaagttctggcccggcatgatggacgagctgagcgagctgagagagttctacgaccccgacaccgtggagctgatgaactggatcaacagcaacacccccagaaaggccgtgttcgccggcagcatgcagctgctggccggcgtgaagctgtgcaccggcagaaccctgaccaaccacccccactacgaggacagcagcctgagagagagaaccagagccgtgtaccagatctacgccaagagagcccccgaggaggtgcacgccctgctgagaagcttcggcaccgactacgtgatcctggaggacagcatctgctacgagagaagacacagaagaggctgcagactgagagacctgctggacatcgccaacggccacatgatggacggccccggcgagaacgaccccgacctgaagcccgccgaccaccccagattctgcgaggagatcaagagaaacctgcccccctacgtggcctacttcaccagagtgttccagaacaagaccttccacgtgtacaagctgagcagaaacaagtag

SEQ ID NO: 79681 - DNA, 342 bp, synthetic construct
  misc_feature 1..342: note = Description of Artificial Sequence: Synthetic coding sequence
  source 1..342: mol_type = other DNA
atgatgagcatcagacagagaagagagatcagagccaccgaggtgagcgaggacttccccgcccaggaggagaacgtgaagctggagaacaagctgcccagcggctgcaccagcagaagactgtggaagatcctgagcctgaccatcggcggcaccctgcccttcgccctggacttcctgcacctgagcaccctgcccagatacatgaagatgatctacggcttcctgatcctgagaaagtggagcgagaagagccacagcgagcagagcgtggcctgcatcacccccaccaccagcagatgctgcagactgcagcccagctgcaaggtgttcatggcctag

SEQ ID NO: 79682 - DNA, 2151 bp, synthetic construct; identical to SEQ ID NO: 79680
  misc_feature 1..2151: note = Description of Artificial Sequence: Synthetic coding sequence
  source 1..2151: mol_type = other DNA

SEQ ID NO: 79683 - DNA, 2172 bp, synthetic construct
  misc_feature 1..2172: note = Description of Artificial Sequence: Synthetic coding sequence
  source 1..2172: mol_type = other DNA
atggccgaggaggagggcccccccgtggagctgagacagagaaagaagcccaagagcagcgagaacaaggagagcgccaaggaggagaagatcagcgacatccccatccccgagagagcccccaagcacgtgctgttccagagattcgccaagatcttcatcggctgcctggccgccgtgaccagcggcatgatgtacgccctgtacctgagcgcctaccacgagagaaagttctggttcagcaacagacaggagctggagagagagatcaccttccagggcgacagcgccatctactacagctactacaaggacatgctgaaggcccccagcttcgagagaggcgtgtacgagctgacccacaacaacaagaccgtgagcctgaagaccatcaacgccgtgcagcagatgagcctgtaccccgagctgatcgccagcatcctgtaccaggccaccggcagcaacgagatcatcgagcccgtgtacttctacatcggcatcgtgttcggcctgcagggcatctacgtgaccgccctgttcgtgaccagctggctgatgagcggcacctggctggccggcatgctgaccgtggcctggttcgtgatcaacagagtggacaccaccagaatcgagtacagcatccccctgagagagaactgggccctgccctacttcgcctgccagatcgccgccctgaccggctacctgaagagcaacctgaacacctacggcgagagattctgctacctgctgatgagcgccagcacctacaccttcatgatgatgtgggagtacagccactacctgctgttcctgcaggccatcagcctgttcctgctggacaccttcagcgtggagcagagcgacaaggtgtacgaggtgtacaagatctacatcttcagcctgttcctgggctacctgctgcagttcgagaaccccgccctgctggtgagccccctgctgagcctggtggccgccctgatgctggccaagtgcctgcagctgaacgtgaagaagggcagcttcgtggccaagatcatcaaggtgatcaacttctacctggtgtgcaccctgaccatcaccctgaacatcatcatgaagatgttcgtgccccacaaggagaacggccacatgctgaagttcctggaggtgaagttcggcctgaacatgaccaagaacttcaccatgaactggctgctgtgccaggagagcctgcaggcccccagccaggacttcttcctgagactgacccagagcagcctgctgcccttctacatcctggtgctgatcatctgcttcctgagcatgctgcaggtgatcttcagaagaatcaacggcaagagcctgaaggagaccgtgaccctggaggacggcagaatcggcgagagacccgagatcatctaccacgtgatccacaccatcctgctgggcagcctggccatggtgatcgagggcctgaagtacatctggatcccctacgtgtgcatgctggccgccttcggcgtgtgcagccccgagctgtggatgaccctgttcaagtggctgagactgagaaccgtgcaccccatcctgctggccctgatcctgagcatggccgtgcccaccatcatcggcctgagcctgtggaaggagttcttccccagactgatgaccgagctgatggagctgcaggagttctacgaccccgacaccgtggagctgatgacctggatcaagagacaggcccccgtggccgccgtgttcgccggcagcccccagctgatgggcgccatcaagctgtgcaccggctggatggtgaccagcctgcccctgtacaacgacgacgacctgctgaagagaaacgagaacatctaccagatctacagcaagagaagcgccgaggacatctacaagatcctgaccagctacaaggccaactacctgatcgtggaggacgccatctgcaacgaggtgggccccatgagaggctgcagagtgaaggacctgctggacatcgccaacggccacatggtgtgcgaggagggcgacaagctgacctacagcaagtacggcagattctgccacgaggtgaagatcaactacagcccctacgtgaactacttcaccagagtgtactggaacagaagctacttcgtgtacaagatcaacaccgtgatcagcttccagagctag

SEQ ID NO: 79684 - DNA, 300 bp, synthetic construct
  misc_feature 1..300: note = Description of Artificial Sequence: Synthetic coding sequence
  source 1..300: mol_type = other DNA
atggagcccgagcagatgctggagggccagacccaggtggccgagaacccccacagcgagtacggcctgaccgacaacgtggagagaatcgtggagaacgagaagatcaacgccgagaagagcagcaagcagaaggtggacctgcagagcctgcccaccagagcctacctggaccagaccgtggtgcccatcctgctgcagggcctggccgtgctggccaaggagagaccccccaaccccatcgagttcctggccagctacctgctgaagaacaaggcccagttcgaggacagaaactag

SEQ ID NO: 79685 - DNA, 300 bp, synthetic construct; identical to SEQ ID NO: 79684
  misc_feature 1..300: note = Description of Artificial Sequence: Synthetic coding sequence
  source 1..300: mol_type = other DNA

SEQ ID NO: 79686 - DNA, 1956 bp, synthetic construct
  misc_feature 1..1956: note = Description of Artificial Sequence: Synthetic coding sequence
  source 1..1956: mol_type = other DNA
atggccggccacccctggcacggcaccgccgccctggccagcagccaggcctggagagacggcagagagagacaggccctggtgagctgcagagccctgtacacctacgaggacggcagcgacgacctgaagctggccgccagcggcgagggcggcctgcaggagctgagcggccacttcgagaaccagaaggtgatgtacggcttctgcagcgtgaaggacagccaggccgccctgcccaagtacgtgctgatcaactgggtgggcgaggacgtgcccgacgccagaaagtgcgcctgcgccagccacgtggccaaggtggccgagttcttccagggcgtggacgtgatcgtgaacgccagcagcgtggaggacatcgacgccggcgccatcggccagagactgagcaacggcctggccagactgagcagccccgtgctgcacagactgagactgagagaggacgagaacgccgagcccgtgggcaccacctaccagaagaccgacgccgccgtggagatgaagagaatcaacagagagcagttctgggagcaggccaagaaggaggaggagctgagaaaggaggaggagagaaagaaggccctggacgagagactgagattcgagcaggagagaatggagcaggagagacaggagcaggaggagagagagagaagatacagagagagagagcagcagatcgaggagcacagaagaaagcagcagaccctggaggccgaggaggccaagagaagactgaaggagcagagcatcttcggcgaccacagagacgaggaggaggagacccacatgaagaagagcgagagcgaggtggaggaggccgccgccatcatcgcccagagacccgacaaccccagagagttcttcaagcagcaggagagagtggccagcgccagcgccggcagctgcgacgtgcccagccccttcaaccacagacccggcagccacctggacagccacagaagaatggcccccacccccatccccaccagaagccccagcgacagcagcaccgccagcacccccgtggccgagcagatcgagagagccctggacgaggtgaccagcagccagcccccccccctgccccccccccccccccccgcccaggagacccaggagcccagccccatcctggacagcgaggagaccagagccgccgccccccaggcctgggccggccccatggaggagcccccccaggcccaggccccccccagaggccccggcagccccgccgaggacctgatgttcatggagagcgccgagcaggccgtgctggccgcccccgtggagcccgccaccgccgacgccaccgagatccacgacgccgccgacaccatcgagaccgacaccgccaccgccgacaccaccgtggccaacaacgtgccccccgccgccaccagcctgatcgacctgtggcccggcaacggcgagggcgccagcaccctgcagggcgagcccagagcccccaccccccccagcggcaccgaggtgaccctggccgaggtgcccctgctggacgaggtggcccccgagcccctgctgcccgccggcgagggctgcgccaccctgctgaacttcgacgagctgcccgagccccccgccaccttctgcgaccccgaggaggtggagggcgagagcctggccgccccccagacccccaccctgcccagcgccctggaggagctggagcaggagcaggagcccgagccccacctgctgaccaacggcgagaccacccagaaggagggcacccaggccagcgagggctacttcagccagagccaggaggaggagttcgcccagagcgaggagctgtgcgccaaggcccccccccccgtgttctacaacaagccccccgagatcgacatcacctgctgggacgccgaccccgtgcccgaggaggaggagggcttcgagggcggcgactag

SEQ ID NO: 79687 - DNA, 1950 bp, synthetic construct
  misc_feature 1..1950: note = Description of Artificial Sequence: Synthetic coding sequence
  source 1..1950: mol_type = other DNA
atggccggcgtgagcttcagcggccacagactggagctgctggccgcctacgaggaggtgatcagagaggagagcgccgccgactgggccctgtacacctacgaggacggcagcgacgacctgaagctggccgccagcggcgagggcggcctgcaggagctgagcggccacttcgagaaccagaaggtgatgtacggcttctgcagcgtgaaggacagccaggccgccctgcccaagtacgtgctgatcaactgggtgggcgaggacgtgcccgacgccagaaagtgcgcctgcgccagccacgtggccaaggtggccgagttcttccagggcgtggacgtgatcgtgaacgccagcagcgtggaggacatcgacgccggcgccatcggccagagactgagcaacggcctggccagactgagcagccccgtgctgcacagactgagactgagagaggacgagaacgccgagcccgtgggcaccacctaccagaagaccgacgccgccgtggagatgaagagaatcaacagagagcagttctgggagcaggccaagaaggaggaggagctgagaaaggaggaggagagaaagaaggccctggacgagagactgagattcgagcaggagagaatggagcaggagagacaggagcaggaggagagagagagaagatacagagagagagagcagcagatcgaggagcacagaagaaagcagcagaccctggaggccgaggaggccaagagaagactgaaggagcagagcatcttcggcgaccacagagacgaggaggaggagacccacatgaagaagagcgagagcgaggtggaggaggccgccgccatcatcgcccagagacccgacaaccccagagagttcttcaagcagcaggagagagtggccagcgccagcgccggcagctgcgacgtgcccagccccttcaaccacagacccggcagccacctggacagccacagaagaatggcccccacccccatccccaccagaagccccagcgacagcagcaccgccagcacccccgtggccgagcagatcgagagagccctggacgaggtgaccagcagccagcccccccccctgccccccccccccccccccgcccaggagacccaggagcccagccccatcctggacagcgaggagaccagagccgccgccccccaggcctgggccggccccatggaggagcccccccaggcccaggccccccccagaggccccggcagccccgccgaggacctgatgttcatggagagcgccgagcaggccgtgctggccgcccccgtggagcccgccaccgccgacgccaccgagatccacgacgccgccgacaccatcgagaccgacaccgccaccgccgacaccaccgtggccaacaacgtgccccccgccgccaccagcctgatcgacctgtggcccggcaacggcgagggcgccagcaccctgcagggcgagcccagagcccccaccccccccagcggcaccgaggtgaccctggccgaggtgcccctgctggacgaggtggcccccgagcccctgctgcccgccggcgagggctgcgccaccctgctgaacttcgacgagctgcccgagccccccgccaccttctgcgaccccgaggaggtggagggcgagagcctggccgccccccagacccccaccctgcccagcgccctggaggagctggagcaggagcaggagcccgagccccacctgctgaccaacggcgagaccacccagaaggagggcacccaggccagcgagggctacttcagccagagccaggaggaggagttcgcccagagcgaggagctgtgcgccaaggcccccccccccgtgttctacaacaagccccccgagatcgacatcacctgctgggacgccgaccccgtgcccgaggaggaggagggcttcgagggcggcgactag

SEQ ID NO: 79688 - DNA, 1146 bp, synthetic construct
  misc_feature 1..1146: note = Description of Artificial Sequence: Synthetic coding sequence
  source 1..1146: mol_type = other DNA
atgaagaagagcgagagcgaggtggaggaggccgccgccatcatcgcccagagacccgacaaccccagagagttcttcaagcagcaggagagagtggccagcgccagcgccggcagctgcgacgtgcccagccccttcaaccacagacccggcagccacctggacagccacagaagaatggcccccacccccatccccaccagaagccccagcgacagcagcaccgccagcacccccgtggccgagcagatcgagagagccctggacgaggtgaccagcagccagcccccccccctgccccccccccccccccccgcccaggagacccaggagcccagccccatcctggacagcgaggagaccagagccgccgccccccaggcctgggccggccccatggaggagcccccccaggcccaggccccccccagaggccccggcagccccgccgaggacctgatgttcatggagagcgccgagcaggccgtgctggccgcccccgtggagcccgccaccgccgacgccaccgagatccacgacgccgccgacaccatcgagaccgacaccgccaccgccgacaccaccgtggccaacaacgtgccccccgccgccaccagcctgatcgacctgtggcccggcaacggcgagggcgccagcaccctgcagggcgagcccagagcccccaccccccccagcggcaccgaggtgaccctggccgaggtgcccctgctggacgaggtggcccccgagcccctgctgcccgccggcgagggctgcgccaccctgctgaacttcgacgagctgcccgagccccccgccaccttctgcgaccccgaggaggtggagggcgagagcctggccgccccccagacccccaccctgcccagcgccctggaggagctggagcaggagcaggagcccgagccccacctgctgaccaacggcgagaccacccagaaggagggcacccaggccagcgagggctacttcagccagagccaggaggaggagttcgcccagagcgaggagctgtgcgccaaggcccccccccccgtgttctacaacaagccccccgagatcgacatcacctgctgggacgccgaccccgtgcccgaggaggaggagggcttcgagggcggcgactag

SEQ ID NO: 79689 - DNA, 954 bp, synthetic construct
  misc_feature 1..954: note = Description of Artificial Sequence: Synthetic coding sequence
  source 1..954: mol_type = other DNA
atggccggcgtgagcttcagcggccacagactggagctgctggccgcctacgaggaggtgatcagagaggagagcgccgccgactgggccctgtacacctacgaggacggcagcgacgacctgaagctggccgccagcggcggcggcctgcaggagctgagcggccacttcgagaaccagaaggtgatgtacggcttctgcagcgtgaaggacagccaggccgccctgcccaagtacgtgctgatcaactgggtgggcgaggacgtgcccgacgccagaaagtgcgcctgcgccagccacgtggccaaggtggccgagttcttccagggcgtggacgtgatcgtgaacgccagcagcgtggaggacatcgacgccggcgccatcggccagagactgagcaacggcctggccagactgagcagccccgtgctgcacagactgagactgagagaggacgagaacgccgagcccgtgggcaccacctaccagaagaccgacgccgccgtggagatgaagagaatcaacagagagcagttctgggagcaggccaagaaggaggaggagctgagaaaggaggaggagagaaagaaggccctggacgagagactgagattcgagcaggagagaatggagcaggagagacaggagcaggaggagagagagagaagatacagagagagagagcagcagatcgaggagcacagaagaaagcagcagaccctggaggccgaggaggccaagagaagactgaaggagcagagcatcttcggcgaccacagagacgaggaggaggagacccacatgaagaagagcgagagcgaggtggaggaggccgccgccatcatcgcccagagacccgacaaccccagagagttcttcaagcagcaggagagagtggccagcgccagcgccggcagctgcgacgtgcccagccccttcaaccacagaccctag

SEQ ID NO: 79690 - DNA, 375 bp, synthetic construct
  misc_feature 1..375: note = Description of Artificial Sequence: Synthetic coding sequence
  source 1..375: mol_type = other DNA
atggccggcgtgagcttcagcggccacagactggagctgctggccgcctacgaggaggtgatcagagaggagagcgccgccgactgggccctgtacacctacgaggacggcagcgacgacctgaagctggccgccagcggcgagggcggcctgcaggagctgagcggccacttcgagaaccagaaggtgatgtacggcttctgcagcgtgaaggacagccaggccgccctgcccaagtacgtgctgatcaactgggtgggcgaggacgtgcccgacgccagaaagtgcgcctgcgccagccacgtggccaaggtggccgagttcttccagggcgtggacgtgatcgtgaacgccagcagcgtggaggacatctag

SEQ ID NO: 79691 - DNA, 3900 bp, synthetic construct
  misc_feature 1..3900: note = Description of Artificial Sequence: Synthetic coding sequence
  source 1..3900: mol_type = other DNA
cacagaatgagcttccaccccggcagaggctgccccagaggcagaggcggccacggcgccagacccagcgcccccagcttcagaccccagaacctgagactgctgcacccccagcagccccccgtgcagtaccagtacgagccccccagcgcccccagcaccaccttcagcaacagccccgcccccaacttcctgccccccagacccgacttcgtgcccttccccccccccatgccccccagcgcccagggccccctgcccccctgccccatcagaccccccttccccaaccaccagatgagacaccccttccccgtgcccccctgcttcccccccatgcccccccccatgccctgccccaacaacccccccgtgcccggcgccccccccggccagggcaccttccccttcatgatgcccccccccagcatgccccaccccccccccccccccgtgatgccccagcaggtgaactaccagtacccccccggctacagccaccacaacttccccccccccagcttcaacagcttccagaacaaccccagcagcttcctgcccagcgccaacaacagcagcagcccccacttcagacacctgcccccctaccccctgcccaaggcccccagcgagagaagaagccccgagagactgaagcactacgacgaccacagacacagagaccacagccacggcagaggcgagagacacagaagcctggacagaagagagagaggcagaagccccgacagaagaagacaggacagcagatacagaagcgactacgacagaggcagaacccccagcagacacagaagctacgagagaagcagcagaagccccagcagagagaagaagagagccagatgggaggaggagaaggacagatggagcgacaaccagagcagcggcaaggacaagaactacaccagcatcaaggagaaggagcccgaggagaccatgcccgacaagaacgaggaggaggaggaggagctgctgaagcccgtgtggatcagatgcacccacagcgagaactactacagcagcgaccccatggaccaggtgggcgacagcaccgtggtgggcaccagcagactgagagacctgtacgacaagttcgaggaggagctgggcagcagacaggagaaggccaaggccgccagacccccctgggagccccccaagaccaagctggacgaggacctggagagcagcagcgagagcgagtgcgagagcgacgaggacagcacctgcagcagcagcagcgacagcgaggtgttcgacgtgatcgccgagatcaagagaaagaaggcccaccccgacagactgcacgacgagctgtggtacaacgaccccggccagatgaacgacggccccctgtgcaagtgcagcgccaaggccagaagaaccggcatcagacacagcatctaccccggcgaggaggccatcaagccctgcagacccatgaccaacaacgccggcagactgttccactacagaatcaccgtgagcccccccaccaacttcctgaccgacagacccaccgtgatcgagtacgacgaccacgagtacatcttcgagggcttcagcatgttcgcccacgcccccctgaccaacatccccctgtgcaaggtgatcagattcaacatcgactacaccatccacttcatcgaggagatgatgcccgagaacttctgcgtgaagggcctggagctgttcagcctgttcctgttcagagacatcctggagctgtacgactggaacctgaagggccccctgttcgaggacagccccccctgctgccccagattccacttcatgcccagattcgtgagattcctgcccgacggcggcaaggaggtgctgagcatgcaccagatcctgctgtacctgctgagatgcagcaaggccctggtgcccgaggaggagatcgccaacatgctgcagtgggaggagctggagtggcagaagtacgccgaggagtgcaagggcatgatcgtgaccaaccccggcaccaagcccagcagcgtgagaatcgaccagctggacagagagcagttcaaccccgacgtgatcaccttccccatcatcgtgcacttcggcatcagacccgcccagctgagctacgccggcgacccccagtaccagaagctgtggaagagctacgtgaagctgagacacctgctggccaacagccccaaggtgaagcagaccgacaagcagaagctggcccagagagaggaggccctgcagaagatcagacagaagaacaccatgagaagagaggtgaccgtggagctgagcagccagggcttctggaagaccggcatcagaagcgacgtgtgccagcacgccatgatgctgcccgtgctgacccaccacatcagataccaccagtgcctgatgcacctggacaagctgatcggctacaccttccaggacagatgcctgctgcagctggccatgacccaccccagccaccacctgaacttcggcatgaaccccgaccacgccagaaacagcctgagcaactgcggcatcagacagcccaagtacggcgacagaaaggtgcaccacatgcacatgagaaagaagggcatcaacaccctgatcaacatcatgagcagactgggccaggacgaccccacccccagcagaatcaaccacaacgagagactggagttcctgggcgacgccgtggtggagttcctgaccagcgtgcacctgtactacctgttccccagcctggaggagggcggcctggccacctacagaaccgccatcgtgcagaaccagcacctggccatgctggccaagaagctggagctggacagattcatgctgtacgcccacggccccgacctgtgcagagagagcgacctgagacacgccatggccaactgcttcgaggccctgatcggcgccgtgtacctggagggcagcctggaggaggccaagcagctgttcggcagactgctgttcaacgaccccgacctgagagaggtgtggctgaactaccccctgcaccccctgcagctgcaggagcccaacaccgacagacagctgatcgagaccagccccgtgctgcagaagctgaccgagttcgaggaggccatcggcgtgatcttcacccacgtgagactgctggccagagccttcaccctgagaaccgtgggcttcaaccacctgaccctgggccacaaccagagaatggagttcctgggcgacagcatcatgcagctggtggccaccgagtacctgttcatccacttccccgaccaccacgagggccacctgaccctgctgagaagcagcctggtgaacaacagaacccaggccaaggtggccgaggagctgggcatgcaggagtacgccatcaccaacgacaagaccaagagacccgtggccctgagaaccaagaccctggccgacctgctggagagcttcatcgccgccctgtacatcgacaaggacctggagtacgtgcacaccttcatgaacgtgtgcttcttccccagactgaaggagttcatcctgaaccaggactggaacgaccccaagagccagctgcagcagtgctgcctgaccctgagaaccgagggcaaggagcccgacatccccctgtacaagaccctgcagaccgtgggccccagccacgccagaacctacaccgtggccgtgtacttcaagggcgagagaatcggctgcggcaagggccccagcatccagcaggccgagatgggcgccgccatggacgccctggagaagtacaacttcccccagatggcccaccagaagagattcatcgagagaaagtacagacaggagctgaaggagatgagatgggagagagagcaccaggagagagagcccgacgagaccgaggacatcaagaagtag

SEQ ID NO: 79692 - DNA, 4125 bp, synthetic construct
  misc_feature 1..4125: note = Description of Artificial Sequence: Synthetic coding sequence
  source 1..4125: mol_type = other DNA
atgatgcagggcaacacctgccacagaatgagcttccaccccggcagaggctgccccagaggcagaggcggccacggcgccagacccagcgcccccagcttcagaccccagaacctgagactgctgcacccccagcagccccccgtgcagtaccagtacgagccccccagcgcccccagcaccaccttcagcaacagccccgcccccaacttcctgccccccagacccgacttcgtgcccttccccccccccatgccccccagcgcccagggccccctgcccccctgccccatcagaccccccttccccaaccaccagatgagacaccccttccccgtgcccccctgcttcccccccatgcccccccccatgccctgccccaacaacccccccgtgcccggcgccccccccggccagggcaccttccccttcatgatgcccccccccagcatgccccaccccccccccccccccgtgatgccccagcaggtgaactaccagtacccccccggctacagccaccacaacttccccccccccagcttcaacagcttccagaacaaccccagcagcttcctgcccagcgccaacaacagcagcagcccccacttcagacacctgcccccctaccccctgcccaaggcccccagcgagagaagaagccccgagagactgaagcactacgacgaccacagacacagagaccacagccacggcagaggcgagagacacagaagcctggacagaagagagagaggcagaagccccgacagaagaagacaggacagcagatacagaagcgactacgacagaggcagaacccccagcagacacagaagctacgagagaagcagagagagagagagagagagacacagacacagagacaacagaagaagccccagcctggagagaagctacaagaaggagtacaagagaagcggcagaagctacggcctgagcgtggtgcccgagcccgccggctgcacccccgagctgcccggcgagatcatcaagaacaccgacagctgggccccccccctggagatcgtgaaccacagaagccccagcagagagaagaagagagccagatgggaggaggagaaggacagatggagcgacaaccagagcagcggcaaggacaagaactacaccagcatcaaggagaaggagcccgaggagaccatgcccgacaagaacgaggaggaggaggaggagctgctgaagcccgtgtggatcagatgcacccacagcgagaactactacagcagcgaccccatggaccaggtgggcgacagcaccgtggtgggcaccagcagactgagagacctgtacgacaagttcgaggaggagctgggcagcagacaggagaaggccaaggccgccagacccccctgggagccccccaagaccaagctggacgaggacctggagagcagcagcgagagcgagtgcgagagcgacgaggacagcacctgcagcagcagcagcgacagcgaggtgttcgacgtgatcgccgagatcaagagaaagaaggcccaccccgacagactgcacgacgagctgtggtacaacgaccccggccagatgaacgacggccccctgtgcaagtgcagcgccaaggccagaagaaccggcatcagacacagcatctaccccggcgaggaggccatcaagccctgcagacccatgaccaacaacgccggcagactgttccactacagaatcaccgtgagcccccccaccaacttcctgaccgacagacccaccgtgatcgagtacgacgaccacgagtacatcttcgagggcttcagcatgttcgcccacgcccccctgaccaacatccccctgtgcaaggtgatcagattcaacatcgactacaccatccacttcatcgaggagatgatgcccgagaacttctgcgtgaagggcctggagctgttcagcctgttcctgttcagagacatcctggagctgtacgactggaacctgaagggccccctgttcgaggacagccccccctgctgccccagattccacttcatgcccagattcgtgagattcctgcccgacggcggcaaggaggtgctgagcatgcaccagatcctgctgtacctgctgagatgcagcaaggccctggtgcccgaggaggagatcgccaacatgctgcagtgggaggagctggagtggcagaagtacgccgaggagtgcaagggcatgatcgtgaccaaccccggcaccaagcccagcagcgtgagaatcgaccagctggacagagagcagttcaaccccgacgtgatcaccttccccatcatcgtgcacttcggcatcagacccgcccagctgagctacgccggcgacccccagtaccagaagctgtggaagagctacgtgaagctgagacacctgctggccaacagccccaaggtgaagcagaccgacaagcagaagctggcccagagagaggaggccctgcagaagatcagacagaagaacaccatgagaagagaggtgaccgtggagctgagcagccagggcttctggaagaccggcatcagaagcgacgtgtgccagcacgccatgatgctgcccgtgctgacccaccacatcagataccaccagtgcctgatgcacctggacaagctgatcggctacaccttccaggacagatgcctgctgcagctggccatgacccaccccagccaccacctgaacttcggcatgaaccccgaccacgccagaaacagcctgagcaactgcggcatcagacagcccaagtacggcgacagaaaggtgcaccacatgcacatgagaaagaagggcatcaacaccctgatcaacatcatgagcagactgggccaggacgaccccacccccagcagaatcaaccacaacgagagactggagttcctgggcgacgccgtggtggagttcctgaccagcgtgcacctgtactacctgttccccagcctggaggagggcggcctggccacctacagaaccgccatcgtgcagaaccagcacctggccatgctggccaagaagctggagctggacagattcatgctgtacgcccacggccccgacctgtgcagagagagcgacctgagacacgccatggccaactgcttcgaggccctgatcggcgccgtgtacctggagggcagcctggaggaggccaagcagctgttcggcagactgctgttcaacgaccccgacctgagagaggtgtggctgaactaccccctgcaccccctgcagctgcaggagcccaacaccgacagacagctgatcgagaccagccccgtgctgcagaagctgaccgagttcgaggaggccatcggcgtgatcttcacccacgtgagactgctggccagagccttcaccctgagaaccgtgggcttcaaccacctgaccctgggccacaaccagagaatggagttcctgggcgacagcatcatgcagctggtggccaccgagtacctgttcatccacttccccgaccaccacgagggccacctgaccctgctgagaagcagcctggtgaacaacagaacccaggccaaggtggccgaggagctgggcatgcaggagtacgccatcaccaacgacaagaccaagagacccgtggccctgagaaccaagaccctggccgacctgctggagagcttcatcgccgccctgtacatcgacaaggacctggagtacgtgcacaccttcatgaacgtgtgcttcttccccagactgaaggagttcatcctgaaccaggactggaacgaccccaagagccagctgcagcagtgctgcctgaccctgagaaccgagggcaaggagcccgacatccccctgtacaagaccctgcagaccgtgggccccagccacgccagaacctacaccgtggccgtgtacttcaagggcgagagaatcggctgcggcaagggccccagcatccagcaggccgagatgggcgccgccatggacgccctggagaagtacaacttcccccagatggcccaccagaagagattcatcgagagaaagtacagacaggagctgaaggagatgagatgggagagagagcaccaggagagagagcccgacgagaccgaggacatcaagaagtag

SEQ ID NO: 79693 - DNA, 3558 bp, synthetic construct
  misc_feature 1..3558: note = Description of Artificial Sequence: Synthetic coding sequence
  source 1..3558: mol_type = other DNA
cacagaatgagcttccaccccggcagaggctgccccagaggcagaggcggccacggcgccagacccagcgcccccagcttcagaccccagaacctgagactgctgcacccccagcagccccccgtgcagtaccagtacgagccccccagcgcccccagcaccaccttcagcaacagccccgcccccaacttcctgccccccagacccgacttcgtgcccttccccccccccatgccccccagcgcccagggccccctgcccccctgccccatcagaccccccttccccaaccaccagatgagacaccccttccccgtgcccccctgcttcccccccatgcccccccccatgccctgccccaacaacccccccgtgcccggcgccccccccggccagggcaccttccccttcatgatgcccccccccagcatgccccaccccccccccccccccgtgatgccccagcaggtgaactaccagtacccccccggctacagccaccacaacttccccccccccagcttcaacagcttccagaacaaccccagcagcttcctgcccagcgccaacaacagcagcagcccccacttcagacacctgcccccctaccccctgcccaaggcccccagcgagagaagaagccccgagagactgaagcactacgacgaccacagacacagagaccacagccacggcagaggcgagagacacagaagcctggacagaagagagagaggcagaagccccgacagaagaagacaggacagcagatacagaagcgactacgacagaggcagaacccccagcagacacagaagctacgagagaagcagagagagagagagagagagacacagacacagagacaacagaagaagccccagcctggagagaagctacaagaaggagtacaagagaagcggcagcagaagccccagcagagagaagaagagagccagatgggaggaggagaaggacagatggagcgacaaccagagcagcggcaaggacaagaactacaccagcatcaaggagaaggagcccgaggagaccatgcccgacaagaacgaggaggaggaggaggagctgctgaagcccgtgtggatcagatgcacccacagcgagaactactacagcagcgaccccatggaccaggtgggcgacagcaccgtggtgggcaccagcagactgagagacctgtacgacaagttcgaggaggagctgggcagcagacaggagaaggccaaggccgccagacccccctgggagccccccaagaccaagctggacgaggacctggagagcagcagcgagagcgagtgcgagagcgacgaggacagcacctgcagcagcagcagcgacagcgaggtgttcgacgtgatcgccgagatcaagagaaagaaggcccaccccgacagactgcacgacgagctgtggtacaacgaccccggccagatgaacgacggccccctgtgcaagtgcagcgccaaggccagaagaaccggcatcagacacagcatctaccccggcgaggaggccatcaagccctgcagacccatgaccaacaacgccggcagactgttccactacagaatcaccgtgagcccccccaccaacttcctgaccgacagacccaccgtgatcgagtacgacgaccacgagtacatcttcgagggcttcagcatgttcgcccacgcccccctgaccaacatccccctgtgcaaggtgatcagattcaacatcgactacaccatccacttcatcgaggagatgatgcccgagaacttctgcgtgaagggcctggagctgttcagcctgttcctgttcagagacatcctggagctgtacgactggaacctgaagggccccctgttcgaggacagccccccctgctgccccagattccacttcatgcccagattcgtgagattcctgcccgacggcggcaaggaggtgctgagcatgcaccagatcctgctgtacctgctgagatgcagcaaggccctggtgcccgaggaggagatcgccaacatgctgcagtgggaggagctggagtggcagaagtacgccgaggagtgcaagggcatgatcgtgaccaaccccggcaccaagcccagcagcgtgagaatcgaccagctggacagagagcagttcaaccccgacgtgatcaccttccccatcatcgtgcacttcggcatcagacccgcccagctgagctacgccggcgacccccagtaccagaagctgtggaagagctacgtgaagctgagacacctgctggccaacagccccaaggtgaagcagaccgacaagcagaagctggcccagagagaggaggccctgcagaagatcagacagaagaacaccatgagaagagaggtgaccgtggagctgagcagccagggcttctggaagaccggcatcagaagcgacgtgtgccagcacgccatgatgctgcccgtgctgacccaccacatcagataccaccagtgcctgatgcacctggacaagctgatcggctacaccttccaggacagatgcctgctgcagctggccatgacccaccccagccaccacctgaacttcggcatgaaccccgaccacgccagaaacagcctgagcaactgcggcatcagacagcccaagtacggcgacagaaaggtgcaccacatgcacatgagaaagaagggcatcaacaccctgatcaacatcatgagcagactgggccaggacgaccccacccccagcagaatcaaccacaacgagagactggagttcctgggcgacgccgtggtggagttcctgaccagcgtgcacctgtactacctgttccccagcctggaggagggcggcctggccacctacagaaccgccatcgtgcagaaccagcacctggccatgctggccaagaagctggagctggacagattcatgctgtacgcccacggccccgacctgtgcagagagagcgacctgagacacgccatggccaactgcttcgaggccctgatcggcgccgtgtacctggagggcagcctggaggaggccaagcagctgttcggcagactgctgttcaacgaccccgacctgagagaggtgtggctgaactaccccctgcaccccctgcagctgcaggagcccaacaccgacagacagctgatcgagaccagccccgtgctgcagaagctgaccgagttcgaggaggccatcggcgtgatcttcacccacgtgagactgctggccagagccttcaccctgagaaccgtgggcttcaaccacctgaccctgggccacaaccagagaatggagttcctgggcgacagcatcatgcagctggtggccaccgagtacctgttcatccacttccccgaccaccacgagggccacctgaccctgctgagaagcagcctggtgaacaacagaacccaggccaaggtggccgaggagctgggcatgcaggagtggagcatctacctgctgagcaactgcgactgctgcctgctgagacccagcctggtgttcctgcagaccatgaacgaggtgtgcagcctgaagtag

SEQ ID NO: 79694 - DNA, 4014 bp, synthetic construct
  misc_feature 1..4014: note = Description of Artificial Sequence: Synthetic coding sequence
  source 1..4014: mol_type = other DNA
atgatgcagggcaacacctgccacagaatgagcttccaccccggcagaggctgccccagaggcagaggcggccacggcgccagacccagcgcccccagcttcagaccccagaacctgagactgctgcacccccagcagccccccgtgcagtaccagtacgagccccccagcgcccccagcaccaccttcagcaacagccccgcccccaacttcctgccccccagacccgacttcgtgcccttccccccccccatgccccccagcgcccagggccccctgcccccctgccccatcagaccccccttccccaaccaccagatgagacaccccttccccgtgcccccctgcttcccccccatgcccccccccatgccctgccccaacaacccccccgtgcccggcgccccccccggccagggcaccttccccttcatgatgcccccccccagcatgccccaccccccccccccccccgtgatgccccagcaggtgaactaccagtacccccccggctacagccaccacaacttccccccccccagcttcaacagcttccagaacaaccccagcagcttcctgcccagcgccaacaacagcagcagcccccacttcagacacctgcccccctaccccctgcccaaggcccccagcgagagaagaagccccgagagactgaagcactacgacgaccacagacacagagaccacagccacggcagaggcgagagacacagaagcctggacagaagagagagaggcagaagccccgacagaagaagacaggacagcagatacagaagcgactacgacagaggcagaacccccagcagacacagaagctacgagagaagcagagagagagagagagagagacacagacacagagacaacagaagaagccccagcctggagagaagctacaagaaggagtacaagagaagcggcagcagaagccccagcagagagaagaagagagccagatgggaggaggagaaggacagatggagcgacaaccagagcagcggcaaggacaagaactacaccagcatcaaggagaaggagcccgaggagaccatgcccgacaagaacgaggaggaggaggaggagctgctgaagcccgtgtggatcagatgcacccacagcgagaactactacagcagcgaccccatggaccaggtgggcgacagcaccgtggtgggcaccagcagactgagagacctgtacgacaagttcgaggaggagctgggcagcagacaggagaaggccaaggccgccagacccccctgggagccccccaagaccaagctggacgaggacctggagagcagcagcgagagcgagtgcgagagcgacgaggacagcacctgcagcagcagcagcgacagcgaggtgttcgacgtgatcgccgagatcaagagaaagaaggcccaccccgacagactgcacgacgagctgtggtacaacgaccccggccagatgaacgacggccccctgtgcaagtgcagcgccaaggccagaagaaccggcatcagacacagcatctaccccggcgaggaggccatcaagccctgcagacccatgaccaacaacgccggcagactgttccactacagaatcaccgtgagcccccccaccaacttcctgaccgacagacccaccgtgatcgagtacgacgaccacgagtacatcttcgagggcttcagcatgttcgcccacgcccccctgaccaacatccccctgtgcaaggtgatcagattcaacatcgactacaccatccacttcatcgaggagatgatgcccgagaacttctgcgtgaagggcctggagctgttcagcctgttcctgttcagagacatcctggagctgtacgactggaacctgaagggccccctgttcgaggacagccccccctgctgccccagattccacttcatgcccagattcgtgagattcctgcccgacggcggcaaggaggtgctgagcatgcaccagatcctgctgtacctgctgagatgcagcaaggccctggtgcccgaggaggagatcgccaacatgctgcagtgggaggagctggagtggcagaagtacgccgaggagtgcaagggcatgatcgtgaccaaccccggcaccaagcccagcagcgtgagaatcgaccagctggacagagagcagttcaaccccgacgtgatcaccttccccatcatcgtgcacttcggcatcagacccgcccagctgagctacgccggcgacccccagtaccagaagctgtggaagagctacgtgaagctgagacacctgctggccaacagccccaaggtgaagcagaccgacaagcagaagctggcccagagagaggaggccctgcagaagatcagacagaagaacaccatgagaagagaggtgaccgtggagctgagcagccagggcttctggaagaccggcatcagaagcgacgtgtgccagcacgccatgatgctgcccgtgctgacccaccacatcagataccaccagtgcctgatgcacctggacaagctgatcggctacaccttccaggacagatgcctgctgcagctggccatgacccaccccagccaccacctgaacttcggcatgaaccccgaccacgccagaaacagcctgagcaactgcggcatcagacagcccaagtacggcgacagaaaggtgcaccacatgcacatgagaaagaagggcatcaacaccctgatcaacatcatgagcagactgggccaggacgaccccacccccagcagaatcaaccacaacgagagactggagttcctgggcgacgccgtggtggagttcctgaccagcgtgcacctgtactacctgttccccagcctggaggagggcggcctggccacctacagaaccgccatcgtgcagaaccagcacctggccatgctggccaagaagctggagctggacagattcatgctgtacgcccacggccccgacctgtgcagagagagcgacctgagacacgccatggccaactgcttcgaggccctgatcggcgccgtgtacctggagggcagcctggaggaggccaagcagctgttcggcagactgctgttcaacgaccccgacctgagagaggtgtggctgaactaccccctgcaccccctgcagctgcaggagcccaacaccgacagacagctgatcgagaccagccccgtgctgcagaagctgaccgagttcgaggaggccatcggcgtgatcttcacccacgtgagactgctggccagagccttcaccctgagaaccgtgggcttcaaccacctgaccctgggccacaaccagagaatggagttcctgggcgacagcatcatgcagctggtggccaccgagtacctgttcatccacttccccgaccaccacgagggccacctgaccctgctgagaagcagcctggtgaacaacagaacccaggccaaggtggccgaggagctgggcatgcaggagtacgccatcaccaacgacaagaccaagagacccgtggccctgagaaccaagaccctggccgacctgctggagagcttcatcgccgccctgtacatcgacaaggacctggagtacgtgcacaccttcatgaacgtgtgcttcttccccagactgaaggagttcatcctgaaccaggactggaacgaccccaagagccagctgcagcagtgctgcctgaccctgagaaccgagggcaaggagcccgacatccccctgtacaagaccctgcagaccgtgggccccagccacgccagaacctacaccgtggccgtgtacttcaagggcgagagaatcggctgcggcaagggccccagcatccagcaggccgagatgggcgccgccatggacgccctggagaagtacaacttcccccagatggcccaccagaagagattcatcgagagaaagtacagacaggagctgaaggagatgagatgggagagagagcaccaggagagagagcccgacgagaccgaggacatcaagaagtag

SEQ ID NO: 79695 - DNA, 606 bp, synthetic construct
  misc_feature 1..606: note = Description of Artificial Sequence: Synthetic coding sequence
  source 1..606: mol_type = other DNA
atgatgcagggcaacacctgccacagaatgagcttccaccccggcagaggctgccccagaggcagaggcggccacggcgccagacccagcgcccccagcttcagaccccagaacctgagactgctgcacccccagcagccccccgtgcagtaccagtacgagccccccagcgcccccagcaccaccttcagcaacagccccgcccccaacttcctgccccccagacccgacttcgtgcccttccccccccccatgccccccagcgcccagggccccctgcccccctgccccatcagaccccccttccccaaccaccagatgagacaccccttccccgtgcccccctgcttcccccccatgcccccccccatgccctgccccaacaacccccccgtgcccggcgccccccccggccagggcaccttccccttcatgatgcccccccccagcatgccccaccccccccccccccccgtgatgccccagcaggtgaactaccagtacccccccggctacagccaccacaacttccccccccccagcttcaacagcttccagaacaaccccagcagcttcctgcccagcgccaacaacagcagcagctag

SEQ ID NO: 79696 - DNA, 4125 bp, synthetic construct; identical to SEQ ID NO: 79692
  misc_feature 1..4125: note = Description of Artificial Sequence: Synthetic coding sequence
  source 1..4125: mol_type = other DNA

SEQ ID NO: 79697 - DNA, 630 bp, synthetic construct
  misc_feature 1..630: note = Description of Artificial Sequence: Synthetic coding sequence
  source 1..630: mol_type = other DNA
atgaaggccgtggtgcagagagtgaccagagccagcgtgaccgtgggcggcgagcagatcagcgccatcggcagaggcatctgcgtgctgctgggcatcagcctggaggacacccagaaggagctggagcacatggtgagaaagatcctgaacctgagagtgttcgaggacgagagcggcaagcactggagcaagagcgtgatggacaagcagtacgagatcctgtgcgtgagccagttcaccctgcagtgcgtgctgaagggcaacaagcccgacttccacctggccatgcccaccgagcaggccgagggcttctacaacagcttcctggagcagctgagaaagacctacagacccgagctgatcaaggacggcaagttcggcgcctacatgcaggtgcacatccagaacgacggccccgtgaccatcgagctggagagccccgcccccggcaccgccaccagcgaccccaagcagctgagcaagctggagaagcagcagcagagaaaggagaagaccagagccaagggccccagcgagagcagcaaggagagaaacacccccagaaaggaggacagaagcgccagcagcggcgccgagggcgacgtgagcagcgagagagagccctag

SEQ ID NO: 79698 - DNA, 843 bp, synthetic construct
  misc_feature 1..843: note = Description of Artificial Sequence: Synthetic coding sequence
  source 1..843: mol_type = other DNA
atgggcagagccgagctgctggagggcaagatgagcacccaggaccccagcgacctgtggagcagaagcgacggcgaggccgagctgctgcaggacctgggctggtaccacggcaacctgaccagacacgccgccgaggccctgctgctgagcaacggctgcgacggcagctacctgctgagagacagcaacgagaccaccggcctgtacagcctgagcgtgagagccaaggacagcgtgaagcacttccacgtggagtacaccggctacagcttcaagttcggcttcaacgagttcagcagcctgaaggacttcgtgaagcacttcgccaaccagcccctgatcggcagcgagaccggcaccctgatggtgctgaagcacccctaccccagaaaggtggaggagcccagcatctacgagagcgtgagagtgcacaccgccatgcagaccggcagaaccgaggacgacctggtgcccaccgcccccagcctgggcaccaaggagggctacctgaccaagcagggcggcctggtgaagacctggaagaccagatggttcaccctgcacagaaacgagctgaagtacttcaaggaccagatgagccccgagcccatcagaatcctggacctgaccgagtgcagcgccgtgcagttcgactacagccaggagagagtgaactgcttctgcctggtgttccccttcagaaccttctacctgtgcgccaagaccggcgtggaggccgacgagtggatcaagatcctgagatggaagctgagccagatcagaaagcagctgaaccagggcgagggcaccatcagaagcagaagcttcatcttcaagtag

SEQ ID NO: 79699 - DNA, 4656 bp, synthetic construct
  misc_feature 1..4656: note = Description of Artificial Sequence: Synthetic coding sequence
  source 1..4656: mol_type = other DNA
atgggcttctgcctggccctggcctggaccctgctggtgggcgcctggacccccctgggcgcccagaaccccatcagctgggaggtgcagagattcgacggctggtacaacaacctgatggagcacagatggggcagcaagggcagcagactgcagagactggtgcccgccagctacgccgacggcgtgtaccagcccctgggcgagccccacctgcccaaccccagagacctgagcaacaccatcagcagaggccccgccggcctggccagcctgagaaacagaaccgtgctgggcgtgttcttcggctaccacgtgctgagcgacctggtgagcgtggagacccccggctgccccgccgagttcctgaacatcagaatcccccccggcgaccccatgttcgaccccgaccagagaggcgacgtggtgctgcccttccagagaagcagatgggaccccgagaccggcagaagccccagcaaccccagagaccccgccaaccaggtgaccggctggctggacggcagcgccatctacggcagcagccacagctggagcgacgccctgagaagcttcagcagaggccagctggccagcggccccgaccccgccttccccagagacagccagaaccccctgctgatgtgggccgcccccgaccccgccaccggccagaacggccccagaggcctgtacgccttcggcgccgagagaggcaacagagagcccttcctgcaggccctgggcctgctgtggttcagataccacaacctgtgggcccagagactggccagacagcaccccgactgggaggacgaggagctgttccagcacgccagaaagagagtgatcgccacctaccagaacatcgccgtgtacgagtggctgcccagcttcctgcagaagaccctgcccgagtacaccggctacagacccttcctggaccccagcatcagcagcgagttcgtggccgccagcgagcagttcctgagcaccatggtgccccccggcgtgtacatgagaaacgccagctgccacttccagggcgtgatcaacagaaacagcagcgtgagcagagccctgagagtgtgcaacagctactggagcagagagcaccccagcctgcagagcgccgaggacgtggacgccctgctgctgggcatggccagccagatcgccgagagagaggaccacgtgctggtggaggacgtgagagacttctggcccggccccctgaagttcagcagaaccgaccacctggccagctgcctgcagagaggcagagacctgggcctgcccagctacaccaaggccagagccgccctgggcctgagccccatcaccagatggcaggacatcaaccccgccctgagcagaagcaacgacaccgtgctggaggccaccgccgccctgtacaaccaggacctgagctggctggagctgctgcccggcggcctgctggagagccacagagaccccggccccctgttcagcaccatcgtgctggagcagttcgtgagactgagagacggcgacagatactggttcgagaacaccagaaacggcctgttcagcaagaaggagatcgaggagatcagaaacaccaccctgcaggacgtgctggtggccgtgatcaacatcgaccccagcgccctgcagcccaacgtgttcgtgtggcacaagggcgacccctgcccccagcccagacagctgagcaccgagggcctgcccgcctgcgcccccagcgtggtgagagactacttcgagggcagcggcttcggcttcggcgtgaccatcggcaccctgtgctgcttccccctggtgagcctgctgagcgcctggatcgtggccagactgagaatgagaaacttcaagagactgcagggccaggacagacagagcatcgtgagcgagaagctggtgggcggcatggaggccctggagtggcagggccacaaggagccctgcagacccgtgctggtgtacctgcagcccggccagatcagagtggtggacggcagactgaccgtgctgagaaccatccagctgcagcccccccagaaggtgaacttcgtgctgagcagcaacagaggcagaagaaccctgctgctgaagatccccaaggagtacgacctggtgctgctgttcaacctggaggaggagagacaggccctggtggagaacctgagaggcgccctgaaggagagcggcctgagcatccaggagtgggagctgagagagcaggagctgatgagagccgccgtgaccagagagcagagaagacacctgctggagaccttcttcagacacctgttcagccaggtgctggacatcaaccaggccgacgccggcaccctgcccctggacagcagccagaaggtgagagaggccctgacctgcgagctgagcagagccgagttcgccgagagcctgggcctgaagccccaggacatgttcgtggagagcatgttcagcctggccgacaaggacggcaacggctacctgagcttcagagagttcctggacatcctggtggtgttcatgaagggcagccccgaggagaagagcagactgatgttcagaatgtacgacttcgacggcaacggcctgatcagcaaggacgagttcatcagaatgctgagaagcttcatcgagatcagcaacaactgcctgagcaaggcccagctggccgaggtggtggagagcatgttcagagagagcggcttccaggacaaggaggagctgacctgggaggacttccacttcatgctgagagaccacaacagcgagctgagattcacccagctgtgcgtgaagggcgtggaggtgcccgaggtgatcaaggacctgtgcagaagagccagctacatcagccaggacatgatctgccccagccccagagtgagcgccagatgcagcagaagcgacatcgagaccgagctgaccccccagagactgcagtgccccatggacaccgaccccccccaggagatcagaagaagattcggcaagaaggtgaccagcttccagcccctgctgttcaccgaggcccacagagagaagttccagagaagctgcctgcaccagaccgtgcagcagttcaagagattcatcgagaactacagaagacacatcggctgcgtggccgtgttctacgccatcgccggcggcctgttcctggagagagcctactactacgccttcgccgcccaccacaccggcatcaccgacaccaccagagtgggcatcatcctgagcagaggcaccgccgccagcatcagcttcatgttcagctacatcctgctgaccatgtgcagaaacctgatcaccttcctgagagagaccttcctgaacagatacgtgcccttcgacgccgccgtggacttccacagactgatcgccagcaccgccatcgtgctgaccgtgctgcacagcgtgggccacgtggtgaacgtgtacctgttcagcatcagccccctgagcgtgctgagctgcctgttccccggcctgttccacgacgacggcagcgagctgccccagaagtactactggtggttcttccagaccgtgcccggcctgaccggcgtggtgctgctgctgatcctggccatcatgtacgtgttcgccagccaccacttcagaagaagaagcttcagaggcttctggctgacccaccacctgtacatcctgctgtacgtgctgctgatcatccacggcagcttcgccctgatccagctgcccagattccacatcttcttcctggtgcccgccatcatctacggcggcgacaagctggtgagcctgagcagaaagaaggtggagatcagcgtggtgaaggccgagctgctgcccagcggcgtgacccacctgagattccagagaccccagggcttcgagtacaagagcggccagtgggtgagaatcgcctgcctggccctgggcaccaccgagtaccaccccttcaccctgaccagcgccccccacgaggacaccctgagcctgcacatcagagccgccggcccctggaccaccagactgagagagatctacagcgcccccaccggcgacagatgcgccagataccccaagctgtacctggacggccccttcggcgagggccaccaggagtggcacaagttcgaggtgagcgtgctggtgggcggcggcatcggcgtgacccccttcgccagcatcctgaaggacctggtgttcaagagcagcgtgagctgccaggtgttctgcaagaagatctacttcatctgggtgaccagaacccagagacagttcgagtggctggccgacatcatcagagaggtggaggagaacgaccaccaggacctggtgagcgtgcacatctacatcacccagctggccgagaagttcgacctgagaaccaccatgctgtacatctgcgagagacacttccagaaggtgctgaacagaagcctgttcaccggcctgagaagcatcacccacttcggcagaccccccttcgagcccttcttcaacagcctgcaggaggtgcacccccaggtgagaaagatcggcgtgttcagctgcggcccccccggcatgaccaagaacgtggagaaggcctgccagctgatcaacagacaggacagaacccacttcagccaccactacgagaacttctag

SEQ ID NO: 79700 - DNA, 4656 bp, synthetic construct; identical to SEQ ID NO: 79699
  misc_feature 1..4656: note = Description of Artificial Sequence: Synthetic coding sequence
  source 1..4656: mol_type = other DNA

SEQ ID NO: 79701 - DNA, 4656 bp, synthetic construct; identical to SEQ ID NO: 79699
  misc_feature 1..4656: note = Description of Artificial Sequence: Synthetic coding sequence
  source 1..4656: mol_type = other DNA

SEQ ID NO: 79702 - DNA, 132 bp, synthetic construct
  misc_feature 1..132: note = Description of Artificial Sequence: Synthetic coding sequence
  source 1..132: mol_type = other DNA
atgggcttctgcctggccctggcctggaccctgctggtgggcgcctggacccccctgggcgcccagaaccccatcagctgggaggtgcagagattcgacggctggtacaacaacctgatggagcacagatag

SEQ ID NO: 79703 - DNA, 3594 bp, synthetic construct
  misc_feature 1..3594: note = Description of Artificial Sequence: Synthetic coding sequence
  source 1..3594: mol_type = other DNA
atgtggatgcactgctgctgggcctggccccccagaagccagagcgagagaaccatgtgctggctgaagatgtgcggcgtgagcctgagactgagcctgcaggtggtgaacagctggcccctgggcagaggcagcgccggcctgcccgagcccgacttctggcccggccccctgaagttcagcagaaccgaccacctggccagctgcctgcagagaggcagagacctgggcctgcccagctacaccaaggccagagccgccctgggcctgagccccatcaccagatggcaggacatcaaccccgccctgagcagaagcaacgacaccgtgctggaggccaccgccgccctgtacaaccaggacctgagctggctggagctgctgcccggcggcctgctggagagccacagagaccccggccccctgttcagcaccatcgtgctggagcagttcgtgagactgagagacggcgacagatactggttcgagaacaccagaaacggcctgttcagcaagaaggagatcgaggagatcagaaacaccaccctgcaggacgtgctggtggccgtgatcaacatcgaccccagcgccctgcagcccaacgtgttcgtgtggcacaagggcgacccctgcccccagcccagacagctgagcaccgagggcctgcccgcctgcgcccccagcgtggtgagagactacttcgagggcagcggcttcggcttcggcgtgaccatcggcaccctgtgctgcttccccctggtgagcctgctgagcgcctggatcgtggccagactgagaatgagaaacttcaagagactgcagggccaggacagacagagcatcgtgagcgagaagctggtgggcggcatggaggccctggagtggcagggccacaaggagccctgcagacccgtgctggtgtacctgcagcccggccagatcagagtggtggacggcagactgaccgtgctgagaaccatccagctgcagcccccccagaaggtgaacttcgtgctgagcagcaacagaggcagaagaaccctgctgctgaagatccccaaggagtacgacctggtgctgctgttcaacctggaggaggagagacaggccctggtggagaacctgagaggcgccctgaaggagagcggcctgagcatccaggagtgggagctgagagagcaggagctgatgagagccgccgtgaccagagagcagagaagacacctgctggagaccttcttcagacacctgttcagccaggtgctggacatcaaccaggccgacgccggcaccctgcccctggacagcagccagaaggtgagagaggccctgacctgcgagctgagcagagccgagttcgccgagagcctgggcctgaagccccaggacatgttcgtggagagcatgttcagcctggccgacaaggacggcaacggctacctgagcttcagagagttcctggacatcctggtggtgttcatgaagggcagccccgaggagaagagcagactgatgttcagaatgtacgacttcgacggcaacggcctgatcagcaaggacgagttcatcagaatgctgagaagcttcatcgagatcagcaacaactgcctgagcaaggcccagctggccgaggtggtggagagcatgttcagagagagcggcttccaggacaaggaggagctgacctgggaggacttccacttcatgctgagagaccacaacagcgagctgagattcacccagctgtgcgtgaagggcgtggaggtgcccgaggtgatcaaggacctgtgcagaagagccagctacatcagccaggacatgatctgccccagccccagagtgagcgccagatgcagcagaagcgacatcgagaccgagctgaccccccagagactgcagtgccccatggacaccgaccccccccaggagatcagaagaagattcggcaagaaggtgaccagcttccagcccctgctgttcaccgaggcccacagagagaagttccagagaagctgcctgcaccagaccgtgcagcagttcaagagattcatcgagaactacagaagacacatcggctgcgtggccgtgttctacgccatcgccggcggcctgttcctggagagagcctactactacgccttcgccgcccaccacaccggcatcaccgacaccaccagagtgggcatcatcctgagcagaggcaccgccgccagcatcagcttcatgttcagctacatcctgctgaccatgtgcagaaacctgatcaccttcctgagagagaccttcctgaacagatacgtgcccttcgacgccgccgtggacttccacagactgatcgccagcaccgccatcgtgctgaccgtgctgcacagcgtgggccacgtggtgaacgtgtacctgttcagcatcagccccctgagcgtgctgagctgcctgttccccggcctgttccacgacgacggcagcgagctgccccagaagtactactggtggttcttccagaccgtgcccggcctgaccggcgtggtgctgctgctgatcctggccatcatgtacgtgttcgccagccaccacttcagaagaagaagcttcagaggcttctggctgacccaccacctgtacatcctgctgtacgtgctgctgatcatccacggcagcttcgccctgatccagctgcccagattccacatcttcttcctggtgcccgccatcatctacggcggcgacaagctggtgagcctgagcagaaagaaggtggagatcagcgtggtgaaggccgagctgctgcccagcggcgtgacccacctgagattccagagaccccagggcttcgagtacaagagcggccagtgggtgagaatcgcctgcctggccctgggcaccaccgagtaccaccccttcaccctgaccagcgccccccacgaggacaccctgagcctgcacatcagagccgccggcccctggaccaccagactgagagagatctacagcgcccccaccggcgacagatgcgccagataccccaagctgtacctggacggccccttcggcgagggccaccaggagtggcacaagttcgaggtgagcgtgctggtgggcggcggcatcggcgtgacccccttcgccagcatcctgaaggacctggtgttcaagagcagcgtgagctgccaggtgttctgcaagaagatctacttcatctgggtgaccagaacccagagacagttcgagtggctggccgacatcatcagagaggtggaggagaacgaccaccaggacctggtgagcgtgcacatctacatcacccagctggccgagaagttcgacctgagaaccaccatgctgtacatctgcgagagacacttccagaaggtgctgaacagaagcctgttcaccggcctgagaagcatcacccacttcggcagaccccccttcgagcccttcttcaacagcctgcaggaggtgcacccccaggtgagaaagatcggcgtgttcagctgcggcccccccggcatgaccaagaacgtggagaaggcctgccagctgatcaacagacaggacagaacccacttcagccaccactacgagaacttctag

SEQ ID NO: 79704 - DNA, 4647 bp, synthetic construct
  misc_feature 1..4647: note = Description of Artificial Sequence: Synthetic coding sequence
  source 1..4647: mol_type = other DNA
atgctgagagccagacccgaggccctgatgctgctgggcgccctgctgaccggcagcctgggccccagcggcaaccaggacgccctgagcctgccctgggaggtgcagagatacgacggctggttcaacaacctgagacaccacgagagaggcgccgtgggctgcagactgcagagaagagtgcccgccaactacgccgacggcgtgtaccaggccctggaggagccccagctgcccaaccccagaagactgagcaacgccgccaccagaggcatcgccggcctgcccagcctgcacaacagaaccgtgctgggcgtgttcttcggctaccacgtgctgagcgacgtggtgagcgtggagacccccggctgccccgccgagttcctgaacatcagaatcccccccggcgaccccgtgttcgaccccgaccagagaggcgacgtggtgctgcccttccagagaagcagatgggaccccgagaccggcagaagccccagcaaccccagagacctggccaaccaggtgaccggctggctggacggcagcgccatctacggcagcagccacagctggagcgacgccctgagaagcttcagcggcggccagctggccagcggccccgaccccgccttccccagagacagccagaaccccctgctgatgtgggccgcccccgaccccgccaccggccagaacggccccagaggcctgtacgccttcggcgccgagagaggcaacagagagcccttcctgcaggccctgggcctgctgtggttcagataccacaacctgtgggcccagagactggccagacagcaccccgactgggaggacgaggagctgttccagcacgccagaaagagagtgatcgccacctaccagaacatcgccgtgtacgagtggctgcccagcttcctgcagaagaccctgcccgagtacaccggctacagacccttcctggaccccagcatcagccccgagttcgtggtggccagcgagcagttcttcagcaccatggtgccccccggcgtgtacatgagaaacgccagctgccacttcagaaaggtgctgaacaagggcttccagagcagccaggccctgagagtgtgcaacaactactggatcagagagaaccccaacctgaacagcacccaggaggtgaacgagctgctgctgggcatggccagccagatcagcgagctggaggacaacatcgtggtggaggacctgagagactactggcccggccccggcaagttcagcagaaccgactacgtggccagcagcatccagagaggcagagacatgggcctgcccagctacagccaggccctgctggccttcggcctggacatccccagaaactggagcgacctgaaccccaacgtggacccccaggtgctggaggccaccgccgccctgtacaaccaggacctgagccagctggagctgctgctgggcggcctgctggagagccacggcgaccccggccccctgttcagcgccatcgtgctggaccagttcgtgagactgagagacggcgacagatactggttcgagaacaccagaaacggcctgttcagcaagaaggagatcgaggacatcagaaacaccaccctgagagacgtgctggtggccgtgatcaacatcgaccccagcgccctgcagcccaacgtgttcgtgtggcacaagggcgccccctgcccccagcccaagcagctgaccaccgacggcctgccccagtgcgcccccctgaccgtgctggacttcttcgagggcagcagccccggcttcgccatcaccatcatcgccctgtgctgcctgcccctggtgagcctgctgctgagcggcgtggtggcctacttcagaggcagagagcacaagaagctgcagaagaagctgaaggagagcgtgaagaaggaggccgccaaggacggcgtgcccgccatggagtggcccggccccaaggagagaagcagccccatcatcatccagctgctgagcgacagatgcctgcaggtgctgaacagacacctgaccgtgctgagagtggtgcagctgcagcccctgcagcaggtgaacctgatcctgagcaacaacagaggctgcagaaccctgctgctgaagatccccaaggagtacgacctggtgctgctgttcagcagcgaggaggagagaggcgccttcgtgcagcagctgtgggacttctgcgtgagatgggccctgggcctgcacgtggccgagatgagcgagaaggagctgttcagaaaggccgtgaccaagcagcagagagagagaatcctggagatcttcttcagacacctgttcgcccaggtgctggacatcaaccaggccgacgccggcaccctgcccctggacagcagccagaaggtgagagaggccctgacctgcgagctgagcagagccgagttcgccgagagcctgggcctgaagccccaggacatgttcgtggagagcatgttcagcctggccgacaaggacggcaacggctacctgagcttcagagagttcctggacatcctggtggtgttcatgaagggcagccccgaggacaagagcagactgatgttcaccatgtacgacctggacgagaacggcttcctgagcaaggacgagttcttcaccatgatgagaagcttcatcgagatcagcaacaactgcctgagcaaggcccagctggccgaggtggtggagagcatgttcagagagagcggcttccaggacaaggaggagctgacctgggaggacttccacttcatgctgagagaccacgacagcgagctgagattcacccagctgtgcgtgaagggcggcggcggcggcggcaacggcatcagagacatcttcaagcagaacatcagctgcagagtgagcttcatcaccagaacccccggcgagagaagccacccccagggcctgggcccccccgcccccgaggcccccgagctgggcggccccggcctgaagaagagattcggcaagaaggccgccgtgcccacccccagactgtacaccgaggccctgcaggagaagatgcagagaggcttcctggcccagaagctgcagcagtacaagagattcgtggagaactacagaagacacatcgtgtgcgtggccatcttcagcgccatctgcgtgggcgtgttcgccgacagagcctactactacggcttcgccagcccccccagcgacatcgcccagaccaccctggtgggcatcatcctgagcagaggcaccgccgccagcgtgagcttcatgttcagctacatcctgctgaccatgtgcagaaacctgatcaccttcctgagagagaccttcctgaacagatacgtgcccttcgacgccgccgtggacttccacagatggatcgccatggccgccgtggtgctggccatcctgcacagcgccggccacgccgtgaacgtgtacatcttcagcgtgagccccctgagcctgctggcctgcatcttccccaacgtgttcgtgaacgacggcagcaagctgccccagaagttctactggtggttcttccagaccgtgcccggcatgaccggcgtgctgctgctgctggtgctggccatcatgtacgtgttcgccagccaccacttcagaagaagaagcttcagaggcttctggctgacccaccacctgtacatcctgctgtacgccctgctgatcatccacggcagctacgccctgatccagctgcccaccttccacatctacttcctggtgcccgccatcatctacggcggcgacaagctggtgagcctgagcagaaagaaggtggagatcagcgtggtgaaggccgagctgctgcccagcggcgtgacctacctgcagttccagagaccccagggcttcgagtacaagagcggccagtgggtgagaatcgcctgcctggccctgggcaccaccgagtaccaccccttcaccctgaccagcgccccccacgaggacaccctgagcctgcacatcagagccgtgggcccctggaccaccagactgagagagatctacagcagccccaagggcaacggctgcgccggctaccccaagctgtacctggacggccccttcggcgagggccaccaggagtggcacaagttcgaggtgagcgtgctggtgggcggcggcatcggcgtgacccccttcgccagcatcctgaaggacctggtgttcaagagcagcctgggcagccagatgctgtgcaagaagatctacttcatctgggtgaccagaacccagagacagttcgagtggctggccgacatcatccaggaggtggaggagaacgaccaccaggacctggtgagcgtgcacatctacgtgacccagctggccgagaagttcgacctgagaaccaccatgctgtacatctgcgagagacacttccagaaggtgctgaacagaagcctgttcaccggcctgagaagcatcacccacttcggcagaccccccttcgagcccttcttcaacagcctgcaggaggtgcacccccaggtgagaaagatcggcgtgttcagctgcggcccccccggcatgaccaagaacgtggagaaggcctgccagctggtgaacagacaggacagagcccacttcatgcaccactacgagaacttctag

SEQ ID NO: 79705 - DNA, 1452 bp, synthetic construct
  misc_feature 1..1452: note = Description of Artificial Sequence: Synthetic coding sequence
  source 1..1452: mol_type = other DNA
atggccaccctgggccacaccttccccttctacgccggccccaagcccaccttccccatggacaccaccctggccagcatcatcatgatcttcctgaccgccctggccaccttcatcgtgatcctgcccggcatcagaggcaagaccagactgttctggctgctgagagtggtgaccagcctgttcatcggcgccgccatcctggccgtgaacttcagcagcgagtggagcgtgggccaggtgagcaccaacaccagctacaaggccttcagcagcgagtggatcagcgccgacatcggcctgcaggtgggcctgggcggcgtgaacatcaccctgaccggcacccccgtgcagcagctgaacgagaccatcaactacaacgaggagttcacctggagactgggcgagaactacgccgaggagtacgccaaggccctggagaagggcctgcccgaccccgtgctgtacctggccgagaagttcacccccagaagcccctgcggcctgtacagacagtacagactggccggccactacaccagcgccatgctgtgggtggccttcctgtgctggctgctggccaacgtgatgctgagcatgcccgtgctggtgtacggcggctacatgctgctggccaccggcatcttccagctgctggccctgctgttcttcagcatggccaccagcctgaccagcccctgccccctgcacctgggcgccagcgtgctgcacacccaccacggccccgccttctggatcaccctgaccaccggcctgctgtgcgtgctgctgggcctggccatggccgtggcccacagaatgcagccccacagactgaaggccttcttcaaccagagcgtggacgaggaccccatgctggagtggagccccgaggagggcggcctgctgagccccagatacagaagcatggccgacagccccaagagccaggacatccccctgagcgaggccagcagcaccaaggcctactacagacccagaagactgagcctggtgcccgccgacgtgagaggcctggcccccgccgccctgagcgccctgcccggcgccctgctggcccaggcctggagagccctgctgcccggcctgagatgccccaaggccggcaaggagagcagactgggccccccccacagcccctggagattcggccccgagggctgcgaggagagatgggccgagcacaccggcgacagccccagacccctgagaggcagaggcaccggcagactgtggagatggggcagcaaggagagaagagcctgcggcgtgagagccatgctgcccagactggtgagcaacagcggcctgaagagacccagctgcctggacctgcccaagtgctgggactacagaagagacgccagagccttcttccacctgctggagcccaccccctgcgtgaccagcagacacacccccctgatctag

SEQ ID NO: 79706 - DNA, 1317 bp, synthetic construct
  misc_feature 1..1317: note = Description of Artificial Sequence: Synthetic coding sequence
  source 1..1317: mol_type = other DNA
atggccaccctgggccacaccttccccttctacgccggccccaagcccaccttccccatggacaccaccctggccagcatcatcatgatcttcctgaccgccctggccaccttcatcgtgatcctgcccggcatcagaggcaagaccagactgttctggctgctgagagtggtgaccagcctgttcatcggcgccgccatcctgggcacccccgtgcagcagctgaacgagaccatcaactacaacgaggagttcacctggagactgggcgagaactacgccgaggagtacgccaaggccctggagaagggcctgcccgaccccgtgctgtacctggccgagaagttcacccccagaagcccctgcggcctgtacagacagtacagactggccggccactacaccagcgccatgctgtgggtggccttcctgtgctggctgctggccaacgtgatgctgagcatgcccgtgctggtgtacggcggctacatgctgctggccaccggcatcttccagctgctggccctgctgttcttcagcatggccaccagcctgaccagcccctgccccctgcacctgggcgccagcgtgctgcacacccaccacggccccgccttctggatcaccctgaccaccggcctgctgtgcgtgctgctgggcctggccatggccgtggcccacagaatgcagccccacagactgaaggccttcttcaaccagagcgtggacgaggaccccatgctggagtggagccccgaggagggcggcctgctgagccccagatacagaagcatggccgacagccccaagagccaggacatccccctgagcgaggccagcagcaccaaggcctactacagacccagaagactgagcctggtgcccgccgacgtgagaggcctggcccccgccgccctgagcgccctgcccggcgccctgctggcccaggcctggagagccctgctgcccggcctgagatgccccaaggccggcaaggagagcagactgggccccccccacagcccctggagattcggccccgagggctgcgaggagagatgggccgagcacaccggcgacagccccagacccctgagaggcagaggcaccggcagactgtggagatggggcagcaaggagagaagagcctgcggcgtgagagccatgctgcccagactggtgagcaacagcggcctgaagagacccagctgcctggacctgcccaagtgctgggactacagaagagacgccagagccttcttccacctgctggagcccaccccctgcgtgaccagcagacacacccccctgatctag

SEQ ID NO: 79707 - DNA, 234 bp, synthetic construct
  misc_feature 1..234: note = Description of Artificial Sequence: Synthetic coding sequence
  source 1..234: mol_type = other DNA
atggccaccctgggccacaccttccccttctacgccggccccaagcccaccttccccatggacaccaccctggccagcatcatcatgatcttcctgaccgccctggccaccttcatcgtgatcctgcccggcatcagaggcaagaccagactgttctggctgctgagagtggtgaccagcctgttcatcggcgccgccatcctgggcacccccgtgcagcagctgaacgagtag

SEQ ID NO: 79708 - DNA, 219 bp, synthetic construct
  misc_feature 1..219: note = Description of Artificial Sequence: Synthetic coding sequence
  source 1..219: mol_type = other DNA
atggccaccctgggccacaccttccccttctacgccggccccaagcccaccttccccatggacaccaccctggccagcatcatcatgatcttcctgaccgccctggccaccttcatcgtgatcctgcccggcatcagaggcaagaccagactgttctggctgctgagagtggtgaccagcctgttcatcggcgccgccatcctggccgtgaacttctag

SEQ ID NO: 79709 - DNA, 897 bp, synthetic construct
  misc_feature 1..897: note = Description of Artificial Sequence: Synthetic coding sequence
  source 1..897: mol_type = other DNA
atggccaccctgggccacaccttccccttctacgccggccccaagcccaccttccccatggacaccaccctggccagcatcatcatgatcttcctgaccgccctggccaccttcatcgtgatcctgcccggcatcagaggcaagaccagactgttctggctgctgagagtggtgaccagcctgttcatcggcgccgccatcctgggcacccccgtgcagcagctgaacgagaccatcaactacaacgaggagttcacctggagactgggcgagaactacgccgaggagtacgccaaggccctggagaagggcctgcccgaccccgtgctgtacctggccgagaagttcacccccagaagcccctgcggcctgtacagacagtacagactggccggccactacaccagcgccatgctgtgggtggccttcctgtgctggctgctggccaacgtgatgctgagcatgcccgtgctggtgtacggcggctacatgctgctggccaccggcatcttccagctgctggccctgctgttcttcagcatggccaccagcctgaccagcccctgccccctgcacctgggcgccagcgtgctgcacacccaccacggccccgccttctggatcaccctgaccaccggcctgctgtgcgtgctgctgggcctggccatggccgtggcccacagaatgcagccccacagactgaaggccttcttcaaccagagcgtggacgaggaccccatgctggagtggagccccgaggagggcggcctgctgagccccagatacagaagcatggccgacagccccaagagccaggacatccccctgagcgaggccagcagcaccaaggcctactgcaaggaggcccaccccaaggaccccgactgcgccctgtag

SEQ ID NO: 79710 - DNA, 42 bp, synthetic construct
  misc_feature 1..42: note = Description of Artificial Sequence: Synthetic coding sequence
  source 1..42: mol_type = other DNA
atggccaccctgggccacaccttccccttctacgccggctag

SEQ ID NO: 79711 - DNA, 897 bp, synthetic construct; identical to SEQ ID NO: 79709
  misc_feature 1..897: note = Description of Artificial Sequence: Synthetic coding sequence
  source 1..897: mol_type = other DNA

SEQ ID NO: 79712 - DNA, 1452 bp, synthetic construct; identical to SEQ ID NO: 79705
  misc_feature 1..1452: note = Description of Artificial Sequence: Synthetic coding sequence
  source 1..1452: mol_type = other DNA

SEQ ID NO: 79713 - DNA, 219 bp, synthetic construct
  misc_feature 1..219: note = Description of Artificial Sequence: Synthetic coding sequence
  source 1..219: mol_type = other DNA
atggccaccctgggccacaccttccccttctacgccggccccaagcccaccttccccatggacaccaccctggccagcatcatcatgatcttcctgaccgccctggccaccttcatcgtgatcctgcccggcatcagaggcaagaccagactgttctggctgctgagagtggtgaccagcctgttcatcggcgccgccatcctgggcacccccgtgtag

SEQ ID NO: 79714 - DNA, 51 bp, synthetic construct
  misc_feature 1..51: note = Description of Artificial Sequence: Synthetic coding sequence
  source 1..51: mol_type = other DNA
atggccaccctgggccacaccttccccttctacgccggccccaagccctag

SEQ ID NO: 79715 - DNA, 366 bp, synthetic construct
  misc_feature 1..366: note = Description of Artificial Sequence: Synthetic coding sequence
  source 1..366: mol_type = other DNA
atggccaccctgggccacaccttccccttctacgccggccccaagcccaccttccccatggacaccaccctggccagcatcatcatgatcttcctgaccgccctggccaccttcatcgtgatcctgcccggcatcagaggcaagaccagactgttctggctgctgagagtggtgaccagcctgttcatcggcgccgccatcctggccgtgaacttcagcagcgagtggagcgtgggccaggtgagcaccaacaccagctacaaggccttcagcagcgagtggatcagcgccgacatcggcctgcaggtgggcctgggcggcgtgaacatcaccctgaccggcacccccgtgcagcagctgaactag

SEQ ID NO: 79716 - DNA, 1032 bp, synthetic construct
  misc_feature 1..1032: note = Description of Artificial Sequence: Synthetic coding sequence
  source 1..1032: mol_type = other DNA
atggccaccctgggccacaccttccccttctacgccggccccaagcccaccttccccatggacaccaccctggccagcatcatcatgatcttcctgaccgccctggccaccttcatcgtgatcctgcccggcatcagaggcaagaccagactgttctggctgctgagagtggtgaccagcctgttcatcggcgccgccatcctggccgtgaacttcagcagcgagtggagcgtgggccaggtgagcaccaacaccagctacaaggccttcagcagcgagtggatcagcgccgacatcggcctgcaggtgggcctgggcggcgtgaacatcaccctgaccggcacccccgtgcagcagctgaacgagaccatcaactacaacgaggagttcacctggagactgggcgagaactacgccgaggagtacgccaaggccctggagaagggcctgcccgaccccgtgctgtacctggccgagaagttcacccccagaagcccctgcggcctgtacagacagtacagactggccggccactacaccagcgccatgctgtgggtggccttcctgtgctggctgctggccaacgtgatgctgagcatgcccgtgctggtgtacggcggctacatgctgctggccaccggcatcttccagctgctggccctgctgttcttcagcatggccaccagcctgaccagcccctgccccctgcacctgggcgccagcgtgctgcacacccaccacggccccgccttctggatcaccctgaccaccggcctgctgtgcgtgctgctgggcctggccatggccgtggcccacagaatgcagccccacagactgaaggccttcttcaaccagagcgtggacgaggaccccatgctggagtggagccccgaggagggcggcctgctgagccccagatacagaagcatggccgacagccccaagagccaggacatccccctgagcgaggccagcagcaccaaggcctactgcaaggaggcccaccccaaggaccccgactgcgccctgtag

SEQ ID NO: 79717 - DNA, 963 bp, synthetic construct
  misc_feature 1..963: note = Description of Artificial Sequence: Synthetic coding sequence
  source 1..963: mol_type = other DNA
atgaccctgtggaacggcgtgctgcccttctacccccagcccagacacgccgccggcttcagcgtgcccctgctgatcgtgatcctggtgttcctggccctggccgccagcttcctgctgatcctgcccggcatcagaggccacagcagatggttctggctggtgagagtgctgctgagcctgttcatcggcgccgagatcgtggccgtgcacttcagcgccgagtggttcgtgggcaccgtgaacaccaacaccagctacaaggccttcagcgccgccagagtgaccgccagagtgagactgctggtgggcctggagggcatcaacatcaccctgaccggcacccccgtgcaccagctgaacgagaccatcgactacaacgagcagttcacctggagactgaaggagaactacgccgccgagtacgccaacgccctggagaagggcctgcccgaccccgtgctgtacctggccgagaagttcacccccagcagcccctgcggcctgtaccaccagtaccacctggccggccactacgccagcgccaccctgtgggtggccttctgcttctggctgctgagcaacgtgctgctgagcacccccgcccccctgtacggcggcctggccctgctgaccaccggcgccttcgccctgttcggcgtgttcgccctggccagcatcagcagcgtgcccctgtgccccctgagactgggcagcagcgccctgaccacccagtacggcgccgccttctgggtgaccctggccaccggcgtgctgtgcctgttcctgggcggcgccgtggtgagcctgcagtacgtgagacccagcgccctgagaaccctgctggaccagagcgccaaggactgcagccaggagagaggcggcagccccctgatcctgggcgaccccctgcacaagcaggccgccctgcccgacctgaagtgcatcaccaccaacctgtag

SEQ ID NO: 79718 - DNA, 1767 bp, synthetic construct
  misc_feature 1..1767: note = Description of Artificial Sequence: Synthetic coding sequence
  source 1..1767: mol_type = other DNA
atggagggcgacggcgtgccctggggcagcgagcccgtgagcggccccggccccggcggcggcggcatgatcagagagctgtgcagaggcttcggcagatacagaagatacctgggcagactgagacagaacctgagagagacccagaagttcttcagagacatcaagtgcagccacaaccacacctgcctgagcagcctgaccggcggcggcggcgccgagagaggccccgccggcgacgtggccgagaccggcctgcaggccggccagctgagctgcatcagcttcccccccaaggaggagaagtacctgcagcagatcgtggactgcctgccctgcatcctgatcctgggccaggactgcaacgtgaagtgccagctgctgaacctgctgctgggcgtgcaggtgctgcccaccaccaagctgggcagcgaggagagctgcaagctgagaagactgagattcacctacggcacccagaccagagtgagcctggccctgcccggccagtacgagctggtgcacaccctggtggcccaccagggcaactgggagaccatccccgaggaggacctggaggtgcaggagaacaacgaggacgccgcccacgtgctggccgagctggaggtgaccatgcaccacgccctgctgcaggaggtggacgtggtggtggccccctgccagggcctgagacccaccgtggacgtgctgggcgacctggtgaacgacttcctgcccgtgatcacctacgccctgcacaaggacgagctgagcgagagagacgagcaggagctgcaggagatcagaaagtacttcagcttccccgtgttcttcttcaaggtgcccaagctgggcagcgagatcatcgacagcagcaccagaagaatggagagcgagagaagccccctgtacagacagctgatcgacctgggctacctgagcagcagccactggaactgcggcgcccccggccaggacaccaaggcccagagcatgctggtggagcagagcgagaagctgagacacctgagcaccttcagccaccaggtgctgcagaccagactggtggacgccgccaaggccctgaacctggtgcactgccactgcctggacatcttcatcaaccaggccttcgacatgcagagagacctgcagatcacccccaagagactggagtacaccagaaagaaggagaacgagctgtacgagagcctgatgaacatcgccaacagaaagcaggaggagatgaaggacatgatcgtggagaccctgaacaccatgaaggaggagctgctggacgacgccaccaacatggagttcaaggacgtgatcgtgcccgagaacggcgagcccatcaccgacctgggcttctgcaagcccgaggccatgatgagcggcagcatcgtgggcacccccatccacatggcccccgagctgttcaccggcaagtacgacaacagcgtggacgtgtacgccttcggcatcctgttctggtacatctgcagcggcagcgtgaagctgcccgaggccttcgagagatgcgccagcaaggaccacctgtggaacaacgtgagaagaggcgccagacccgagagactgcccgtgttcgacgaggagtgctggcagctgatggaggcctgctgggacggcgaccccctgaagagacccctgctgggcatcgtgcagcccatgctgcagggcatcatgaacagactgtgcaagagcaacagcgagcagcccaacagaggcctggacgacagcacctag

SEQ ID NO: 79719 - DNA, 2655 bp, synthetic construct
  misc_feature 1..2655: note = Description of Artificial Sequence: Synthetic coding sequence
  source 1..2655: mol_type = other DNA
atggagggcgacggcgtgccctggggcagcgagcccgtgagcggccccggccccggcggcggcggcatgatcagagagctgtgcagaggcttcggcagatacagaagatacctgggcagactgagacagaacctgagagagacccagaagttcttcagagacatcaagtgcagccacaaccacacctgcctgagcagcctgaccggcggcggcggcgccgagagaggccccgccggcgacgtggccgagaccggcctgcaggccggccagctgagctgcatcagcttcccccccaaggaggagaagtacctgcagcagatcgtggactgcctgccctgcatcctgatcctgggccaggactgcaacgtgaagtgccagctgctgaacctgctgctgggcgtgcaggtgctgcccaccaccaagctgggcagcgaggagagctgcaagctgagaagactgagattcacctacggcacccagaccagagtgagcctggccctgcccggccagtacgagctggtgcacaccctggtggcccaccagggcaactgggagaccatccccgaggaggacctggaggtgcaggagaacaacgaggacgccgcccacgtgctggccgagctggaggtgaccatgcaccacgccctgctgcaggaggtggacgtggtggtggccccctgccagggcctgagacccaccgtggacgtgctgggcgacctggtgaacgacttcctgcccgtgatcacctacgccctgcacaaggacgagctgagcgagagagacgagcaggagctgcaggagatcagaaagtacttcagcttccccgtgttcttcttcaaggtgcccaagctgggcagcgagatcatcgacagcagcaccagaagaatggagagcgagagaagccccctgtacagacagctgatcgacctgggctacctgagcagcagccactggaactgcggcgcccccggccaggacaccaaggcccagagcatgctggtggagcagagcgagaagctgagacacctgagcaccttcagccaccaggtgctgcagaccagactggtggacgccgccaaggccctgaacctggtgcactgccactgcctggacatcttcatcaaccaggccttcgacatgcagagagacctgcagatcacccccaagagactggagtacaccagaaagaaggagaacgagctgtacgagagcctgatgaacatcgccaacagaaagcaggaggagatgaaggacatgatcgtggagaccctgaacaccatgaaggaggagctgctggacgacgccaccaacatggagttcaaggacgtgatcgtgcccgagaacggcgagcccgtgggcaccagagagatcaagtgctgcatcagacagatccaggagctgatcatcagcagactgaaccaggccgtggccaacaagctgatcagcagcgtggactacctgagagagagcttcgtgggcaccctggagagatgcctgcagagcctggagaagagccaggacgtgagcgtgcacatcaccagcaactacctgaagcagatcctgaacgccgcctaccacgtggaggtgaccttccacagcggcagcagcgtgaccagaatgctgtgggagcagatcaagcagatcatccagagaatcacctgggtgagcccccccgccatcaccctggagtggaagagaaaggtggcccaggaggccatcgagagcctgagcgccagcaagctggccaagagcatctgcagccagttcagaaccagactgaacagcagccacgaggccttcgccgccagcctgagacagctggaggccggccacagcggcagactggagaagaccgaggacctgtggctgagagtgagaaaggaccacgcccccagactggccagactgagcctggagagctgcagcctgcaggacgtgctgctgcacagaaagcccaagctgggccaggagctgggcagaggccagtacggcgtggtgtacctgtgcgacaactggggcggccacttcccctgcgccctgaagagcgtggtgccccccgacgagaagcactggaacgacctggccctggagttccactacatgagaagcctgcccaagcacgagagactggtggacctgcacggcagcgtgatcgactacaactacggcggcggcagcagcatcgccgtgctgctgatcatggagagactgcacagagacctgtacaccggcctgaaggccggcctgaccctggagaccagactgcagatcgccctggacgtggtggagggcatcagattcctgcacagccagggcctggtgcacagagacatcaagctgaagaacgtgctgctggacaagcagaacagagccaagatcaccgacctgggcttctgcaagcccgaggccatgatgagcggcagcatcgtgggcacccccatccacatggcccccgagctgttcaccggcgccagacccgagagactgcccgtgttcgacgaggagtgctggcagctgatggaggcctgctgggacggcgaccccctgaagagacccctgctgggcatcgtgcagcccatgctgcagggcatcatgaacagactgtgcaagagcaacagcgagcagcccaacagaggcctggacgacagcacctag

SEQ ID NO: 79720 - DNA, 2790 bp, synthetic construct
  misc_feature 1..2790: note = Description of Artificial Sequence: Synthetic coding sequence
  source 1..2790: mol_type = other DNA
atggagggcgacggcgtgccctggggcagcgagcccgtgagcggccccggccccggcggcggcggcatgatcagagagctgtgcagaggcttcggcagatacagaagatacctgggcagactgagacagaacctgagagagacccagaagttcttcagagacatcaagtgcagccacaaccacacctgcctgagcagcctgaccggcggcggcggcgccgagagaggccccgccggcgacgtggccgagaccggcctgcaggccggccagctgagctgcatcagcttcccccccaaggaggagaagtacctgcagcagatcgtggactgcctgccctgcatcctgatcctgggccaggactgcaacgtgaagtgccagctgctgaacctgctgctgggcgtgcaggtgctgcccaccaccaagctgggcagcgaggagagctgcaagctgagaagactgagattcacctacggcacccagaccagagtgagcctggccctgcccggccagtacgagctggtgcacaccctggtggcccaccagggcaactgggagaccatccccgaggaggacctggaggtgcaggagaacaacgaggacgccgcccacgtgctggccgagctggaggtgaccatgcaccacgccctgctgcaggaggtggacgtggtggtggccccctgccagggcctgagacccaccgtggacgtgctgggcgacctggtgaacgacttcctgcccgtgatcacctacgccctgcacaaggacgagctgagcgagagagacgagcaggagctgcaggagatcagaaagtacttcagcttccccgtgttcttcttcaaggtgcccaagctgggcagcgagatcatcgacagcagcaccagaagaatggagagcgagagaagccccctgtacagacagctgatcgacctgggctacctgagcagcagccactggaactgcggcgcccccggccaggacaccaaggcccagagcatgctggtggagcagagcgagaagctgagacacctgagcaccttcagccaccaggtgctgcagaccagactggtggacgccgccaaggccctgaacctggtgcactgccactgcctggacatcttcatcaaccaggccttcgacatgcagagagacctgcagatcacccccaagagactggagtacaccagaaagaaggagaacgagctgtacgagagcctgatgaacatcgccaacagaaagcaggaggagatgaaggacatgatcgtggagaccctgaacaccatgaaggaggagctgctggacgacgccaccaacatggagttcaaggacgtgatcgtgcccgagaacggcgagcccgtgggcaccagagagatcaagtgctgcatcagacagatccaggagctgatcatcagcagactgaaccaggccgtggccaacaagctgatcagcagcgtggactacctgagagagagcttcgtgggcaccctggagagatgcctgcagagcctggagaagagccaggacgtgagcgtgcacatcaccagcaactacctgaagcagatcctgaacgccgcctaccacgtggaggtgaccttccacagcggcagcagcgtgaccagaatgctgtgggagcagatcaagcagatcatccagagaatcacctgggtgagcccccccgccatcaccctggagtggaagagaaaggtggcccaggaggccatcgagagcctgagcgccagcaagctggccaagagcatctgcagccagttcagaaccagactgaacagcagccacgaggccttcgccgccagcctgagacagctggaggccggccacagcggcagactggagaagaccgaggacctgtggctgagagtgagaaaggaccacgcccccagactggccagactgagcctggagagctgcagcctgcaggacgtgctgctgcacagaaagcccaagctgggccaggagctgggcagaggccagtacggcgtggtgtacctgtgcgacaactggggcggccacttcccctgcgccctgaagagcgtggtgccccccgacgagaagcactggaacgacctggccctggagttccactacatgagaagcctgcccaagcacgagagactggtggacctgcacggcagcgtgatcgactacaactacggcggcggcagcagcatcgccgtgctgctgatcatggagagactgcacagagacctgtacaccggcctgaaggccggcctgaccctggagaccagactgcagatcgccctggacgtggtggagggcatcagattcctgcacagccagggcctggtgcacagagacatcaagctgaagaacgtgctgctggacaagcagaacagagccaagatcaccgacctgggcttctgcaagcccgaggccatgatgagcggcagcatcgtgggcacccccatccacatggcccccgagctgttcaccggcaagtacgacaacagcgtggacgtgtacgccttcggcatcctgttctggtacatctgcagcggcagcgtgaagctgcccgaggccttcgagagatgcgccagcaaggaccacctgtggaacaacgtgagaagaggcgccagacccgagagactgcccgtgttcgacgaggagtgctggcagctgatggaggcctgctgggacggcgaccccctgaagagacccctgctgggcatcgtgcagcccatgctgcagggcatcatgaacagactgtgcaagagcaacagcgagcagcccaacagaggcctggacgacagcacctag

SEQ ID NO: 79721 - DNA, 1104 bp, synthetic construct
  misc_feature 1..1104: note = Description of Artificial Sequence: Synthetic coding sequence
  source 1..1104: mol_type = other DNA
atggtgatggaggtgggcaccctggacgccggcggcctgagagccctgctgggcgagagagccgcccagtgcctgctgctggactgcagaagcttcttcgccttcaacgccggccacatcgccggcagcgtgaacgtgagattcagcaccatcgtgagaagaagagccaagggcgccatgggcctggagcacatcgtgcccaacgccgagctgagaggcagactgctggccggcgcctaccacgccgtggtgctgctggacgagagaagcgccgccctggacggcgccaagagagacggcaccctggccctggccgccggcgccctgtgcagagaggccagagccgcccaggtgttcttcctgaagggcggctacgaggccttcagcgccagctgccccgagctgtgcagcaagcagagcacccccatgggcctgagcctgcccctgagcaccagcgtgcccgacagcgccgagagcggctgcagcagctgcagcacccccctgtacgaccagggcggccccgtggagatcctgcccttcctgtacctgggcagcgcctaccacgccagcagaaaggacatgctggacgccctgggcatcaccgccctgatcaacgtgagcgccaactgccccaaccacttcgagggccactaccagtacaagagcatccccgtggaggacaaccacaaggccgacatcagcagctggttcaacgaggccatcgacttcatcgacagcatcaagaacgccggcggcagagtgttcgtgcactgccaggccggcatcagcagaagcgccaccatctgcctggcctacctgatgagaaccaacagagtgaagctggacgaggccttcgagttcgtgaagcagagaagaagcatcatcagccccaacttcagcttcatgggccagctgctgcagttcgagagccaggtgctggccccccactgcagcgccgaggccggcagccccgccatggccgtgctggacagaggcaccagcaccaccaccgtgttcaacttccccgtgagcatccccgtgcacagcaccaacagcgccctgagctacctgcagagccccatcaccaccagccccagctgctag

SEQ ID NO: 79722 - DNA, 909 bp, synthetic construct
  misc_feature 1..909: note = Description of Artificial Sequence: Synthetic coding sequence
  source 1..909: mol_type = other DNA
atggtgatggaggtgggcaccctggacgccggcggcctgagagccctgctgggcgagagagccgcccagtgcctgctgctggactgcagaagcttcttcgccttcaacgccggccacatcgccggcagcgtgaacgtgagattcagcgccgcccaggtgttcttcctgaagggcggctacgaggccttcagcgccagctgccccgagctgtgcagcaagcagagcacccccatgggcctgagcctgcccctgagcaccagcgtgcccgacagcgccgagagcggctgcagcagctgcagcacccccctgtacgaccagggcggccccgtggagatcctgcccttcctgtacctgggcagcgcctaccacgccagcagaaaggacatgctggacgccctgggcatcaccgccctgatcaacgtgagcgccaactgccccaaccacttcgagggccactaccagtacaagagcatccccgtggaggacaaccacaaggccgacatcagcagctggttcaacgaggccatcgacttcatcgacagcatcaagaacgccggcggcagagtgttcgtgcactgccaggccggcatcagcagaagcgccaccatctgcctggcctacctgatgagaaccaacagagtgaagctggacgaggccttcgagttcgtgaagcagagaagaagcatcatcagccccaacttcagcttcatgggccagctgctgcagttcgagagccaggtgctggccccccactgcagcgccgaggccggcagccccgccatggccgtgctggacagaggcaccagcaccaccaccgtgttcaacttccccgtgagcatccccgtgcacagcaccaacagcgccctgagctacctgcagagccccatcaccaccagccccagctgctag

SEQ ID NO: 79723 - DNA, 1023 bp, synthetic construct
  misc_feature 1..1023: note = Description of Artificial Sequence: Synthetic coding sequence
  source 1..1023: mol_type = other DNA
atggtgatggaggtgggcaccctggacgccggcggcctgagagccctgctgggcgagagagccgcccagtgcctgctgctggactgcagaagcttcttcgccttcaacgccggccacatcgccggcagcgtgaacgtgagattcagcaccatcgtgagaagaagagccaagggcgccatgggcctggagcacatcgtgcccaacgccaagagagacggcaccctggccctggccgccggcgccctgtgcagagaggccagagccgcccaggtgttcttcctgaagggcggctacgaggccttcagcgccagctgccccgagctgtgcagcaagcagagcacccccatgggcctgagcctgcccctgagcaccagcgtgcccgacagcgccgagagcggctgcagcagctgcagcacccccctgtacgaccagggcggccccgtggagatcctgcccttcctgtacctgggcagcgcctaccacgccagcagaaaggacatgctggacgccctgggcatcaccgccctgatcaacgtgagcgccaactgccccaaccacttcgagggccactaccagtacaagagcatccccgtggaggacaaccacaaggccgacatcagcagctggttcaacgaggccatcgacttcatcgacagcatcaagaacgccggcggcagagtgttcgtgcactgccaggccggcatcagcagaagcgccaccatctgcctggcctacctgatgagaaccaacagagtgaagctggacgaggccttcgagttcgtgaagcagagaagaagcatcatcagccccaacttcagcttcatgggccagctgctgcagttcgagagccaggtgctggccccccactgcagcgccgaggccggcagccccgccatggccgtgctggacagaggcaccagcaccaccaccgtgttcaacttccccgtgagcatccccgtgcacagcaccaacagcgccctgagctacctgcagagccccatcaccaccagccccagctgctag

SEQ ID NO: 79724 - DNA, 1134 bp, synthetic construct
  misc_feature 1..1134: note = Description of Artificial Sequence: Synthetic coding sequence
  source 1..1134: mol_type = other DNA
atgagaaacagcgagaccctggagagaggcgtgggcggctgcagagtgttcagctgcctgggcagctaccccggcatcgagggcgccggcctggccctgctggccgacctggccctgggcggcagactgctgggcacccacatgagccagtggcaccaccccagaagcggctggggcagaagaagagacttcagcggcagaagcagcgccaagaagaagggcggcaaccacatccccgagagatggaaggactacctgcccgtgggccagagaatgcccggcaccagattcatcgccttcaaggtgcccctgcagaagagcttcgagaagaagctggcccccgaggagtgcttcagccccctggacctgttcaacaagatcagagagcagaacgaggagctgggcctgatcatcgacctgacctacacccagagatactacaagcccgaggacctgcccgagaccgtgccctacctgaagatcttcaccgtgggccaccaggtgcccgacgacgagaccatcttcaagttcaagcacgccgtgaacggcttcctgaaggagaacaaggacaacgacaagctgatcggcgtgcactgcacccacggcctgaacagaaccggctacctgatctgcagatacctgatcgacgtggagggcgtgagacccgacgacgccatcgagctgttcaacagatgcagaggccactgcctggagagacagaactacatcgaggacctgcagaacggccccatcagaaagaactggaacagcagcgtgcccagaagcagcgacttcgaggacagcgcccacctgatgcagcccgtgcacaacaagcccgtgaagcagggccccagatacaacctgcaccagatccagggccacagcgcccccagacacttccacacccagacccagagcctgcagcagagcgtgagaaagttcagcgagaacccccacgtgtaccagagacaccacctgcccccccccggcccccccggcgaggactacagccacagaagatacagctggaacgtgaagcccaacgccagcagagccgcccaggacagaagaagatggtacccctacaactacagcagactgagctaccccgcctgctgggagtggacccagtag

SEQ ID NO: 79725 - DNA, 681 bp, synthetic construct
  misc_feature 1..681: note = Description of Artificial Sequence: Synthetic coding sequence
  source 1..681: mol_type = other DNA
atgagccagtggcaccaccccagaagcggctggggcagaagaagagacttcagcggcagaagcagcgccaagaagaagggcggcaaccacatccccgagagatggaaggactacctgcccgtgggccagagaatgcccggcaccagattcatcgccttcaaggtgcccctgcagaagagcttcgagaagaagctggcccccgaggagtgcttcagccccctggacctgttcaacaagatcagagagcagaacgaggagctgggcctgatcatcgacctgacctacacccagagatactacaagcccgaggacctgcccgagaccgtgccctacctgaagatcttcaccgtgggccaccaggtgcccgacgacgagaccatcttcaagttcaagcacgccgtgaacggcttcctgaaggagaacaaggacaacgacaagctgatcggcgtgcactgcacccacggcctgaacagaaccggctacctgatctgcagaagaagcctggccctgagccccagactggagtgcagcggcaccatcagcacccacagcaagttctgcttccccggcagcagaagaagccccgccagcgccagccaggtggccggcaccaccggcgccagacaccacgccagactgatcttctgcatcttcagcagagacgtggtgagcccctgctag

SEQ ID NO: 79726 - DNA, 822 bp, synthetic construct
  misc_feature 1..822: note = Description of Artificial Sequence: Synthetic coding sequence
  source 1..822: mol_type = other DNA
atgagaaacagcgagaccctggagagaggcgtgggcggctgcagagtgttcagctgcctgggcagctaccccggcatcgagggcgccggcctggccctgctggccgacctggccctgggcggcagactgctgggcacccacatgagccagtggcaccaccccagaagcggctggggcagaagaagagacttcagcggcagaagcagcgccaagaagaagggcggcaaccacatccccgagagatggaaggactacctgcccgtgggccagagaatgcccggcaccagattcatcgccttcaaggtgcccctgcagaagagcttcgagaagaagctggcccccgaggagtgcttcagccccctggacctgttcaacaagatcagagagcagaacgaggagctgggcctgatcatcgacctgacctacacccagagatactacaagcccgaggacctgcccgagaccgtgccctacctgaagatcttcaccgtgggccaccaggtgcccgacgacgagaccatcttcaagttcaagcacgccgtgaacggcttcctgaaggagaacaaggacaacgacaagctgatcggcgtgcactgcacccacggcctgaacagaaccggctacctgatctgcagaagaagcctggccctgagccccagactggagtgcagcggcaccatcagcacccacagcaagttctgcttccccggcagcagaagaagccccgccagcgccagccaggtggccggcaccaccggcgccagacaccacgccagactgatcttctgcatcttcagcagagacgtggtgagcccctgctag

SEQ ID NO: 79727 - DNA, 597 bp, synthetic construct
  misc_feature 1..597: note = Description of Artificial Sequence: Synthetic coding sequence
  source 1..597: mol_type = other DNA
atggacagcctgcagaagcaggacctgagaagacccaagatccacggcgccgtgcaggccagcccctaccagccccccaccctggccagcctgcagagactgctgtgggtgagacaggccgccaccctgaaccacatcgacgaggtgtggcccagcctgttcctgggcgacgcctacgccgccagagacaagagcaagctgatccagctgggcatcacccacgtggtgaacgccgccgccggcaagttccaggtggacaccggcgccaagttctacagaggcatgagcctggagtactacggcatcgaggccgacgacaaccccttcttcgacctgagcgtgtacttcctgcccgtggccagatacatcagagccgccctgagcgtgccccagggcagagtgctggtgcactgcgccatgggcgtgagcagaagcgccaccctggtgctggccttcctgatgatctgcgagaacatgaccctggtggaggccatccagaccgtgcaggcccacagaaacatctgccccaacagcggcttcctgagacagctgcaggtgctggacaacagactgggcagagagaccggcagattctag

SEQ ID NO: 79728 - DNA, 747 bp, synthetic construct
  misc_feature 1..747: note = Description of Artificial Sequence: Synthetic coding sequence
  source 1..747: mol_type = other DNA
atggccgagaccagcctgcccgagctgggcggcgaggacaaggccaccccctgccccagcatcctggagctggaggagctgctgagagccggcaagagcagctgcagcagagtggacgaggtgtggcccaacctgttcatcggcgacgccatggacagcctgcagaagcaggacctgagaagacccaagatccacggcgccgtgcaggccagcccctaccagccccccaccctggccagcctgcagagactgctgtgggtgagacaggccgccaccctgaaccacatcgacgaggtgtggcccagcctgttcctgggcgacgcctacgccgccagagacaagagcaagctgatccagctgggcatcacccacgtggtgaacgccgccgccggcaagttccaggtggacaccggcgccaagttctacagaggcatgagcctggagtactacggcatcgaggccgacgacaaccccttcttcgacctgagcgtgtacttcctgcccgtggccagatacatcagagccgccctgagcgtgccccagggcagagtgctggtgcactgcgccatgggcgtgagcagaagcgccaccctggtgctggccttcctgatgatctgcgagaacatgaccctggtggaggccatccagaccgtgcaggcccacagaaacatctgccccaacagcggcttcctgagacagctgcaggtgctggacaacagactgggcagagagaccggcagattctag

SEQ ID NO: 79729 - DNA, 567 bp, synthetic construct
  misc_feature 1..567: note = Description of Artificial Sequence: Synthetic coding sequence
  source 1..567: mol_type = other DNA
atggccgagaccagcctgcccgagctgggcggcgaggacaaggccaccccctgccccagcatcctggagctggaggagctgctgagagccggcaagagcagctgcagcagagtggacgaggtgtggcccaacctgttcatcggcgacgccgccaccgccaacaacagattcgagctgtggaagctgggcatcacccacgtgctgaacgccgcccacaagggcctgtactgccagggcggccccgacttctacggcagcagcgtgagctacctgggcgtgcccgcccacgacctgcccgacttcgacatcagcgcctacttcagcagcgccgccgacttcatccacagagccctgaacacccccggcgccaaggtgctggtgcactgcgtggtgggcgtgagcagaagcgccaccctggtgctggcctacctgatgctgcaccagagactgagcctgagacaggccgtgatcaccgtgagacagcacagatgggtgttccccaacagaggcttcctgcaccagctgtgcagactggaccagcagctgagaggcgccggccagagctag

SEQ ID NO: 79730 - DNA, 876 bp, synthetic construct
  misc_feature 1..876: note = Description of Artificial Sequence: Synthetic coding sequence
  source 1..876: mol_type = other DNA
atgggcctgtgccacttcgccaccctggccctgatcctgctggtgctgctggaggccctggcccaggccgacacccagaagatggtggaggcccagagaggcgtgggccccagagcctgctacagcatctggctgctgctggcccccaccccccccctgagccactgcctgcagagcccccagaagcagcaccaggtgtgcggcgacagaagactgaaggccagcagcaccaactgccccagcgagaagtgcaccgcctgggccagatacagccacagaatggacagcctgcagaagcaggacctgagaagacccaagatccacggcgccgtgcaggccagcccctaccagccccccaccctggccagcctgcagagactgctgtgggtgagacaggccgccaccctgaaccacatcgacgaggtgtggcccagcctgttcctgggcgacgcctacgccgccagagacaagagcaagctgatccagctgggcatcacccacgtggtgaacgccgccgccggcaagttccaggtggacaccggcgccaagttctacagaggcatgagcctggagtactacggcatcgaggccgacgacaaccccttcttcgacctgagcgtgtacttcctgcccgtggccagatacatcagagccgccctgagcgtgccccagggcagagtgctggtgcactgcgccatgggcgtgagcagaagcgccaccctggtgctggccttcctgatgatctgcgagaacatgaccctggtggaggccatccagaccgtgcaggcccacagaaacatctgccccaacagcggcttcctgagacagctgcaggtgctggacaacagactgggcagagagaccggcagattctag

SEQ ID NO: 79731 - DNA, 597 bp, synthetic construct; identical to SEQ ID NO: 79727
  misc_feature 1..597: note = Description of Artificial Sequence: Synthetic coding sequence
  source 1..597: mol_type = other DNA

SEQ ID NO: 79732 - DNA, 984 bp, synthetic construct
  misc_feature 1..984: note = Description of Artificial Sequence: Synthetic coding sequence
  source 1..984: mol_type = other DNA
atgggcctgccccagcccagactgcccgcccccgccctgcaggccggccccgccaccgccggctgcagacccgagctgagaggccagagctggagcctgctgcccgccatgggcctgtgccacttcgccaccctggccctgatcctgctggtgctgctggaggccctggcccaggccgacacccagaagatggtggaggcccagagaggcgtgggccccagagcctgctacagcatctggctgctgctggcccccaccccccccctgagccactgcctgcagagcccccagaagcagcaccaggtgtgcggcgacagaagactgaaggccagcagcaccaactgccccagcgagaagtgcaccgcctgggccagatacagccacagaatggacagcctgcagaagcaggacctgagaagacccaagatccacggcgccgtgcaggccagcccctaccagccccccaccctggccagcctgcagagactgctgtgggtgagacaggccgccaccctgaaccacatcgacgaggtgtggcccagcctgttcctgggcgacgcctacgccgccagagacaagagcaagctgatccagctgggcatcacccacgtggtgaacgccgccgccggcaagttccaggtggacaccggcgccaagttctacagaggcatgagcctggagtactacggcatcgaggccgacgacaaccccttcttcgacctgagcgtgtacttcctgcccgtggccagatacatcagagccgccctgagcgtgccccagggcagagtgctggtgcactgcgccatgggcgtgagcagaagcgccaccctggtgctggccttcctgatgatctgcgagaacatgaccctggtggaggccatccagaccgtgcaggcccacagaaacatctgccccaacagcggcttcctgagacagctgcaggtgctggacaacagactgggcagagagaccggcagattctag

SEQ ID NO: 79733 - DNA, 597 bp, synthetic construct
  misc_feature 1..597: note = Description of Artificial Sequence: Synthetic coding sequence
  source 1..597: mol_type = other DNA
atgagcagcagaggccacagcaccctgcccagaaccctgatggcccccagaatgatcagcgagggcgacatcggcggcatcgcccagatcaccagcagcctgttcctgggcagaggcagcgtggccagcaacagacacctgctgcaggccagaggcatcacctgcatcgtgaacgccaccatcgagatccccaacttcaactggccccagttcgagtacgtgaaggtgcccctggccgacatgccccacgcccccatcggcctgtacttcgacaccgtggccgacaagatccacagcgtgagcagaaagcacggcgccaccctggtgcactgcgccgccggcgtgagcagaagcgccaccctgtgcatcgcctacctgatgaagttccacaacgtgtgcctgctggaggcctacaactgggtgaaggccagaagacccgtgatcagacccaacgtgggcttctggagacagctgatcgactacgagagacagctgttcggcaagagcaccgtgaagatggtgcagaccccctacggcatcgtgcccgacgtgtacgagaaggagagcagacacctgatgccctactggggcatctag

SEQ ID NO: 79734 - DNA, 597 bp, synthetic construct; identical to SEQ ID NO: 79733
  misc_feature 1..597: note = Description of Artificial Sequence: Synthetic coding sequence
  source 1..597: mol_type = other DNA

SEQ ID NO: 79735 - DNA, 945 bp, synthetic construct
  misc_feature 1..945: note = Description of Artificial Sequence: Synthetic coding sequence
  source 1..945: mol_type = other DNA
atgggcctggaggccgccagagagctggagtgcgccgccctgggcaccctgctgagagaccccagagaggccgagagaaccctgctgctggactgcagacccttcctggccttctgcagaagacacgtgagagccgccagacccgtgccctggaacgccctgctgagaagaagagccagaggcccccccgccgccgtgctggcctgcctgctgcccgacagagccctgagaaccagactggtgagaggcgagctggccagagccgtggtgctggacgagggcagcgccagcgtggccgagctgagacccgacagccccgcccacgtgctgctggccgccctgctgcacgagaccagagccggccccaccgccgtgtacttcctgagaggcggcttcgacggcttccagggctgctgccccgacctgtgcagcgaggcccccgcccccgccctgccccccaccggcgacaagaccagcagaagcgacagcagagcccccgtgtacgaccagggcggccccgtggagatcctgccctacctgttcctgggcagctgcagccacagcagcgacctgcagggcctgcaggcctgcggcatcaccgccgtgctgaacgtgagcgccagctgccccaaccacttcgagggcctgttcagatacaagagcatccccgtggaggacaaccagatggtggagatcagcgcctggttccaggaggccatcggcttcatcgactgggtgaagaacagcggcggcagagtgctggtgcactgccaggccggcatcagcagaagcgccaccatctgcctggcctacctgatgcagagcagaagagtgagactggacgaggccttcgacttcgtgaagcagagaagaggcgtgatcagccccaacttcagcttcatgggccagctgctgcagttcgagacccaggtgctgtgccactag

SEQ ID NO: 79736 - DNA, 288 bp, synthetic construct
  misc_feature 1..288: note = Description of Artificial Sequence: Synthetic coding sequence
  source 1..288: mol_type = other DNA
atggccgccgccagactgtgcctgagcctgctgctgctgagcacctgcgtggccctgctgctgcagcccctgctgggcgcccagggcgcccccctggagcccgtgtaccccggcgacaacgccacccccgagcagatggcccagtacgccgccgacctgagaagatacatcaacatgctgaccagacccagatacggcaagagacacaaggaggacaccctggccttcagcgagtggggcagcccccacgccgccgtgcccagagagctgagccccctggacctgtag

SEQ ID NO: 79737 - DNA, 435 bp, synthetic construct
  misc_feature 1..435: note = Description of Artificial Sequence: Synthetic coding sequence
  source 1..435: mol_type = other DNA
atgagcgtggcccaggacatccccaagctgcagaagctgggcatcacccacgtgctgaacgccgccgagggcagaagcttcatgcacgtgaacaccaacgccaacttctacaaggacagcggcatcacctacctgggcatcaaggccaacgacacccaggagttcaacctgagcgcctacttcgagagagccgccgacttcatcgaccaggccctggcccagaagaacggcagagtgctggtgcactgcagagagggctacagcagaagccccaccctggtgatcgcctacctgatgatgagacagaagatggacgtgaagagcgccctgagcatcgtgagacagaacagagagatcggccccaacgacggcttcctggcccagctgtgccagctgaacgacagactggccaaggagggcaagctgaagccctag

SEQ ID NO: 79738 - DNA, 1185 bp, synthetic construct
  misc_feature 1..1185: note = Description of Artificial Sequence: Synthetic coding sequence
  source 1..1185: mol_type = other DNA
atggtgaccatggaggagctgagagagatggactgcagcgtgctgaagagactgatgaacagagacgagaacggcggcggcgccggcggcagcggcagccacggcaccctgggcctgcccagcggcggcaagtgcctgctgctggactgcagacccttcctggcccacagcgccggctacatcctgggcagcgtgaacgtgagatgcaacaccatcgtgagaagaagagccaagggcagcgtgagcctggagcagatcctgcccgccgaggaggaggtgagagccagactgagaagcggcctgtacagcgccgtgatcgtgtacgacgagagaagccccagagccgagagcctgagagaggacagcaccgtgagcctggtggtgcaggccctgagaagaaacgccgagagaaccgacatctgcctgctgaagggcggctacgagagattcagcagcgagtaccccgagttctgcagcaagaccaaggccctggccgccatccccccccccgtgccccccagcgccaccgagcccctggacctgggctgcagcagctgcggcacccccctgcacgaccagggcggccccgtggagatcctgcccttcctgtacctgggcagcgcctaccacgccgccagaagagacatgctggacgccctgggcatcaccgccctgctgaacgtgagcagcgactgccccaaccacttcgagggccactaccagtacaagtgcatccccgtggaggacaaccacaaggccgacatcagcagctggttcatggaggccatcgagtacatcgacgccgtgaaggactgcagaggcagagtgctggtgcactgccaggccggcatcagcagaagcgccaccatctgcctggcctacctgatgatgaagaagagagtgagactggaggaggccttcgagttcgtgaagcagagaagaagcatcatcagccccaacttcagcttcatgggccagctgctgcagttcgagagccaggtgctggccaccagctgcgccgccgaggccgccagccccagcggccccctgagagagagaggcaagacccccgccacccccaccagccagttcgtgttcagcttccccgtgagcgtgggcgtgcacagcgcccccagcagcctgccctacctgcacagccccatcaccaccagccccagctgctag

SEQ ID NO: 79739 - DNA, 912 bp, synthetic construct
  misc_feature 1..912: note = Description of Artificial Sequence: Synthetic coding sequence
  source 1..912: mol_type = other DNA
atgggcagaaaggtgcacagcaacggcagccagttcgccgagcacagcagaagccccagaagaaccggcagagactgcaagcccgtgagagcccccagcatggccctgggcgtgagccagctggccggcagaagcagatgcctgtgcagcgagagccagggcggctacgagagattcagcagcgagtaccccgagttctgcagcaagaccaaggccctggccgccatccccccccccgtgccccccagcgccaccgagcccctggacctgggctgcagcagctgcggcacccccctgcacgaccagggcggccccgtggagatcctgcccttcctgtacctgggcagcgcctaccacgccgccagaagagacatgctggacgccctgggcatcaccgccctgctgaacgtgagcagcgactgccccaaccacttcgagggccactaccagtacaagtgcatccccgtggaggacaaccacaaggccgacatcagcagctggttcatggaggccatcgagtacatcgacgccgtgaaggactgcagaggcagagtgctggtgcactgccaggccggcatcagcagaagcgccaccatctgcctggcctacctgatgatgaagaagagagtgagactggaggaggccttcgagttcgtgaagcagagaagaagcatcatcagccccaacttcagcttcatgggccagctgctgcagttcgagagccaggtgctggccaccagctgcgccgccgaggccgccagccccagcggccccctgagagagagaggcaagacccccgccacccccaccagccagttcgtgttcagcttccccgtgagcgtgggcgtgcacagcgcccccagcagcctgccctacctgcacagccccatcaccaccagccccagctgctag

SEQ ID NO: 79740 - DNA, 1155 bp, synthetic construct
  misc_feature 1..1155: note = Description of Artificial Sequence: Synthetic coding sequence
  source 1..1155: mol_type = other DNA
atgaaggtgaccagcctggacggcagacagctgagaaagatgctgagaaaggaggccgccgccagatgcgtggtgctggactgcagaccctacctggccttcgccgccagcaacgtgagaggcagcctgaacgtgaacctgaacagcgtggtgctgagaagagccagaggcggcgccgtgagcgccagatacgtgctgcccgacgaggccgccagagccagactgctgcaggagggcggcggcggcgtggccgccgtggtggtgctggaccagggcagcagacactggcagaagctgagagaggagagcgccgccagagtggtgctgaccagcctgctggcctgcctgcccgccggccccagagtgtacttcctgaagggcggctacgagaccttctacagcgagtaccccgagtgctgcgtggacgtgaagcccatcagccaggagaagatcgagagcgagagagccctgatcagccagtgcggcaagcccgtggtgaacgtgagctacagacccgcctacgaccagggcggccccgtggagatcctgcccttcctgtacctgggcagcgcctaccacgccagcaagtgcgagttcctggccaacctgcacatcaccgccctgctgaacgtgagcagaagaaccagcgaggcctgcgccacccacctgcactacaagtggatccccgtggaggacagccacaccgccgacatcagcagccacttccaggaggccatcgacttcatcgactgcgtgagagagaagggcggcaaggtgctggtgcactgcgaggccggcatcagcagaagccccaccatctgcatggcctacctgatgaagaccaagcagttcagactgaaggaggccttcgactacatcaagcagagaagaagcatggtgagccccaacttcggcttcatgggccagctgctgcagtacgagagcgagatcctgcccagcacccccaacccccagccccccagctgccagggcgaggccgccggcagcagcctgatcggccacctgcagaccctgagccccgacatgcagggcgcctactgcaccttccccgccagcgtgctggcccccgtgcccacccacagcaccgtgagcgagctgagcagaagccccgtggccaccgccaccagctgctag

SEQ ID NO: 79741 - DNA, 1107 bp, synthetic construct
  misc_feature 1..1107: note = Description of Artificial Sequence: Synthetic coding sequence
  source 1..1107: mol_type = other DNA
atgccctgcaagagcgccgagtggctgcaggaggagctggaggccagaggcggcgccagcctgctgctgctggactgcagaccccacgagctgttcgagagcagccacatcgagaccgccatcaacctggccatccccggcctgatgctgagaagactgagaaagggcaacctgcccatcagaagcatcatccccaaccacgccgacaaggagagattcgccaccagatgcaaggccgccaccgtgctgctgtacgacgaggccaccgccgagtggcagcccgagcccggcgcccccgccagcgtgctgggcctgctgctgcagaagctgagagacgacggctgccaggcctactacctgcagggcggcttcaacaagttccagaccgagtacagcgagcactgcgagaccaacgtggacagcagcagcagccccagcagcagcccccccaccagcgtgctgggcctgggcggcctgagaatcagcagcgactgcagcgacggcgagagcgacagagagctgcccagcagcgccaccgagagcgacggcagccccgtgcccagcagccagcccgccttccccgtgcagatcctgccctacctgtacctgggctgcgccaaggacagcaccaacctggacgtgctgggcaagtacggcatcaagtacatcctgaacgtgacccccaacctgcccaacgccttcgagcacggcggcgagttcacctacaagcagatccccatcagcgaccactggagccagaacctgagccagttcttccccgaggccatcagcttcatcgacgaggccagaagcaagaagtgcggcgtgctggtgcactgcctggccggcatcagcagaagcgtgaccgtgaccgtggcctacctgatgcagaagatgaacctgagcctgaacgacgcctacgacttcgtgaagagaaagaagagcaacatcagccccaacttcaacttcatgggccagctgctggacttcgagagaaccctgggcctgagcagcccctgcgacaaccacgccagcagcgagcagctgtacttcagcacccccaccaaccacaacctgttccccctgaacaccctggagagcacctag

SEQ ID NO: 79742 - DNA, 1260 bp, synthetic construct
  misc_feature 1..1260: note = Description of Artificial Sequence: Synthetic coding sequence
  source 1..1260: mol_type = other DNA
atgaagaaccagctgagaggcccccccgccagagcccacatgagcaccagcggcgccgccgccgccggcggcaccagagccggcagcgagcccggcgccggcagcggcagcggcgccggcaccggcgccggcgccgccaccggcgccggcgccatgccctgcaagagcgccgagtggctgcaggaggagctggaggccagaggcggcgccagcctgctgctgctggactgcagaccccacgagctgttcgagagcagccacatcgagaccgccatcaacctggccatccccggcctgatgctgagaagactgagaaagggcaacctgcccatcagaagcatcatccccaaccacgccgacaaggagagattcgccaccagatgcaaggccgccaccgtgctgctgtacgacgaggccaccgccgagtggcagcccgagcccggcgcccccgccagcgtgctgggcctgctgctgcagaagctgagagacgacggctgccaggcctactacctgcagggcggcttcaacaagttccagaccgagtacagcgagcactgcgagaccaacgtggacagcagcagcagccccagcagcagcccccccaccagcgtgctgggcctgggcggcctgagaatcagcagcgactgcagcgacggcgagagcgacagagagctgcccagcagcgccaccgagagcgacggcagccccgtgcccagcagccagcccgccttccccgtgcagatcctgccctacctgtacctgggctgcgccaaggacagcaccaacctggacgtgctgggcaagtacggcatcaagtacatcctgaacgtgacccccaacctgcccaacgccttcgagcacggcggcgagttcacctacaagcagatccccatcagcgaccactggagccagaacctgagccagttcttccccgaggccatcagcttcatcgacgaggccagaagcaagaagtgcggcgtgctggtgcactgcctggccggcatcagcagaagcgtgaccgtgaccgtggcctacctgatgcagaagatgaacctgagcctgaacgacgcctacgacttcgtgaagagaaagaagagcaacatcagccccaacttcaacttcatgggccagctgctggacttcgagagaaccctgggcctgagcagcccctgcgacaaccacgccagcagcgagcagctgtacttcagcacccccaccaaccacaacctgttccccctgaacaccctggagagcacctag

SEQ ID NO: 79743 - DNA, 1878 bp, synthetic construct
  misc_feature 1..1878: note = Description of Artificial Sequence: Synthetic coding sequence
  source 1..1878: mol_type = other DNA
atggccggcgacagactgcccagaaaggtgatggacgccaagaagctggccagcctgctgagaggcggccccggcggccccctggtgatcgacagcagaagcttcgtggagtacaacagctggcacgtgctgagcagcgtgaacatctgctgcagcaagctggtgaagagaagactgcagcagggcaaggtgaccatcgccgagctgatccagcccgccgccagaagccaggtggaggccaccgagccccaggacgtggtggtgtacgaccagagcaccagagacgccagcgtgctggccgccgacagcttcctgagcatcctgctgagcaagctggacggctgcttcgacagcgtggccatcctgaccggcggcttcgccaccttcagcagctgcttccccggcctgtgcgagggcaagcccgccgccctgctgcccatgagcctgagccagccctgcctgcccgtgcccagcgtgggcctgaccagaatcctgccccacctgtacctgggcagccagaaggacgtgctgaacaaggacctgatgacccagaacggcatcagctacgtgctgaacgccagcaacagctgccccaagcccgacttcatctgcgagagcagattcatgagagtgcccatcaacgacaactactgcgagaagctgctgccctggctggacaagagcatcgagttcatcgacaaggccaagctgagcagctgccaggtgatcgtgcactgcctggccggcatcagcagaagcgccaccatcgccatcgcctacatcatgaagaccatgggcatgagcagcgacgacgcctacagattcgtgaaggacagaagacccagcatcagccccaacttcaacttcctgggccagctgctggagtacgagagaagcctgaagctgctggccgccctgcagggcgaccccggcacccccagcggcacccccgagcccccccccagccccgccgccggcgcccccctgcccagactgcccccccccaccagcgagagcgccgccaccggcaacgccgccgccagagagggcggcctgagcgccggcggcgagccccccgccccccccaccccccccgccaccagcgccctgcagcagggcctgagaggcctgcacctgagcagcgacagactgcaggacaccaacagactgaagagaagcttcagcctggacatcaagagcgcctacgcccccagcagaagacccgacggccccggcccccccgaccccggcgaggcccccaagctgtgcaagctggacagccccagcggcgccgccctgggcctgagcagccccagccccgacagccccgacgccgcccccgaggccagacccagacccagaagaagacccagaccccccgccggcagccccgccagaagccccgcccacagcctgggcctgaacttcggcgacgccgccagacagacccccagacacggcctgagcgccctgagcgcccccggcctgcccggccccggccagcccgccggccccggcgcctgggccccccccctggacagccccggcacccccagccccgacggcccctggtgcttcagccccgagggcgcccagggcgccggcggcgtgctgttcgcccccttcggcagagccggcgcccccggccccggcggcggcagcgacctgagaagaagagaggccgccagagccgagcccagagacgccagaaccggctggcccgaggagcccgcccccgagacccagttcaagagaagaagctgccagatggagttcgaggagggcatggtggagggcagagccagaggcgaggagctggccgccctgggcaagcaggccagcttcagcggcagcgtggaggtgatcgaggtgagctag

SEQ ID NO: 79744 - DNA, 1878 bp, synthetic construct; identical to SEQ ID NO: 79743
  misc_feature 1..1878: note = Description of Artificial Sequence: Synthetic coding sequence
  source 1..1878: mol_type = other DNA

SEQ ID NO: 79745 - DNA, 1626 bp, synthetic construct
  misc_feature 1..1626: note = Description of Artificial Sequence: Synthetic coding sequence
  source 1..1626: mol_type = other DNA
atgcacaccggcggcgagaccagcgcctgcaagcccagcagcgtgagactggcccccagcttcagcttccacgccgccggcctgcagatggccggccagatgccccacagccaccagtacagcgacagaagacagcccaacatcagcgaccagcaggtgagcgccctgagctacagcgaccagatccagcagcccctgaccaaccaggtgatgcccgacatcgtgatgctgcagagaagaatgccccagaccttcagagaccccgccaccgcccccctgagaaagctgagcgtggacctgatcaagacctacaagcacatcaacgaggtgtactacgccaagaagaagagaagacaccagcagggccagggcgacgacagcagccacaagaaggagagaaaggtgtacaacgacggctacgacgacgacaactacgactacatcgtgaagaacggcgagaagtggatggacagatacgagatcgacagcctgatcggcaagggcagcttcggccaggtggtgaaggcctacgacagagtggagcaggagtgggtggccatcaagatcatcaagaacaagaaggccttcctgaaccaggcccagatcgaggtgagactgctggagctgatgaacaagcacgacaccgagatgaagtactacatcgtgcacctgaagagacacttcatgttcagaaaccacctgtgcctggtgttcgagatgctgagctacaacctgtacgacctgctgagaaacaccaacttcagaggcgtgagcctgaacctgaccagaaagttcgcccagcagatgtgcaccgccctgctgttcctggccacccccgagctgagcatcatccactgcgacctgaagcccgagaacatcctgctgtgcaaccccaagagaagcgccatcaagatcgtggacttcggcagcagctgccagctgggccagagaatctaccagtacatccagagcagattctacagaagccccgaggtgctgctgggcatgccctacgacctggccatcgacatgtggagcctgggctgcatcctggtggagatgcacaccggcgagcccctgttcagcggcgccaacgaggtggaccagatgaacaagatcgtggaggtgctgggcatcccccccgcccacatcctggaccaggcccccaaggccagaaagttcttcgagaagctgcccgacggcacctggaacctgaagaagaccaaggacggcaagagagagtacaagccccccggcaccagaaagctgcacaacatcctgggcgtggagaccggcggccccggcggcagaagagccggcgagagcggccacaccgtggccgactacctgaagttcaaggacctgatcctgagaatgctggactacgaccccaagaccagaatccagccctactacgccctgcagcacagcttcttcaagaagaccgccgacgagggcaccaacaccagcaacagcgtgagcaccagccccgccatggagcagagccagagcagcggcaccaccagcagcaccagcagcagcagcgtggtggagcagcactggatgcccggcgccttcagaatgaccgtgagcttcaccctggaggtgcacgacgtgcccgtgtag

SEQ ID NO: 79746 - DNA, 1755 bp, synthetic construct
  misc_feature 1..1755: note = Description of Artificial Sequence: Synthetic coding sequence
  source 1..1755: mol_type = other DNA
atgcacaccggcggcgagaccagcgcctgcaagcccagcagcgtgagactggcccccagcttcagcttccacgccgccggcctgcagatggccggccagatgccccacagccaccagtacagcgacagaagacagcccaacatcagcgaccagcaggtgagcgccctgagctacagcgaccagatccagcagcccctgaccaaccaggtgatgcccgacatcgtgatgctgcagagaagaatgccccagaccttcagagaccccgccaccgcccccctgagaaagctgagcgtggacctgatcaagacctacaagcacatcaacgaggtgtactacgccaagaagaagagaagacaccagcagggccagggcgacgacagcagccacaagaaggagagaaaggtgtacaacgacggctacgacgacgacaactacgactacatcgtgaagaacggcgagaagtggatggacagatacgagatcgacagcctgatcggcaagggcagcttcggccaggtggtgaaggcctacgacagagtggagcaggagtgggtggccatcaagatcatcaagaacaagaaggccttcctgaaccaggcccagatcgaggtgagactgctggagctgatgaacaagcacgacaccgagatgaagtactacatcgtgcacctgaagagacacttcatgttcagaaaccacctgtgcctggtgttcgagatgctgagctacaacctgtacgacctgctgagaaacaccaacttcagaggcgtgagcctgaacctgaccagaaagttcgcccagcagatgtgcaccgccctgctgttcctggccacccccgagctgagcatcatccactgcgacctgaagcccgagaacatcctgctgtgcaaccccaagagaagcgccatcaagatcgtggacttcggcagcagctgccagctgggccagagaatctaccagtacatccagagcagattctacagaagccccgaggtgctgctgggcatgccctacgacctggccatcgacatgtggagcctgggctgcatcctggtggagatgcacaccggcgagcccctgttcagcggcgccaacgaggtggaccagatgaacaagatcgtggaggtgctgggcatcccccccgcccacatcctggaccaggcccccaaggccagaaagttcttcgagaagctgcccgacggcacctggaacctgaagaagaccaaggacggcaagagagagtacaagccccccggcaccagaaagctgcacaacatcctgggcgtggagaccggcggccccggcggcagaagagccggcgagagcggccacaccgtggccgactacctgaagttcaaggacctgatcctgagaatgctggactacgaccccaagaccagaatccagccctactacgccctgcagcacagcttcttcaagaagaccgccgacgagggcaccaacaccagcaacagcgtgagcaccagccccgccatggagcagagccagagcagcggcaccaccagcagcaccagcagcagcagcggcggcagcagcggcaccagcaacagcggcagagccagaagcgaccccacccaccagcacagacacagcggcggccacttcaccgccgccgtgcaggccatggactgcgagacccacagcccccaggtgagcagccacgtggtgcacctgctggtgagccccgccatcctgagatggagcagcaccggctgccaggtgcccctggagtag

SEQ ID NO: 79747 - DNA, 2265 bp, synthetic construct
  misc_feature 1..2265: note = Description of Artificial Sequence: Synthetic coding sequence
  source 1..2265: mol_type = other DNA
atgcacaccggcggcgagaccagcgcctgcaagcccagcagcgtgagactggcccccagcttcagcttccacgccgccggcctgcagatggccggccagatgccccacagccaccagtacagcgacagaagacagcccaacatcagcgaccagcaggtgagcgccctgagctacagcgaccagatccagcagcccctgaccaaccagagaagaatgccccagaccttcagagaccccgccaccgcccccctgagaaagctgagcgtggacctgatcaagacctacaagcacatcaacgaggtgtactacgccaagaagaagagaagacaccagcagggccagggcgacgacagcagccacaagaaggagagaaaggtgtacaacgacggctacgacgacgacaactacgactacatcgtgaagaacggcgagaagtggatggacagatacgagatcgacagcctgatcggcaagggcagcttcggccaggtggtgaaggcctacgacagagtggagcaggagtgggtggccatcaagatcatcaagaacaagaaggccttcctgaaccaggcccagatcgaggtgagactgctggagctgatgaacaagcacgacaccgagatgaagtactacatcgtgcacctgaagagacacttcatgttcagaaaccacctgtgcctggtgttcgagatgctgagctacaacctgtacgacctgctgagaaacaccaacttcagaggcgtgagcctgaacctgaccagaaagttcgcccagcagatgtgcaccgccctgctgttcctggccacccccgagctgagcatcatccactgcgacctgaagcccgagaacatcctgctgtgcaaccccaagagaagcgccatcaagatcgtggacttcggcagcagctgccagctgggccagagaatctaccagtacatccagagcagattctacagaagccccgaggtgctgctgggcatgccctacgacctggccatcgacatgtggagcctgggctgcatcctggtggagatgcacaccggcgagcccctgttcagcggcgccaacgaggtggaccagatgaacaagatcgtggaggtgctgggcatcccccccgcccacatcctggaccaggcccccaaggccagaaagttcttcgagaagctgcccgacggcacctggaacctgaagaagaccaaggacggcaagagagagtacaagccccccggcaccagaaagctgcacaacatcctgggcgtggagaccggcggccccggcggcagaagagccggcgagagcggccacaccgtggccgactacctgaagttcaaggacctgatcctgagaatgctggactacgaccccaagaccagaatccagccctactacgccctgcagcacagcttcttcaagaagaccgccgacgagggcaccaacaccagcaacagcgtgagcaccagccccgccatggagcagagccagagcagcggcaccaccagcagcaccagcagcagcagcggcggcagcagcggcaccagcaacagcggcagagccagaagcgaccccacccaccagcacagacacagcggcggccacttcaccgccgccgtgcaggccatggactgcgagacccacagcccccaggtgagacagcagttccccgcccccctgggctggagcggcaccgaggcccccacccaggtgaccgtggagacccaccccgtgcaggagaccaccttccacgtggccccccagcagaacgccctgcaccaccaccacggcaacagcagccaccaccaccaccaccaccaccaccaccaccaccaccacggccagcaggccctgggcaacagaaccagacccagagtgtacaacagccccaccaacagcagcagcacccaggacagcatggaggtgggccacagccaccacagcatgaccagcctgagcagcagcaccaccagcagcagcaccagcagcagcagcaccggcaaccagggcaaccaggcctaccagaacagacccgtggccgccaacaccctggacttcggccagaacggcgccatggacgtgaacctgaccgtgtacagcaaccccagacaggagaccggcatcgccggccaccccacctaccagttcagcgccaacaccggccccgcccactacatgaccgagggccacctgaccatgagacagggcgccgacagagaggagagccccatgaccggcgtgtgcgtgcagcagagccccgtggccagcagctag

SEQ ID NO: 79748 - DNA, 1590 bp, synthetic construct
  misc_feature 1..1590: note = Description of Artificial Sequence: Synthetic coding sequence
  source 1..1590: mol_type = other DNA
atgcacaccggcggcgagaccagcgcctgcaagcccagcagcgtgagactggcccccagcttcagcttccacgccgccggcctgcagatggccggccagatgccccacagccaccagtacagcgacagaagacagcccaacatcagcgaccagcaggtgagcgccctgagctacagcgaccagatccagcagcccctgaccaaccaggtgatgcccgacatcgtgatgctgcagagaagaatgccccagaccttcagagaccccgccaccgcccccctgagaaagctgagcgtggacctgatcaagacctacaagcacatcaacgaggtgtactacgccaagaagaagagaagacaccagcagggccagggcgacgacagcagccacaagaaggagagaaaggtgtacaacgacggctacgacgacgacaactacgactacatcgtgaagaacggcgagaagtggatggacagatacgagatcgacagcctgatcggcaagggcagcttcggccaggtggtgaaggcctacgacagagtggagcaggagtgggtggccatcaagatcatcaagaacaagaaggccttcctgaaccaggcccagatcgaggtgagactgctggagctgatgaacaagcacgacaccgagatgaagtactacatcgtgcacctgaagagacacttcatgttcagaaaccacctgtgcctggtgttcgagatgctgagctacaacctgtacgacctgctgagaaacaccaacttcagaggcgtgagcctgaacctgaccagaaagttcgcccagcagatgtgcaccgccctgctgttcctggccacccccgagctgagcatcatccactgcgacctgaagcccgagaacatcctgctgtgcaaccccaagagaagcgccatcaagatcgtggacttcggcagcagctgccagctgggccagagaatctaccagtacatccagagcagattctacagaagccccgaggtgctgctgggcatgccctacgacctggccatcgacatgtggagcctgggctgcatcctggtggagatgcacaccggcgagcccctgttcagcggcgccaacgaggtggaccagatgaacaagatcgtggaggtgctgggcatcccccccgcccacatcctggaccaggcccccaaggccagaaagttcttcgagaagctgcccgacggcacctggaacctgaagaagaccaaggacggcaagagagagtacaagccccccggcaccagaaagctgcacaacatcctgggcgtggagaccggcggccccggcggcagaagagccggcgagagcggccacaccgtggccgactacctgaagttcaaggacctgatcctgagaatgctggactacgaccccaagaccagaatccagccctactacgccctgcagcacagcttcttcaagaagaccgccgacgagggcaccaacaccagcaacagcgtgagcaccagccccgccatggagcagagccagagcagcggcaccaccagcagcaccagcagcagcagcggcgccagcgccatcagctgcagcagctggctggtgagacactag

SEQ ID NO: 79749 - DNA, 2292 bp, synthetic construct
  misc_feature 1..2292: note = Description of Artificial Sequence: Synthetic coding sequence
  source 1..2292: mol_type = other DNA
atgcacaccggcggcgagaccagcgcctgcaagcccagcagcgtgagactggcccccagcttcagcttccacgccgccggcctgcagatggccggccagatgccccacagccaccagtacagcgacagaagacagcccaacatcagcgaccagcaggtgagcgccctgagctacagcgaccagatccagcagcccctgaccaaccaggtgatgcccgacatcgtgatgctgcagagaagaatgccccagaccttcagagaccccgccaccgcccccctgagaaagctgagcgtggacctgatcaagacctacaagcacatcaacgaggtgtactacgccaagaagaagagaagacaccagcagggccagggcgacgacagcagccacaagaaggagagaaaggtgtacaacgacggctacgacgacgacaactacgactacatcgtgaagaacggcgagaagtggatggacagatacgagatcgacagcctgatcggcaagggcagcttcggccaggtggtgaaggcctacgacagagtggagcaggagtgggtggccatcaagatcatcaagaacaagaaggccttcctgaaccaggcccagatcgaggtgagactgctggagctgatgaacaagcacgacaccgagatgaagtactacatcgtgcacctgaagagacacttcatgttcagaaaccacctgtgcctggtgttcgagatgctgagctacaacctgtacgacctgctgagaaacaccaacttcagaggcgtgagcctgaacctgaccagaaagttcgcccagcagatgtgcaccgccctgctgttcctggccacccccgagctgagcatcatccactgcgacctgaagcccgagaacatcctgctgtgcaaccccaagagaagcgccatcaagatcgtggacttcggcagcagctgccagctgggccagagaatctaccagtacatccagagcagattctacagaagccccgaggtgctgctgggcatgccctacgacctggccatcgacatgtggagcctgggctgcatcctggtggagatgcacaccggcgagcccctgttcagcggcgccaacgaggtggaccagatgaacaagatcgtggaggtgctgggcatcccccccgcccacatcctggaccaggcccccaaggccagaaagttcttcgagaagctgcccgacggcacctggaacctgaagaagaccaaggacggcaagagagagtacaagccccccggcaccagaaagctgcacaacatcctgggcgtggagaccggcggccccggcggcagaagagccggcgagagcggccacaccgtggccgactacctgaagttcaaggacctgatcctgagaatgctggactacgaccccaagaccagaatccagccctactacgccctgcagcacagcttcttcaagaagaccgccgacgagggcaccaacaccagcaacagcgtgagcaccagccccgccatggagcagagccagagcagcggcaccaccagcagcaccagcagcagcagcggcggcagcagcggcaccagcaacagcggcagagccagaagcgaccccacccaccagcacagacacagcggcggccacttcaccgccgccgtgcaggccatggactgcgagacccacagcccccaggtgagacagcagttccccgcccccctgggctggagcggcaccgaggcccccacccaggtgaccgtggagacccaccccgtgcaggagaccaccttccacgtggccccccagcagaacgccctgcaccaccaccacggcaacagcagccaccaccaccaccaccaccaccaccaccaccaccaccacggccagcaggccctgggcaacagaaccagacccagagtgtacaacagccccaccaacagcagcagcacccaggacagcatggaggtgggccacagccaccacagcatgaccagcctgagcagcagcaccaccagcagcagcaccagcagcagcagcaccggcaaccagggcaaccaggcctaccagaacagacccgtggccgccaacaccctggacttcggccagaacggcgccatggacgtgaacctgaccgtgtacagcaaccccagacaggagaccggcatcgccggccaccccacctaccagttcagcgccaacaccggccccgcccactacatgaccgagggccacctgaccatgagacagggcgccgacagagaggagagccccatgaccggcgtgtgcgtgcagcagagccccgtggccagcagctag

SEQ ID NO: 79750 - DNA, 396 bp, synthetic construct
  misc_feature 1..396: note = Description of Artificial Sequence: Synthetic coding sequence
  source 1..396: mol_type = other DNA
atgcacaccggcggcgagaccagcgcctgcaagcccagcagcgtgagactggcccccagcttcagcttccacgccgccggcctgcagatggccggccagatgccccacagccaccagtacagcgacagaagacagcccaacatcagcgaccagcaggtgagcgccctgagctacagcgaccagatccagcagcccctgaccaaccaggtgatgcccgacatcgtgatgctgcagagaagaatgccccagaccttcagagaccccgccaccgcccccctgagaaagctgagcgtggacctgatcaagacctacaagcacatcaacgaggtgtactacgccaagaagaagagaagacaccagcagggccagggcgacgacagcagccacaagaagtag

SEQ ID NO: 79751 - DNA, 1755 bp, synthetic construct; identical to SEQ ID NO: 79746
  misc_feature 1..1755: note = Description of Artificial Sequence: Synthetic coding sequence
  source 1..1755: mol_type = other DNA

SEQ ID NO: 79752 - DNA, 141 bp, synthetic construct
  misc_feature 1..141: note = Description of Artificial Sequence: Synthetic coding sequence
  source 1..141: mol_type = other DNA
atgcacaccggcggcgagaccagcgcctgcaagcccagcagcgtgagactggcccccagcttcagcttccacgccgccggcctgcagatggccggccagatgccccacagccaccagtacagcgacagaagacagccctag

SEQ ID NO: 79753 - DNA, 1608 bp, synthetic construct
  misc_feature 1..1608: note = Description of Artificial Sequence: Synthetic coding sequence
  source 1..1608: mol_type = other DNA
atgttcagaaaccacctgtgcctggtgttcgagatgctgagctacaacctgtacgacctgctgagaaacaccaacttcagaggcgtgagcctgaacctgaccagaaagttcgcccagcagatgtgcaccgccctgctgttcctggccacccccgagctgagcatcatccactgcgacctgaagcccgagaacatcctgctgtgcaaccccaagagaagcgccatcaagatcgtggacttcggcagcagctgccagctgggccagagaatctaccagtacatccagagcagattctacagaagccccgaggtgctgctgggcatgccctacgacctggccatcgacatgtggagcctgggctgcatcctggtggagatgcacaccggcgagcccctgttcagcggcgccaacgaggtggaccagatgaacaagatcgtggaggtgctgggcatcccccccgcccacatcctggaccaggcccccaaggccagaaagttcttcgagaagctgcccgacggcacctggaacctgaagaagaccaaggacggcaagagagagtacaagccccccggcaccagaaagctgcacaacatcctgggcgtggagaccggcggccccggcggcagaagagccggcgagagcggccacaccgtggccgactacctgaagttcaaggacctgatcctgagaatgctggactacgaccccaagaccagaatccagccctactacgccctgcagcacagcttcttcaagaagaccgccgacgagggcaccaacaccagcaacagcgtgagcaccagccccgccatggagcagagccagagcagcggcaccaccagcagcaccagcagcagcagcggcggcagcagcggcaccagcaacagcggcagagccagaagcgaccccacccaccagcacagacacagcggcggccacttcaccgccgccgtgcaggccatggactgcgagacccacagcccccaggtgagacagcagttccccgcccccctgggctggagcggcaccgaggcccccacccaggtgaccgtggagacccaccccgtgcaggagaccaccttccacgtggccccccagcagaacgccctgcaccaccaccacggcaacagcagccaccaccaccaccaccaccaccaccaccaccaccaccacggccagcaggccctgggcaacagaaccagacccagagtgtacaacagccccaccaacagcagcagcacccaggacagcatggaggtgggccacagccaccacagcatgaccagcctgagcagcagcaccaccagcagcagcaccagcagcagcagcaccggcaaccagggcaaccaggcctaccagaacagacccgtggccgccaacaccctggacttcggccagaacggcgccatggacgtgaacctgaccgtgtacagcaaccccagacaggagaccggcatcgccggccaccccacctaccagttcagcgccaacaccggccccgcccactacatgaccgagggccacctgaccatgagacagggcgccgacagagaggagagccccatgaccggcgtgtgcgtgcagcagagccccgtggccagcagctag

SEQ ID NO: 79754 - DNA, 1890 bp, synthetic construct
  misc_feature 1..1890: note = Description of Artificial Sequence: Synthetic coding sequence
  source 1..1890: mol_type = other DNA
atggccgtgccccccggccacggccccttcagcggcttccccggcccccaggagcacacccaggtgctgcccgacgtgagactgctgcccagaagactgcccctggccttcagagacgccaccagcgcccccctgagaaagctgagcgtggacctgatcaagacctacaagcacatcaacgaggtgtactacgccaagaagaagagaagagcccagcaggcccccccccaggacagcagcaacaagaaggagaagaaggtgctgaaccacggctacgacgacgacaaccacgactacatcgtgagaagcggcgagagatggctggagagatacgagatcgacagcctgatcggcaagggcagcttcggccaggtggtgaaggcctacgaccaccagacccaggagctggtggccatcaagatcatcaagaacaagaaggccttcctgaaccaggcccagatcgagctgagactgctggagctgatgaaccagcacgacaccgagatgaagtactacatcgtgcacctgaagagacacttcatgttcagaaaccacctgtgcctggtgttcgagctgctgagctacaacctgtacgacctgctgagaaacacccacttcagaggcgtgagcctgaacctgaccagaaagctggcccagcagctgtgcaccgccctgctgttcctggccacccccgagctgagcatcatccactgcgacctgaagcccgagaacatcctgctgtgcaaccccaagagaagcgccatcaagatcgtggacttcggcagcagctgccagctgggccagagaatctaccagtacatccagagcagattctacagaagccccgaggtgctgctgggcaccccctacgacctggccatcgacatgtggagcctgggctgcatcctggtggagatgcacaccggcgagcccctgttcagcggcagcaacgaggtggaccagatgaacagaatcgtggaggtgctgggcatcccccccgccgccatgctggaccaggcccccaaggccagaaagtacttcgagagactgcccggcggcggctggaccctgagaagaaccaaggagctgagaaaggactaccagggccccggcaccagaagactgcaggaggtgctgggcgtgcagaccggcggccccggcggcagaagagccggcgagcccggccacagccccgccgactacctgagattccaggacctggtgctgagaatgctggagtacgagcccgccgccagaatcagccccctgggcgccctgcagcacggcttcttcagaagaaccgccgacgaggccaccaacaccggccccgccggcagcagcgccagcaccagccccgcccccctggacacctgccccagcagcagcaccgccagcagcatcagcagcagcggcggcagcagcggcagcagcagcgacaacagaacctacagatacagcaacagatactgcggcggccccggcccccccatcaccgactgcgagatgaacagcccccaggtgccccccagccagcccctgagaccctgggccggcggcgacgtgccccacaagacccaccaggcccccgccagcgccagcagcctgcccggcaccggcgcccagctgcccccccagcccagatacctgggcagaccccccagccccaccagcccccccccccccgagctgatggacgtgagcctggtgggcggccccgccgactgcagccccccccaccccgcccccgccccccagcaccccgccgccagcgccctgagaaccagaatgaccggcggcagaccccccctgcccccccccgacgaccccgccaccctgggcccccacctgggcctgagaggcgtgccccagagcaccgccgccagcagctag

SEQ ID NO: 79755 - DNA, 1806 bp, synthetic construct
  misc_feature 1..1806: note = Description of Artificial Sequence: Synthetic coding sequence
  source 1..1806: mol_type = other DNA
atggccgtgccccccggccacggccccttcagcggcttccccggcccccaggagcacacccaggtgctgcccgacgtgagactgctgcccagaagactgcccctggccttcagagacgccaccagcgcccccctgagaaagctgagcgtggacctgatcaagacctacaagcacatcaacgaggtgtactacgccaagaagaagagaagagcccagcaggcccccccccaggacagcagcaacaagaaggagaagaaggtgctgaaccacggctacgacgacgacaaccacgactacatcgtgagaagcggcgagagatggctggagagatacgagatcgacagcctgatcggcaagggcagcttcggccaggtggtgaaggcctacgaccaccagacccaggagctggtggccatcaagatcatcaagaacaagaaggccttcctgaaccaggcccagatcgagctgagactgctggagctgatgaaccagcacgacaccgagatgaagtactacatcgtgcacctgaagagacacttcatgttcagaaaccacctgtgcctggtgttcgagctgctgagctacaacctgtacgacctgctgagaaacacccacttcagaggcgtgagcctgaacctgaccagaaagctggcccagcagctgtgcaccgccctgctgttcctggccacccccgagctgagcatcatccactgcgacctgaagcccgagaacatcctgctgtgcaaccccaagagaagcgccatcaagatcgtggacttcggcagcagctgccagctgggccagagaatctaccagtacatccagagcagattctacagaagccccgaggtgctgctgggcaccccctacgacctggccatcgacatgtggagcctgggctgcatcctggtggagatgcacaccggcgagcccctgttcagcggcagcaacgaggtggaccagatgaacagaatcgtggaggtgctgggcatcccccccgccgccatgctggaccaggcccccaaggccagaaagtacttcgagagactgcccggcggcggctggaccctgagaagaaccaaggagctgagaaaggactaccagggccccggcaccagaagactgcaggaggacctggtgctgagaatgctggagtacgagcccgccgccagaatcagccccctgggcgccctgcagcacggcttcttcagaagaaccgccgacgaggccaccaacaccggccccgccggcagcagcgccagcaccagccccgcccccctggacacctgccccagcagcagcaccgccagcagcatcagcagcagcggcggcagcagcggcagcagcagcgacaacagaacctacagatacagcaacagatactgcggcggccccggcccccccatcaccgactgcgagatgaacagcccccaggtgccccccagccagcccctgagaccctgggccggcggcgacgtgccccacaagacccaccaggcccccgccagcgccagcagcctgcccggcaccggcgcccagctgcccccccagcccagatacctgggcagaccccccagccccaccagcccccccccccccgagctgatggacgtgagcctggtgggcggccccgccgactgcagccccccccaccccgcccccgccccccagcaccccgccgccagcgccctgagaaccagaatgaccggcggcagaccccccctgcccccccccgacgaccccgccaccctgggcccccacctgggcctgagaggcgtgccccagagcaccgccgccagcagctag

SEQ ID NO: 79756 - DNA, 1770 bp, synthetic construct
  misc_feature 1..1770: note = Description of Artificial Sequence: Synthetic coding sequence
  source 1..1770: mol_type = other DNA
atggccgtgccccccggccacggccccttcagcggcttccccggcccccaggagcacacccaggtgctgcccgacgtgagactgctgcccagaagactgcccctggccttcagagacgccaccagcgcccccctgagaaagctgagcgtggacctgatcaagacctacaagcacatcaacgaggtgtactacgccaagaagaagagaagagcccagcaggcccccccccaggacagcagcaacaagaaggagaagaaggtgctgaaccacggctacgacgacgacaaccacgactacatcgtgagaagcggcgagagatggctggagagatacgagatcgacagcctgatcggcaagggcagcttcggccaggtggtgaaggcctacgaccaccagacccaggagctggtggccatcaagatcatcaagaacaagaaggccttcctgaaccaggcccagatcgagctgagactgctggagctgatgaaccagcacgacaccgagatgaagtactacatcgtgcacctgaagagacacttcatgttcagaaaccacctgtgcctggtgttcgagctgctgagctacaacctgtacgacctgctgagaaacacccacttcagaggcgtgagcctgaacctgaccagaaagctggcccagcagctgtgcaccgccctgctgttcctggccacccccgagctgagcatcatccactgcgacctgaagcccgagaacatcctgctgtgcaaccccaagagaagcgccatcaagatcgtggacttcggcagcagctgccagctgggccagagaatctaccagtacatccagagcagattctacagaagccccgaggtgctgctgggcaccccctacgacctggccatcgacatgtggagcctgggctgcatcctggtggagatgcacaccggcgagcccctgttcagcggcagcaacgaggtggaccagatgaacagaatcgtggaggtgctgggcatcccccccgccgccatgctggaccaggcccccaaggccagaaagtacttcgagagactgcccggcggcggctggaccctgagaagaaccaaggagctgagaaaggacctggtgctgagaatgctggagtacgagcccgccgccagaatcagccccctgggcgccctgcagcacggcttcttcagaagaaccgccgacgaggccaccaacaccggccccgccggcagcagcgccagcaccagccccgcccccctggacacctgccccagcagcagcaccgccagcagcatcagcagcagcggcggcagcagcggcagcagcagcgacaacagaacctacagatacagcaacagatactgcggcggccccggcccccccatcaccgactgcgagatgaacagcccccaggtgccccccagccagcccctgagaccctgggccggcggcgacgtgccccacaagacccaccaggcccccgccagcgccagcagcctgcccggcaccggcgcccagctgcccccccagcccagatacctgggcagaccccccagccccaccagcccccccccccccgagctgatggacgtgagcctggtgggcggccccgccgactgcagccccccccaccccgcccccgccccccagcaccccgccgccagcgccctgagaaccagaatgaccggcggcagaccccccctgcccccccccgacgaccccgccaccctgggcccccacctgggcctgagaggcgtgccccagagcaccgccgccagcagctag

SEQ ID NO: 79757 - DNA, 285 bp, synthetic construct
  misc_feature 1..285: note = Description of Artificial Sequence: Synthetic coding sequence
  source 1..285: mol_type = other DNA
atgaacgaccacctgcacgtgggcagccacgcccacggccagatccaggtgcagcagctgttcgaggacaacagcaacaagagaaccgtgctgaccacccagcccaacggcctgaccaccgtgggcaagaccggcctgcccgtggtgcccgagagacagctggacagcatccacagaagacagggcagcagcaccagcctgaagagcatggagggcatgggcaaggtgaaggccacccccatgacccccgagcaggccatgaagcagtacatgcagaagctgtag

SEQ ID NO: 79758 - DNA, 1806 bp, synthetic construct
  misc_feature 1..1806: note = Description of Artificial Sequence: Synthetic coding sequence
  source 1..1806: mol_type = other DNA
atgctgaccagaaagcccagcgccgccgcccccgccgcctaccccaccggcagaggcggcgacagcgccgtgagacagctgcaggccagccccggcctgggcgccggcgccaccagaagcggcgtgggcaccggcccccccagccccatcgccctgccccccctgagagccagcaacgccgccgccgccgcccacaccatcggcggcagcaagcacaccatgaacgaccacctgcacgtgggcagccacgcccacggccagatccaggtgcagcagctgttcgaggacaacagcaacaagagaaccgtgctgaccacccagcccaacggcctgaccaccgtgggcaagaccggcctgcccgtggtgcccgagagacagctggacagcatccacagaagacagggcagcagcaccagcctgaagagcatggagggcatgggcaaggtgaaggccacccccatgacccccgagcaggccatgaagcagtacatgcagaagctgaccgccttcgagcaccacgagatcttcagctaccccgagatctacttcctgggcctgaacgccaagaagagacagggcatgaccggcggccccaacaacggcggctacgacgacgaccagggcagctacgtgcaggtgccccacgaccacgtggcctacagatacgaggtgctgaaggtgatcggcaagggcagcttcggccaggtggtgaaggcctacgaccacaaggtgcaccagcacgtggccctgaagatggtgagaaacgagaagagattccacagacaggccgccgaggagatcagaatcctggagcacctgagaaagcaggacaaggacaacaccatgaacgtgatccacatgctggagaacttcaccttcagaaaccacatctgcatgaccttcgagctgctgagcatgaacctgtacgagctgatcaagaagaacaagttccagggcttcagcctgcccctggtgagaaagttcgcccacagcatcctgcagtgcctggacgccctgcacaagaacagaatcatccactgcgacctgaagcccgagaacatcctgctgaagcagcagggcagaagcggcatcaaggtgatcgacttcggcagcagctgctacgagcaccagagagtgtacacctacatccagagcagattctacagagcccccgaggtgatcctgggcgccagatacggcatgcccatcgacatgtggagcctgggctgcatcctggccgagctgctgaccggctaccccctgctgcccggcgaggacgagggcgaccagctggcctgcatgatcgagctgctgggcatgcccagccagaagctgctggacgccagcaagagagccaagaacttcgtgagcagcaagggctaccccagatactgcaccgtgaccaccctgagcgacggcagcgtggtgctgaacggcggcagaagcagaagaggcaagctgagaggcccccccgagagcagagagtggggcaacgccctgaagggctgcgacgaccccctgttcctggacttcctgaagcagtgcctggagtgggaccccgccgtgagaatgacccccggccaggccctgagacacccctggctgagaagaagactgcccaagccccccaccggcgagaagaccagcgtgaagagaatcaccgagagcaccggcgccatcaccagcatcagcaagctgcccccccccagcagcagcgccagcaagctgagaaccaacctggcccagatgaccgacgccaacggcaacatccagcagagaaccgtgctgcccaagctggtgagctag

SEQ ID NO: 79759 - DNA, 1587 bp, synthetic construct
  misc_feature 1..1587: note = Description of Artificial Sequence: Synthetic coding sequence
  source 1..1587: mol_type = other DNA
atgaacgaccacctgcacgtgggcagccacgcccacggccagatccaggtgcagcagctgttcgaggacaacagcaacaagagaaccgtgctgaccacccagcccaacggcctgaccaccgtgggcaagaccggcctgcccgtggtgcccgagagacagctggacagcatccacagaagacagggcagcagcaccagcctgaagagcatggagggcatgggcaaggtgaaggccacccccatgacccccgagcaggccatgaagcagtacatgcagaagctgaccgccttcgagcaccacgagatcttcagctaccccgagatctacttcctgggcctgaacgccaagaagagacagggcatgaccggcggccccaacaacggcggctacgacgacgaccagggcagctacgtgcaggtgccccacgaccacgtggcctacagatacgaggtgctgaaggtgatcggcaagggcagcttcggccaggtggtgaaggcctacgaccacaaggtgcaccagcacgtggccctgaagatggtgagaaacgagaagagattccacagacaggccgccgaggagatcagaatcctggagcacctgagaaagcaggacaaggacaacaccatgaacgtgatccacatgctggagaacttcaccttcagaaaccacatctgcatgaccttcgagctgctgagcatgaacctgtacgagctgatcaagaagaacaagttccagggcttcagcctgcccctggtgagaaagttcgcccacagcatcctgcagtgcctggacgccctgcacaagaacagaatcatccactgcgacctgaagcccgagaacatcctgctgaagcagcagggcagaagcggcatcaaggtgatcgacttcggcagcagctgctacgagcaccagagagtgtacacctacatccagagcagattctacagagcccccgaggtgatcctgggcgccagatacggcatgcccatcgacatgtggagcctgggctgcatcctggccgagctgctgaccggctaccccctgctgcccggcgaggacgagggcgaccagctggcctgcatgatcgagctgctgggcatgcccagccagaagctgctggacgccagcaagagagccaagaacttcgtgagcagcaagggctaccccagatactgcaccgtgaccaccctgagcgacggcagcgtggtgctgaacggcggcagaagcagaagaggcaagctgagaggcccccccgagagcagagagtggggcaacgccctgaagggctgcgacgaccccctgttcctggacttcctgaagcagtgcctggagtgggaccccgccgtgagaatgacccccggccaggccctgagacacccctggctgagaagaagactgcccaagccccccaccggcgagaagaccagcgtgaagagaatcaccgagagcaccggcgccatcaccagcatcagcaagctgcccccccccagcagcagcgccagcaagctgagaaccaacctggcccagatgaccgacgccaacggcaacatccagcagagaaccgtgctgcccaagctggtgagctag

SEQ ID NO: 79760 - DNA, 471 bp, synthetic construct
  misc_feature 1..471: note = Description of Artificial Sequence: Synthetic coding sequence
  source 1..471: mol_type = other DNA
atgaacgaccacctgcacgtgggcagccacgcccacggccagatccaggtgcagcagctgttcgaggacaacagcaacaagagaaccgtgctgaccacccagcccaacggcctgaccaccgtgggcaagaccggcctgcccgtggtgcccgagagacagctggacagcatccacagaagacagggcagcagcaccagcctgaagagcatggagggcatgggcaaggtgaaggccacccccatgacccccgagcaggccatgaagcagtacatgcagaagctgaccgccttcgagcaccacgagatcttcagctaccccgagatctacttcctgggcctgaacgccaagaagagacagggcatgaccggcggccccaacaacggcggctacgacgacgaccagggcagctacgtgcaggtgccccacgaccacgtggcctacagatacgaggtgctgaaggtgatcggctag

SEQ ID NO: 79761 - DNA, 1707 bp, synthetic construct
  misc_feature 1..1707: note = Description of Artificial Sequence: Synthetic coding sequence
  source 1..1707: mol_type = other DNA
atgaagtggaaggagaagctgggcgacggcgtgtacgacaccttcatgatgatcgacgagaccaagtgccccccctgcagcaacgtgctgtgcaaccccagcgagccccccccccccagaagactgaacatgaccaccgagcagttcaccggcgaccacacccagcacttcctggacggcggcgagatgaaggtggagcagctgttccaggagttcggcaacagaaagagcaacaccatccagagcgacggcatcagcgacagcgagaagtgcagccccaccgtgagccagggcaagagcagcgactgcctgaacaccgtgaagagcaacagcagcagcaaggcccccaaggtggtgcccctgacccccgagcaggccctgaagcagtacaagcaccacctgaccgcctacgagaagctggagatcatcaactaccccgagatctacttcgtgggccccaacgccaagaagagacacggcgtgatcggcggccccaacaacggcggctacgacgacgccgacggcgcctacatccacgtgcccagagaccacctggcctacagatacgaggtgctgaagatcatcggcaagggcagcttcggccaggtggccagagtgtacgaccacaagctgagacagtacgtggccctgaagatggtgagaaacgagaagagattccacagacaggccgccgaggagatcagaatcctggagcacctgaagaagcaggacaagaccggcagcatgaacgtgatccacatgctggagagcttcaccttcagaaaccacgtgtgcatggccttcgagctgctgagcatcgacctgtacgagctgatcaagaagaacaagttccagggcttcagcgtgcagctggtgagaaagttcgcccagagcatcctgcagagcctggacgccctgcacaagaacaagatcatccactgcgacctgaagcccgagaacatcctgctgaagcaccacggcagaagcagcaccaaggtgatcgacttcggcagcagctgcttcgagtaccagaagctgtacacctacatccagagcagattctacagagcccccgagatcatcctgggcagcagatacagcacccccatcgacatctggagcttcggctgcatcctggccgagctgctgaccggccagcccctgttccccggcgaggacgagggcgaccagctggcctgcatgatggagctgctgggcatgcccccccccaagctgctggagcagagcaagagagccaagtacttcatcaacagcaagggcatccccagatactgcagcgtgaccacccaggccgacggcagagtggtgctggtgggcggcagaagcagaagaggcaagaagagaggcccccccggcagcaaggactggggcaccgccctgaagggctgcgacgactacctgttcatcgagttcctgaagagatgcctgcactgggaccccagcgccagactgacccccgcccaggccctgagacacccctggatcagcaagagcgtgcccagacccctgaccaccatcgacaaggtgagcggcaagagagtggtgaaccccgccagcgccttccagggcctgggcagcaagctgccccccgtggtgggcatcgccaacaagctgaaggccaacctgatgagcgagaccaacggcagcatccccctgtgcagcgtgctgcccaagctgatcagctag

SEQ ID NO: 79762 - DNA, 1707 bp, synthetic construct; identical to SEQ ID NO: 79761
  misc_feature 1..1707: note = Description of Artificial Sequence: Synthetic coding sequence
  source 1..1707: mol_type = other DNA

SEQ ID NO: 79763 - DNA, 1767 bp, synthetic construct
  misc_feature 1..1767: note = Description of Artificial Sequence: Synthetic coding sequence
  source 1..1767: mol_type = other DNA
atgggcggcaccgccagaggccccggcagaaaggacgccggcccccccggcgccggcctgcccccccagcagagaagactgggcgacggcgtgtacgacaccttcatgatgatcgacgagaccaagtgccccccctgcagcaacgtgctgtgcaaccccagcgagccccccccccccagaagactgaacatgaccaccgagcagttcaccggcgaccacacccagcacttcctggacggcggcgagatgaaggtggagcagctgttccaggagttcggcaacagaaagagcaacaccatccagagcgacggcatcagcgacagcgagaagtgcagccccaccgtgagccagggcaagagcagcgactgcctgaacaccgtgaagagcaacagcagcagcaaggcccccaaggtggtgcccctgacccccgagcaggccctgaagcagtacaagcaccacctgaccgcctacgagaagctggagatcatcaactaccccgagatctacttcgtgggccccaacgccaagaagagacacggcgtgatcggcggccccaacaacggcggctacgacgacgccgacggcgcctacatccacgtgcccagagaccacctggcctacagatacgaggtgctgaagatcatcggcaagggcagcttcggccaggtggccagagtgtacgaccacaagctgagacagtacgtggccctgaagatggtgagaaacgagaagagattccacagacaggccgccgaggagatcagaatcctggagcacctgaagaagcaggacaagaccggcagcatgaacgtgatccacatgctggagagcttcaccttcagaaaccacgtgtgcatggccttcgagctgctgagcatcgacctgtacgagctgatcaagaagaacaagttccagggcttcagcgtgcagctggtgagaaagttcgcccagagcatcctgcagagcctggacgccctgcacaagaacaagatcatccactgcgacctgaagcccgagaacatcctgctgaagcaccacggcagaagcagcaccaaggtgatcgacttcggcagcagctgcttcgagtaccagaagctgtacacctacatccagagcagattctacagagcccccgagatcatcctgggcagcagatacagcacccccatcgacatctggagcttcggctgcatcctggccgagctgctgaccggccagcccctgttccccggcgaggacgagggcgaccagctggcctgcatgatggagctgctgggcatgcccccccccaagctgctggagcagagcaagagagccaagtacttcatcaacagcaagggcatccccagatactgcagcgtgaccacccaggccgacggcagagtggtgctggtgggcggcagaagcagaagaggcaagaagagaggcccccccggcagcaaggactggggcaccgccctgaagggctgcgacgactacctgttcatcgagttcctgaagagatgcctgcactgggaccccagcgccagactgacccccgcccaggccctgagacacccctggatcagcaagagcgtgcccagacccctgaccaccatcgacaaggtgagcggcaagagagtggtgaaccccgccagcgccttccagggcctgggcagcaagctgccccccgtggtgggcatcgccaacaagctgaaggccaacctgatgagcgagaccaacggcagcatccccctgtgcagcgtgctgcccaagctgatcagctag

SEQ ID NO: 79764 - DNA, 732 bp, synthetic construct
  misc_feature 1..732: note = Description of Artificial Sequence: Synthetic coding sequence
  source 1..732: mol_type = other DNA
atgaagtggaaggagaagctgggcgacggcgtgtacgacaccttcatgatgatcgacgagaccaagtgccccccctgcagcaacgtgctgtgcaaccccagcgagccccccccccccagaagactgaacatgaccaccgagcagttcaccggcgaccacacccagcacttcctggacggcggcgagatgaaggtggagcagctgttccaggagttcggcaacagaaagagcaacaccatccagagcgacggcatcagcgacagcgagaagtgcagccccaccgtgagccagggcaagagcagcgactgcctgaacaccgtgaagagcaacagcagcagcaaggcccccaaggtggtgcccctgacccccgagcaggccctgaagcagtacaagcaccacctgaccgcctacgagaagctggagatcatcaactaccccgagatctacttcgtgggccccaacgccaagaagagacacggcgtgatcggcggccccaacaacggcggctacgacgacgccgacggcgcctacatccacgtgcccagagaccacctggcctacagatacgaggtgctgaagatcatcggcaagggcagcttcggccaggtggccagagtgtacgaccacaagctgagacagtacgtggccctgaagatggtgagaaacgagaagagattccacagacaggccgccgaggagatcagaatcctggagcacctgaagaagcagtag

SEQ ID NO: 79765 - DNA, 1563 bp, synthetic construct
  misc_feature 1..1563: note = Description of Artificial Sequence: Synthetic coding sequence
  source 1..1563: mol_type = other DNA
atgcccgccagcgagctgaaggccagcgagatccccttccaccccagcatcaagacccaggaccccaaggccgaggagaagagccccaagaagcagaaggtgaccctgaccgccgccgaggccctgaagctgttcaagaaccagctgagcccctacgagcagagcgagatcctgggctacgccgagctgtggttcctgggcctggaggccaagaagctggacaccgcccccgagaagttcagcaagaccagcttcgacgacgagcacggcttctacctgaaggtgctgcacgaccacatcgcctacagatacgaggtgctggagaccatcggcaagggcagcttcggccaggtggccaagtgcctggaccacaagaacaacgagctggtggccctgaagatcatcagaaacaagaagagattccaccagcaggccctgatggagctgaagatcctggaggccctgagaaagaaggacaaggacaacacctacaacgtggtgcacatgaaggacttcttctacttcagaaaccacttctgcatcaccttcgagctgctgggcatcaacctgtacgagctgatgaagaacaacaacttccagggcttcagcctgagcatcgtgagaagattcaccctgagcgtgctgaagtgcctgcagatgctgagcgtggagaagatcatccactgcgacctgaagcccgagaacatcgtgctgtaccagaagggccaggccagcgtgaaggtgatcgacttcggcagcagctgctacgagcaccagaaggtgtacacctacatccagagcagattctacagaagccccgaggtgatcctgggccacccctacgacgtggccatcgacatgtggagcctgggctgcatcaccgccgagctgtacaccggctaccccctgttccccggcgagaacgaggtggagcagctggcctgcatcatggaggtgctgggcctgccccccgccggcttcatccagaccgccagcagaagacagaccttcttcgacagcaagggcttccccaagaacatcaccaacaacagaggcaagaagagataccccgacagcaaggacctgaccatggtgctgaagacctacgacaccagcttcctggacttcctgagaagatgcctggtgtgggagcccagcctgagaatgacccccgaccaggccctgaagcacgcctggatccaccagagcagaaacctgaagccccagcccagaccccagaccctgagaaagagcaacagcttcttccccagcgagaccagaaaggacaaggtgcagggctgccaccacagcagcagaaaggccgacgagatcaccaaggagaccaccgagaagaccaaggacagccccaccaagcacgtgcagcacagcggcgaccagcaggactgcctgcagcacggcgccgacaccgtgcagctgccccagctggtggacgcccccaagaagagcgaggccgccgtgggcgccgaggtgagcatgaccagccccggccagagcaagaacttcagcctgaagaacaccaacgtgctgccccccatcgtgtag

SEQ ID NO: 79766 - DNA, 1563 bp, synthetic construct; identical to SEQ ID NO: 79765
  misc_feature 1..1563: note = Description of Artificial Sequence: Synthetic coding sequence
  source 1..1563: mol_type = other DNA

SEQ ID NO: 79767 - DNA, 1560 bp, synthetic construct
  misc_feature 1..1560: note = Description of Artificial Sequence: Synthetic coding sequence
  source 1..1560: mol_type = other DNA
atgcccgccagcgagctgaaggccagcgagatccccttccaccccagcatcaagacccaggaccccaaggccgaggagaagagccccaagaagcagaaggtgaccctgaccgccgccgaggccctgaagctgttcaagaaccagctgagcccctacgagcagagcgagatcctgggctacgccgagctgtggttcctgggcctggaggccaagaagctggacaccgcccccgagaagttcagcaagaccagcttcgacgacgagcacggcttctacctgaaggtgctgcacgaccacatcgcctacagatacgaggtgctggagaccatcggcaagggcagcttcggccaggtggccaagtgcctggaccacaagaacaacgagctggtggccctgaagatcatcagaaacaagaagagattccaccagcaggccctgatggagctgaagatcctggaggccctgagaaagaaggacaaggacaacacctacaacgtggtgcacatgaaggacttcttctacttcagaaaccacttctgcatcaccttcgagctgctgggcatcaacctgtacgagctgatgaagaacaacaacttccagggcttcagcctgagcatcgtgagaagattcaccctgagcgtgctgaagtgcctgcagatgctgagcgtggagaagatcatccactgcgacctgaagcccgagaacatcgtgctgtaccagaagggccaggccagcgtgaaggtgatcgacttcggcagcagctgctacgagcaccagaaggtgtacacctacatccagagcagattctacagaagccccgaggtgatcctgggccacccctacgacgtggccatcgacatgtggagcctgggctgcatcaccgccgagctgtacaccggctaccccctgttccccggcgagaacgaggtggagcagctggcctgcatcatggaggtgctgggcctgccccccgccggcttcatccagaccgccagcagaagacagaccttcttcgacagcaagggcttccccaagaacatcaccaacaacagaggcaagaagagataccccgacagcaaggacctgaccatggtgctgaagacctacgacaccagcttcctggacttcctgagaagatgcctggtgtgggagcccagcctgagaatgacccccgaccaggccctgaagcacgcctggatccaccagagcagaaacctgaagccccagcccagaccccagaccctgagaaagagcaacagcttcttccccagcgagaccagaaaggacaaggtgcagggctgccaccacagcagcagaaaggacgagatcaccaaggagaccaccgagaagaccaaggacagccccaccaagcacgtgcagcacagcggcgaccagcaggactgcctgcagcacggcgccgacaccgtgcagctgccccagctggtggacgcccccaagaagagcgaggccgccgtgggcgccgaggtgagcatgaccagccccggccagagcaagaacttcagcctgaagaacaccaacgtgctgccccccatcgtgtag

SEQ ID NO: 79768 - DNA, 474 bp, synthetic construct
  misc_feature 1..474: note = Description of Artificial Sequence: Synthetic coding sequence
  source 1..474: mol_type = other DNA
atggtgctgaagacctacgacaccagcttcctggacttcctgagaagatgcctggtgtgggagcccagcctgagaatgacccccgaccaggccctgaagcacgcctggatccaccagagcagaaacctgaagccccagcccagaccccagaccctgagaaagagcaacagcttcttccccagcgagaccagaaaggacaaggtgcagggctgccaccacagcagcagaaaggccgacgagatcaccaaggagaccaccgagaagaccaaggacagccccaccaagcacgtgcagcacagcggcgaccagcaggactgcctgcagcacggcgccgacaccgtgcagctgccccagctggtggacgcccccaagaagagcgaggccgccgtgggcgccgaggtgagcatgaccagccccggccagagcaagaacttcagcctgaagaacaccaacgtgctgccccccatcgtgtag

SEQ ID NO: 79769 - DNA, 1011 bp, synthetic construct
  misc_feature 1..1011: note = Description of Artificial Sequence: Synthetic coding sequence
  source 1..1011: mol_type = other DNA
atgggcaactgcctgcacagagccgagctgagccccagcaccgagaacagcagccagctggacttcgaggacgtgtggaacagcagctacggcgtgaacgacagcttccccgacggcgactacggcgccaacctggaggccgccgccccctgccacagctgcaacctgctggacgacagcgccctgcccttcttcatcctgaccagcgtgctgggcatcctggccagcagcaccgtgctgttcatgctgttcagacccctgttcagatggcagctgtgccccggctggcccgtgctggcccagctggccgtgggcagcgccctgttcagcatcgtggtgcccgtgctggcccccggcctgggcagcaccagaagcagcgccctgtgcagcctgggctactgcgtgtggtacggcagcgccttcgcccaggccctgctgctgggctgccacgccagcctgggccacagactgggcgccggccaggtgcccggcctgaccctgggcctgaccgtgggcatctggggcgtggccgccctgctgaccctgcccgtgaccctggccagcggcgccagcggcggcctgtgcaccctgatctacagcaccgagctgaaggccctgcaggccacccacaccgtggcctgcctggccatcttcgtgctgctgcccctgggcctgttcggcgccaagggcctgaagaaggccctgggcatgggccccggcccctggatgaacatcctgtgggcctggttcatcttctggtggccccacggcgtggtgctgggcctggacttcctggtgagaagcaagctgctgctgctgagcacctgcctggcccagcaggccctggacctgctgctgaacctggccgaggccctggccatcctgcactgcgtggccacccccctgctgctggccctgttctgccaccaggccaccagaaccctgctgcccagcctgcccctgcccgagggctggagcagccacctggacaccctgggcagcaagagctag

SEQ ID NO: 79770 - DNA, 1017 bp, synthetic construct
  misc_feature 1..1017: note = Description of Artificial Sequence: Synthetic coding sequence
  source 1..1017: mol_type = other DNA
atggccagcagcggctacgtgctgcaggccgagctgagccccagcaccgagaacagcagccagctggacttcgaggacgtgtggaacagcagctacggcgtgaacgacagcttccccgacggcgactacggcgccaacctggaggccgccgccccctgccacagctgcaacctgctggacgacagcgccctgcccttcttcatcctgaccagcgtgctgggcatcctggccagcagcaccgtgctgttcatgctgttcagacccctgttcagatggcagctgtgccccggctggcccgtgctggcccagctggccgtgggcagcgccctgttcagcatcgtggtgcccgtgctggcccccggcctgggcagcaccagaagcagcgccctgtgcagcctgggctactgcgtgtggtacggcagcgccttcgcccaggccctgctgctgggctgccacgccagcctgggccacagactgggcgccggccaggtgcccggcctgaccctgggcctgaccgtgggcatctggggcgtggccgccctgctgaccctgcccgtgaccctggccagcggcgccagcggcggcctgtgcaccctgatctacagcaccgagctgaaggccctgcaggccacccacaccgtggcctgcctggccatcttcgtgctgctgcccctgggcctgttcggcgccaagggcctgaagaaggccctgggcatgggccccggcccctggatgaacatcctgtgggcctggttcatcttctggtggccccacggcgtggtgctgggcctggacttcctggtgagaagcaagctgctgctgctgagcacctgcctggcccagcaggccctggacctgctgctgaacctggccgaggccctggccatcctgcactgcgtggccacccccctgctgctggccctgttctgccaccaggccaccagaaccctgctgcccagcctgcccctgcccgagggctggagcagccacctggacaccctgggcagcaagagctag

SEQ ID NO: 79771 - DNA, 1011 bp, synthetic construct; identical to SEQ ID NO: 79769
  misc_feature 1..1011: note = Description of Artificial Sequence: Synthetic coding sequence
  source 1..1011: mol_type = other DNA

SEQ ID NO: 79772 - DNA, 468 bp, synthetic construct
  misc_feature 1..468: note = Description of Artificial Sequence: Synthetic coding sequence
  source 1..468: mol_type = other DNA
atggccagcagcggctacgtgctgcaggccgagctgagccccagcaccgagaacagcagccagctggacttcgaggacgtgtggaacagcagctacggcgtgaacgacagcttccccgacggcgactacggcgccaacctggaggccgccgccccctgccacagctgcaacctgctggacgacagcgccctgcccttcttcatcctgaccagcgtgctgggcatcctggccagcagcaccgtgctgttcatgctgttcagacccctgttcagatggcagctgtgccccggctggcccgtgctggcccagctggccgtgggcagcgccctgttcagcatcgtggtgcccgtgctggcccccggcctgggcagcaccagaagcagcgccctgtgcagcctgggctactgcgtgtggtacggcagcgccttcgcccaggccctgctgctgggctgccacgccagcctgtag

SEQ ID NO: 79773 - DNA, 1011 bp, synthetic construct; identical to SEQ ID NO: 79769
  misc_feature 1..1011: note = Description of Artificial Sequence: Synthetic coding sequence
  source 1..1011: mol_type = other DNA

SEQ ID NO: 79774 - DNA, 2010 bp, synthetic construct
  misc_feature 1..2010: note = Description of Artificial Sequence: Synthetic coding sequence
  source 1..2010: mol_type = other DNA
atgggcagcaacagcagcagaatcggcgacctgcccaagaacgagtacctgaagaagctgagcggcaccgagagcatcagcgagaacgaccccttctggaaccagctgctgagcttcagcttccccgcccccaccagcagcagcgagctgaagctgctggaggaggccaccatcagcgtgtgcagaagcctggtggagaacaaccccagaaccggcaacctgggcgccctgatcaaggtgttcctgagcagaaccaaggagctgaagctgagcgccgagtgccagaaccacatcttcatctggcagacccacaacgccctgttcatcatctgctgcctgctgaaggtgttcatctgccagatgagcgaggaggagctgcagctgcacttcacctacgaggagaagagccccggcaactacagcagcgacagcgaggacctgctggaggagctgctgtgctgcctgatgcagctgatcaccgacatccccctgctggacatcacctacgagatcagcgtggaggccatcagcaccatggtggtgttcctgagctgccagctgttccacaaggaggtgctgagacagagcatcagccacaagtacctgatgagaggcccctgcctgccctacaccagcaagctggtgaagaccctgctgtacaacttcatcagacaggagaagccccccccccccggcgcccacgtgttcccccagcagagcgacggcggcggcctgctgtacggcctggccagcggcgtggccaccggcctgtggaccgtgttcaccctgggcggcgtgggcagcaaggccgccgccagccccgagctgagcagccccctggccaaccagagcctgctgctgctgctggtgctggccaacctgaccgacgccagcgacgcccccaacccctacagacaggccatcatgagcttcaagaacacccaggacagcagccccttccccagcagcatcccccacgccttccagatcaacttcaacagcctgtacaccgccctgtgcgagcagcagaccagcgaccaggccaccctgctgctgtacaccctgctgcaccagaacagcaacatcagaacctacatgctggccagaaccgacatggagaacctggtgctgcccatcctggagatcctgtaccacgtggaggagagaaacagccaccacgtgtacatggccctgatcatcctgctgatcctgaccgaggacgacggcttcaacagaagcatccacgaggtgatcctgaagaacatcacctggtacagcgagagagtgctgaccgagatcagcctgggcagcctgctgatcctggtggtgatcagaaccatccagtacaacatgaccagaaccagagacaagtacctgcacaccaactgcctggccgccctggccaacatgagcgcccagttcagaagcctgcaccagtacgccgcccagagaatcatcagcctgttcagcctgctgagcaagaagcacaacaaggtgctggagcaggccacccagagcctgagaggcagcctgagcagcaacgacgtgcccctgcccgactacgcccaggacctgaacgtgatcgaggaggtgatcagaatgatgctggagatcatcaacagctgcctgaccaacagcctgcaccacaaccccaacctggtgtacgccctgctgtacaagagagacctgttcgagcagttcagaacccaccccagcttccaggacatcatgcagaacatcgacctggtgatcagcttcttcagcagcagactgctgcaggccggcgccgagctgagcgtggagagagtgctggagatcatcaagcagggcgtggtggccctgcccaaggacagactgaagaagttccccgagctgaagttcaagtacgtggaggaggagcagcccgaggagttcttcatcccctacgtgtggagcctggtgtacaacagcgccgtgggcctgtactggaacccccaggacatccagctgttcaccatggacagcgactag

SEQ ID NO: 79775 - DNA, 519 bp, synthetic construct
  misc_feature 1..519: note = Description of Artificial Sequence: Synthetic coding sequence
  source 1..519: mol_type = other DNA
atggccctgatcatcctgctgatcctgaccgaggacgacggcttcaacagaagcatccacgaggtgatcctgaagaacatcacctggtacagcgagagagtgctgaccgagatcagcctgggcagcctgctgatcctggtggtgatcagaaccatccagtacaacatgaccagaaccagagacaagtacctgcacaccaactgcctggccgccctggccaacatgagcgcccagttcagaagcctgcaccagtacgccgcccagagaatcatcagctacacctgcagacacctgagaagatacgtgtacgtgctggacaagctgtacttcccccacagccactgcagcaccctgcagcactgcttcagcaccctgagcgacaacggcgaggagctgctgagcctgacctgcagccacatcctgagaagctacgccagcagcctgttcagcctgctgagcaagaagcacaacaaggtgctggagcaggccacccagagcctgagaggcagcctgagctag

SEQ ID NO: 79776 - DNA, 1440 bp, synthetic construct
  misc_feature 1..1440: note = Description of Artificial Sequence: Synthetic coding sequence
  source 1..1440: mol_type = other DNA
atgggcagcaacagcagcagaatcggcgacctgcccaagaacgagtacctgaagaagctgagcggcaccgagagcatcagcgagaacgaccccttctggaaccagctgctgagcttcagcttccccgcccccaccagcagcagcgagctgaagctgctggaggaggccaccatcagcgtgtgcagaagcctggccggcctgtggaccgtgttcaccctgggcggcgtgggcagcaaggccgccgccagccccgagctgagcagccccctggccaaccagagcctgctgctgctgctggtgctggccaacctgaccgacgccagcgacgcccccaacccctacagacaggccatcatgagcttcaagaacacccaggacagcagccccttccccagcagcatcccccacgccttccagatcaacttcaacagcctgtacaccgccctgtgcgagcagcagaccagcgaccaggccaccctgctgctgtacaccctgctgcaccagaacagcaacatcagaacctacatgctggccagaaccgacatggagaacctggtgctgcccatcctggagatcctgtaccacgtggaggagagaaacagccaccacgtgtacatggccctgatcatcctgctgatcctgaccgaggacgacggcttcaacagaagcatccacgaggtgatcctgaagaacatcacctggtacagcgagagagtgctgaccgagatcagcctgggcagcctgctgatcctggtggtgatcagaaccatccagtacaacatgaccagaaccagagacaagtacctgcacaccaactgcctggccgccctggccaacatgagcgcccagttcagaagcctgcaccagtacgccgcccagagaatcatcagcctgttcagcctgctgagcaagaagcacaacaaggtgctggagcaggccacccagagcctgagaggcagcctgagcagcaacgacgtgcccctgcccgactacgcccaggacctgaacgtgatcgaggaggtgatcagaatgatgctggagatcatcaacagctgcctgaccaacagcctgcaccacaaccccaacctggtgtacgccctgctgtacaagagagacctgttcgagcagttcagaacccaccccagcttccaggacatcatgcagaacatcgacctggtgatcagcttcttcagcagcagactgctgcaggccggcgccgagctgagcgtggagagagtgctggagatcatcaagcagggcgtggtggccctgcccaaggacagactgaagaagttccccgagctgaagttcaagtacgtggaggaggagcagcccgaggagttcttcatcccctacgtgtggagcctggtgtacaacagcgccgtgggcctgtactggaacccccaggacatccagctgttcaccatggacagcgactag

SEQ ID NO: 79777 - DNA, 3837 bp, synthetic construct
  misc_feature 1..3837: note = Description of Artificial Sequence: Synthetic coding sequence
  source 1..3837: mol_type = other DNA
atggcccagagcaagagacacgtgtacagcagaacccccagcggcagcagaatgagcgccgaggccagcgccagacccctgagagtgggcagcagagtggaggtgatcggcaagggccacagaggcaccgtggcctacgtgggcgccaccctgttcgccaccggcaagtgggtgggcgtgatcctggacgaggccaagggcaagaacgacggcaccgtgcagggcagaaagtacttcacctgcgacgagggccacggcatcttcgtgagacagagccagatccaggtgttcgaggacggcgccgacaccaccagccccgagacccccgacagcagcgccagcaaggtgctgaagagagagggcaccgacaccaccgccaagaccagcaagctgagaggcctgaagcccaagaaggcccccaccgccagaaagaccaccaccagaagacccaagcccaccagacccgccagcaccggcgtggccggcgccagcagcagcctgggccccagcggcagcgccagcgccggcgagctgagcagcagcgagcccagcacccccgcccagacccccctggccgcccccatcatccccacccccgtgctgaccagccccggcgccgtgccccccctgcccagccccagcaaggaggaggagggcctgagagcccaggtgagagacctggaggagaagctggagaccctgagactgaagagagccgaggacaaggccaagctgaaggagctggagaagcacaagatccagctggagcaggtgcaggagtggaagagcaagatgcaggagcagcaggccgacctgcagagaagactgaaggaggccagaaaggaggccaaggaggccctggaggccaaggagagatacatggaggagatggccgacaccgccgacgccatcgagatggccaccctggacaaggagatggccgaggagagagccgagagcctgcagcaggaggtggaggccctgaaggagagagtggacgagctgaccaccgacctggagatcctgaaggccgagatcgaggagaagggcagcgacggcgccgccagcagctaccagctgaagcagctggaggagcagaacgccagactgaaggacgccctggtgagaatgagagacctgagcagcagcgagaagcaggagcacgtgaagctgcagaagctgatggagaagaagaaccaggagctggaggtggtgagacagcagagagagagactgcaggaggagctgagccaggccgagagcaccatcgacgagctgaaggagcaggtggacgccgccctgggcgccgaggagatggtggagatgctgaccgacagaaacctgaacctggaggagaaggtgagagagctgagagagaccgtgggcgacctggaggccatgaacgagatgaacgacgagctgcaggagaacgccagagagaccgagctggagctgagagagcagctggacatggccggcgccagagtgagagaggcccagaagagagtggaggccgcccaggagaccgtggccgactaccagcagaccatcaagaagtacagacagctgaccgcccacctgcaggacgtgaacagagagctgaccaaccagcaggaggccagcgtggagagacagcagcagcccccccccgagaccttcgacttcaagatcaagttcgccgagaccaaggcccacgccaaggccatcgagatggagctgagacagatggaggtggcccaggccaacagacacatgagcctgctgaccgccttcatgcccgacagcttcctgagacccggcggcgaccacgactgcgtgctggtgctgctgctgatgcccagactgatctgcaaggccgagctgatcagaaagcaggcccaggagaagttcgagctgagcgagaactgcagcgagagacccggcctgagaggcgccgccggcgagcagctgagcttcgccgccggcctggtgtacagcctgagcctgctgcaggccaccctgcacagatacgagcacgccctgagccagtgcagcgtggacgtgtacaagaaggtgggcagcctgtaccccgagatgagcgcccacgagagaagcctggacttcctgatcgagctgctgcacaaggaccagctggacgagaccgtgaacgtggagcccctgaccaaggccatcaagtactaccagcacctgtacagcatccacctggccgagcagcccgaggactgcaccatgcagctggccgaccacatcaagttcacccagagcgccctggactgcatgagcgtggaggtgggcagactgagagccttcctgcagggcggccaggaggccaccgacatcgccctgctgctgagagacctggagaccagctgcagcgacatcagacagttctgcaagaagatcagaagaagaatgcccggcaccgacgcccccggcatccccgccgccctggccttcggcccccaggtgagcgacaccctgctggactgcagaaagcacctgacctgggtggtggccgtgctgcaggaggtggccgccgccgccgcccagctgatcgcccccctggccgagaacgagggcctgctggtggccgccctggaggagctggccttcaaggccagcgagcagatctacggcacccccagcagcagcccctacgagtgcctgagacagagctgcaacatcctgatcagcaccatgaacaagctggccaccgccatgcaggagggcgagtacgacgccgagagaccccccagcaagcccccccccgtggagctgagagccgccgccctgagagccgagatcaccgacgccgagggcctgggcctgaagctggaggacagagagaccgtgatcaaggagctgaagaagagcctgaagatcaagggcgaggagctgagcgaggccaacgtgagactgagcctgctggagaagaagctggacagcgccgccaaggacgccgacgagagaatcgagaaggtgcagaccagactggaggagacccaggccctgctgagaaagaaggagaaggagttcgaggagaccatggacgccctgcaggccgacatcgaccagctggaggccgagaaggccgagctgaagcagagactgaacagccagagcaagagaaccatcgagggcctgagaggccccccccccagcggcatcgccaccctggtgagcggcatcgccggcgaggagcagcagagaggcgccatccccggccaggcccccggcagcgtgcccggccccggcctggtgaaggacagccccctgctgctgcagcagatcagcgccatgagactgcacatcagccagctgcagcacgagaacagcatcctgaagggcgcccagatgaaggccagcctggccagcctgccccccctgcacgtggccaagctgagccacgagggccccggcagcgagctgcccgccggcgccctgtacagaaagaccagccagctgctggagaccctgaaccagctgagcacccacacccacgtggtggacatcaccagaaccagccccgccgccaagagccccagcgcccagctgatggagcaggtggcccagctgaagagcctgagcgacaccgtggagaagctgaaggacgaggtgctgaaggagaccgtgagccagagacccggcgccaccgtgcccaccgacttcgccaccttccccagcagcgccttcctgagagccaaggaggagcagcaggacgacaccgtgtacatgggcaaggtgaccttcagctgcgccgccggcttcggccagagacacagactggtgctgacccaggagcagctgcaccagctgcacagcagactgatcagctag

SEQ ID NO: 79778 - DNA, 3786 bp, synthetic construct
  misc_feature 1..3786: note = Description of Artificial Sequence: Synthetic coding sequence
  source 1..3786: mol_type = other DNA
atgagcgccgaggccagcgccagacccctgagagtgggcagcagagtggaggtgatcggcaagggccacagaggcaccgtggcctacgtgggcgccaccctgttcgccaccggcaagtgggtgggcgtgatcctggacgaggccaagggcaagaacgacggcaccgtgcagggcagaaagtacttcacctgcgacgagggccacggcatcttcgtgagacagagccagatccaggtgttcgaggacggcgccgacaccaccagccccgagacccccgacagcagcgccagcaaggtgctgaagagagagggcaccgacaccaccgccaagaccagcaagctgagaggcctgaagcccaagaaggcccccaccgccagaaagggcagaagagtgagaaccaagcccaccagacccgccagcaccggcgtggccggcgccagcagcagcctgggccccagcggcagcgccagcgccggcgagctgagcagcagcgagcccagcacccccgcccagacccccctggccgcccccatcatccccacccccgtgctgaccagccccggcgccgtgccccccctgcccagccccagcaaggaggaggagggcctgagagcccaggtgagagacctggaggagaagctggagaccctgagactgaagagagccgaggacaaggccaagctgaaggagctggagaagcacaagatccagctggagcaggtgcaggagtggaagagcaagatgcaggagcagcaggccgacctgcagagaagactgaaggaggccagaaaggaggccaaggaggccctggaggccaaggagagatacatggaggagatggccgacaccgccgacgccatcgagatggccaccctggacaaggagatggccgaggagagagccgagagcctgcagcaggaggtggaggccctgaaggagagagtggacgagctgaccaccgacctggagatcctgaaggccgagatcgaggagaagggcagcgacggcgccgccagcagctaccagctgaagcagctggaggagcagaacgccagactgaaggacgccctggtgagaatgagagacctgagcagcagcgagaagcaggagcacgtgaagctgcagaagctgatggagaagaagaaccaggagctggaggtggtgagacagcagagagagagactgcaggaggagctgagccaggccgagagcaccatcgacgagctgaaggagcaggtggacgccgccctgggcgccgaggagatggtggagatgctgaccgacagaaacctgaacctggaggagaaggtgagagagctgagagagaccgtgggcgacctggaggccatgaacgagatgaacgacgagctgcaggagaacgccagagagaccgagctggagctgagagagcagctggacatggccggcgccagagtgagagaggcccagaagagagtggaggccgcccaggagaccgtggccgactaccagcagaccatcaagaagtacagacagctgaccgcccacctgcaggacgtgaacagagagctgaccaaccagcaggaggccagcgtggagagacagcagcagcccccccccgagaccttcgacttcaagatcaagttcgccgagaccaaggcccacgccaaggccatcgagatggagctgagacagatggaggtggcccaggccaacagacacatgagcctgctgaccgccttcatgcccgacagcttcctgagacccggcggcgaccacgactgcgtgctggtgctgctgctgatgcccagactgatctgcaaggccgagctgatcagaaagcaggcccaggagaagttcgagctgagcgagaactgcagcgagagacccggcctgagaggcgccgccggcgagcagctgagcttcgccgccggcctggtgtacagcctgagcctgctgcaggccaccctgcacagatacgagcacgccctgagccagtgcagcgtggacgtgtacaagaaggtgggcagcctgtaccccgagatgagcgcccacgagagaagcctggacttcctgatcgagctgctgcacaaggaccagctggacgagaccgtgaacgtggagcccctgaccaaggccatcaagtactaccagcacctgtacagcatccacctggccgagcagcccgaggactgcaccatgcagctggccgaccacatcaagttcacccagagcgccctggactgcatgagcgtggaggtgggcagactgagagccttcctgcagggcggccaggaggccaccgacatcgccctgctgctgagagacctggagaccagctgcagcgacatcagacagttctgcaagaagatcagaagaagaatgcccggcaccgacgcccccggcatccccgccgccctggccttcggcccccaggtgagcgacaccctgctggactgcagaaagcacctgacctgggtggtggccgtgctgcaggaggtggccgccgccgccgcccagctgatcgcccccctggccgagaacgagggcctgctggtggccgccctggaggagctggccttcaaggccagcgagcagatctacggcacccccagcagcagcccctacgagtgcctgagacagagctgcaacatcctgatcagcaccatgaacaagctggccaccgccatgcaggagggcgagtacgacgccgagagaccccccagcaagcccccccccgtggagctgagagccgccgccctgagagccgagatcaccgacgccgagggcctgggcctgaagctggaggacagagagaccgtgatcaaggagctgaagaagagcctgaagatcaagggcgaggagctgagcgaggccaacgtgagactgagcctgctggagaagaagctggacagcgccgccaaggacgccgacgagagaatcgagaaggtgcagaccagactggaggagacccaggccctgctgagaaagaaggagaaggagttcgaggagaccatggacgccctgcaggccgacatcgaccagctggaggccgagaaggccgagctgaagcagagactgaacagccagagcaagagaaccatcgagggcctgagaggccccccccccagcggcatcgccaccctggtgagcggcatcgccggcgaggagcagcagagaggcgccatccccggccaggcccccggcagcgtgcccggccccggcctggtgaaggacagccccctgctgctgcagcagatcagcgccatgagactgcacatcagccagctgcagcacgagaacagcatcctgaagggcgcccagatgaaggccagcctggccagcctgccccccctgcacgtggccaagctgagccacgagggccccggcagcgagctgcccgccggcgccctgtacagaaagaccagccagctgctggagaccctgaaccagctgagcacccacacccacgtggtggacatcaccagaaccagccccgccgccaagagccccagcgcccagctgatggagcaggtggcccagctgaagagcctgagcgacaccgtggagaagctgaaggacgaggtgctgaaggagaccgtgagccagagacccggcgccaccgtgcccaccgacttcgccaccttccccagcagcgccttcctgagagccaaggaggagcagcaggacgacaccgtgtacatgggcaaggtgaccttcagctgcgccgccggcttcggccagagacacagactggtgctgacccaggagcagctgcaccagctgcacagcagactgatcagctag

SEQ ID NO: 79779 - DNA, 3816 bp, synthetic construct
  misc_feature 1..3816: note = Description of Artificial Sequence: Synthetic coding sequence
  source 1..3816: mol_type = other DNA
atggcccagagcaagagacacgtgtacagcagaacccccagcggcagcagaatgagcgccgaggccagcgccagacccctgagagtgggcagcagagtggaggtgatcggcaagggccacagaggcaccgtggcctacgtgggcgccaccctgttcgccaccggcaagtgggtgggcgtgatcctggacgaggccaagggcaagaacgacggcaccgtgcagggcagaaagtacttcacctgcgacgagggccacggcatcttcgtgagacagagccagatccaggtgttcgaggacggcgccgacaccaccagccccgagacccccgacagcagcgccagcaaggtgctgaagagagagggcaccgacaccaccgccaagaccagcaagctggcccccaccgccagaaagaccaccaccagaagacccaagcccaccagacccgccagcaccggcgtggccggcgccagcagcagcctgggccccagcggcagcgccagcgccggcgagctgagcagcagcgagcccagcacccccgcccagacccccctggccgcccccatcatccccacccccgtgctgaccagccccggcgccgtgccccccctgcccagccccagcaaggaggaggagggcctgagagcccaggtgagagacctggaggagaagctggagaccctgagactgaagagagccgaggacaaggccaagctgaaggagctggagaagcacaagatccagctggagcaggtgcaggagtggaagagcaagatgcaggagcagcaggccgacctgcagagaagactgaaggaggccagaaaggaggccaaggaggccctggaggccaaggagagatacatggaggagatggccgacaccgccgacgccatcgagatggccaccctggacaaggagatggccgaggagagagccgagagcctgcagcaggaggtggaggccctgaaggagagagtggacgagctgaccaccgacctggagatcctgaaggccgagatcgaggagaagggcagcgacggcgccgccagcagctaccagctgaagcagctggaggagcagaacgccagactgaaggacgccctggtgagaatgagagacctgagcagcagcgagaagcaggagcacgtgaagctgcagaagctgatggagaagaagaaccaggagctggaggtggtgagacagcagagagagagactgcaggaggagctgagccaggccgagagcaccatcgacgagctgaaggagcaggtggacgccgccctgggcgccgaggagatggtggagatgctgaccgacagaaacctgaacctggaggagaaggtgagagagctgagagagaccgtgggcgacctggaggccatgaacgagatgaacgacgagctgcaggagaacgccagagagaccgagctggagctgagagagcagctggacatggccggcgccagagtgagagaggcccagaagagagtggaggccgcccaggagaccgtggccgactaccagcagaccatcaagaagtacagacagctgaccgcccacctgcaggacgtgaacagagagctgaccaaccagcaggaggccagcgtggagagacagcagcagcccccccccgagaccttcgacttcaagatcaagttcgccgagaccaaggcccacgccaaggccatcgagatggagctgagacagatggaggtggcccaggccaacagacacatgagcctgctgaccgccttcatgcccgacagcttcctgagacccggcggcgaccacgactgcgtgctggtgctgctgctgatgcccagactgatctgcaaggccgagctgatcagaaagcaggcccaggagaagttcgagctgagcgagaactgcagcgagagacccggcctgagaggcgccgccggcgagcagctgagcttcgccgccggcctggtgtacagcctgagcctgctgcaggccaccctgcacagatacgagcacgccctgagccagtgcagcgtggacgtgtacaagaaggtgggcagcctgtaccccgagatgagcgcccacgagagaagcctggacttcctgatcgagctgctgcacaaggaccagctggacgagaccgtgaacgtggagcccctgaccaaggccatcaagtactaccagcacctgtacagcatccacctggccgagcagcccgaggactgcaccatgcagctggccgaccacatcaagttcacccagagcgccctggactgcatgagcgtggaggtgggcagactgagagccttcctgcagggcggccaggaggccaccgacatcgccctgctgctgagagacctggagaccagctgcagcgacatcagacagttctgcaagaagatcagaagaagaatgcccggcaccgacgcccccggcatccccgccgccctggccttcggcccccaggtgagcgacaccctgctggactgcagaaagcacctgacctgggtggtggccgtgctgcaggaggtggccgccgccgccgcccagctgatcgcccccctggccgagaacgagggcctgctggtggccgccctggaggagctggccttcaaggccagcgagcagatctacggcacccccagcagcagcccctacgagtgcctgagacagagctgcaacatcctgatcagcaccatgaacaagctggccaccgccatgcaggagggcgagtacgacgccgagagaccccccagcaagcccccccccgtggagctgagagccgccgccctgagagccgagatcaccgacgccgagggcctgggcctgaagctggaggacagagagaccgtgatcaaggagctgaagaagagcctgaagatcaagggcgaggagctgagcgaggccaacgtgagactgagcctgctggagaagaagctggacagcgccgccaaggacgccgacgagagaatcgagaaggtgcagaccagactggaggagacccaggccctgctgagaaagaaggagaaggagttcgaggagaccatggacgccctgcaggccgacatcgaccagctggaggccgagaaggccgagctgaagcagagactgaacagccagagcaagagaaccatcgagggcctgagaggccccccccccagcggcatcgccaccctggtgagcggcatcgccggcgaggagcagcagagaggcgccatccccggccaggcccccggcagcgtgcccggccccggcctggtgaaggacagccccctgctgctgcagcagatcagcgccatgagactgcacatcagccagctgcagcacgagaacagcatcctgaagggcgcccagatgaaggccagcctggccagcctgccccccctgcacgtggccaagctgagccacgagggccccggcagcgagctgcccgccggcgccctgtacagaaagaccagccagctgctggagaccctgaaccagctgagcacccacacccacgtggtggacatcaccagaaccagccccgccgccaagagccccagcgcccagctgatggagcaggtggcccagctgaagagcctgagcgacaccgtggagaagctgaaggacgaggtgctgaaggagaccgtgagccagagacccggcgccaccgtgcccaccgacttcgccaccttccccagcagcgccttcctgagagccaaggaggagcagcaggacgacaccgtgtacatgggcaaggtgaccttcagctgcgccgccggcttcggccagagacacagactggtgctgacccaggagcagctgcaccagctgcacagcagactgatcagctag

SEQ ID NO: 79780 - DNA, 3435 bp, synthetic construct
  misc_feature 1..3435: note = Description of Artificial Sequence: Synthetic coding sequence
  source 1..3435: mol_type = other DNA
atgatgagacaggcccccaccgccagaaagaccaccaccagaagacccaagcccaccagacccgccagcaccggcgtggccggcgccagcagcagcctgggccccagcggcagcgccagcgccggcgagctgagcagcagcgagcccagcacccccgcccagacccccctggccgcccccatcatccccacccccgtgctgaccagccccggcgccgtgccccccctgcccagccccagcaaggaggaggagggcctgagagcccaggtgagagacctggaggagaagctggagaccctgagactgaagagagccgaggacaaggccaagctgaaggagctggagaagcacaagatccagctggagcaggtgcaggagtggaagagcaagatgcaggagcagcaggccgacctgcagagaagactgaaggaggccagaaaggaggccaaggaggccctggaggccaaggagagatacatggaggagatggccgacaccgccgacgccatcgagatggccaccctggacaaggagatggccgaggagagagccgagagcctgcagcaggaggtggaggccctgaaggagagagtggacgagctgaccaccgacctggagatcctgaaggccgagatcgaggagaagggcagcgacggcgccgccagcagctaccagctgaagcagctggaggagcagaacgccagactgaaggacgccctggtgagaatgagagacctgagcagcagcgagaagcaggagcacgtgaagctgcagaagctgatggagaagaagaaccaggagctggaggtggtgagacagcagagagagagactgcaggaggagctgagccaggccgagagcaccatcgacgagctgaaggagcaggtggacgccgccctgggcgccgaggagatggtggagatgctgaccgacagaaacctgaacctggaggagaaggtgagagagctgagagagaccgtgggcgacctggaggccatgaacgagatgaacgacgagctgcaggagaacgccagagagaccgagctggagctgagagagcagctggacatggccggcgccagagtgagagaggcccagaagagagtggaggccgcccaggagaccgtggccgactaccagcagaccatcaagaagtacagacagctgaccgcccacctgcaggacgtgaacagagagctgaccaaccagcaggaggccagcgtggagagacagcagcagcccccccccgagaccttcgacttcaagatcaagttcgccgagaccaaggcccacgccaaggccatcgagatggagctgagacagatggaggtggcccaggccaacagacacatgagcctgctgaccgccttcatgcccgacagcttcctgagacccggcggcgaccacgactgcgtgctggtgctgctgctgatgcccagactgatctgcaaggccgagctgatcagaaagcaggcccaggagaagttcgagctgagcgagaactgcagcgagagacccggcctgagaggcgccgccggcgagcagctgagcttcgccgccggcctggtgtacagcctgagcctgctgcaggccaccctgcacagatacgagcacgccctgagccagtgcagcgtggacgtgtacaagaaggtgggcagcctgtaccccgagatgagcgcccacgagagaagcctggacttcctgatcgagctgctgcacaaggaccagctggacgagaccgtgaacgtggagcccctgaccaaggccatcaagtactaccagcacctgtacagcatccacctggccgagcagcccgaggactgcaccatgcagctggccgaccacatcaagttcacccagagcgccctggactgcatgagcgtggaggtgggcagactgagagccttcctgcagggcggccaggaggccaccgacatcgccctgctgctgagagacctggagaccagctgcagcgacatcagacagttctgcaagaagatcagaagaagaatgcccggcaccgacgcccccggcatccccgccgccctggccttcggcccccaggtgagcgacaccctgctggactgcagaaagcacctgacctgggtggtggccgtgctgcaggaggtggccgccgccgccgcccagctgatcgcccccctggccgagaacgagggcctgctggtggccgccctggaggagctggccttcaaggccagcgagcagatctacggcacccccagcagcagcccctacgagtgcctgagacagagctgcaacatcctgatcagcaccatgaacaagctggccaccgccatgcaggagggcgagtacgacgccgagagaccccccagcaagcccccccccgtggagctgagagccgccgccctgagagccgagatcaccgacgccgagggcctgggcctgaagctggaggacagagagaccgtgatcaaggagctgaagaagagcctgaagatcaagggcgaggagctgagcgaggccaacgtgagactgagcctgctggagaagaagctggacagcgccgccaaggacgccgacgagagaatcgagaaggtgcagaccagactggaggagacccaggccctgctgagaaagaaggagaaggagttcgaggagaccatggacgccctgcaggccgacatcgaccagctggaggccgagaaggccgagctgaagcagagactgaacagccagagcaagagaaccatcgagggcctgagaggccccccccccagcggcatcgccaccctggtgagcggcatcgccggcgaggagcagcagagaggcgccatccccggccaggcccccggcagcgtgcccggccccggcctggtgaaggacagccccctgctgctgcagcagatcagcgccatgagactgcacatcagccagctgcagcacgagaacagcatcctgaagggcgcccagatgaaggccagcctggccagcctgccccccctgcacgtggccaagctgagccacgagggccccggcagcgagctgcccgccggcgccctgtacagaaagaccagccagctgctggagaccctgaaccagctgagcacccacacccacgtggtggacatcaccagaaccagccccgccgccaagagccccagcgcccagctgatggagcaggtggcccagctgaagagcctgagcgacaccgtggagaagctgaaggacgaggtgctgaaggagaccgtgagccagagacccggcgccaccgtgcccaccgacttcgccaccttccccagcagcgccttcctgagagccaaggaggagcagcaggacgacaccgtgtacatgggcaaggtgaccttcagctgcgccgccggcttcggccagagacacagactggtgctgacccaggagcagctgcaccagctgcacagcagactgatcagctag

SEQ ID NO: 79781 - DNA, 3771 bp, synthetic construct
  misc_feature 1..3771: note = Description of Artificial Sequence: Synthetic coding sequence
  source 1..3771: mol_type = other DNA
atgagcgccgaggccagcgccagacccctgagagtgggcagcagagtggaggtgatcggcaagggccacagaggcaccgtggcctacgtgggcgccaccctgttcgccaccggcaagtgggtgggcgtgatcctggacgaggccaagggcaagaacgacggcaccgtgcagggcagaaagtacttcacctgcgacgagggccacggcatcttcgtgagacagagccagatccaggtgttcgaggacggcgccgacaccaccagccccgagacccccgacagcagcgccagcaaggtgctgaagagagagggcaccgacaccaccgccaagaccagcaagctgagaggcctgaagcccaagaaggcccccaccgccagaaagaccaccaccagaagacccaagcccaccagacccgccagcaccggcgtggccggcgccagcagcagcctgggccccagcggcagcgccagcgccggcgagctgagcagcagcgagcccagcacccccgcccagacccccctggccgcccccatcatccccacccccgtgctgaccagccccggcgccgtgccccccctgcccagccccagcaaggaggaggagggcctgagagcccaggtgagagacctggaggagaagctggagaccctgagactgaagagagccgaggacaaggccaagctgaaggagctggagaagcacaagatccagctggagcaggtgcaggagtggaagagcaagatgcaggagcagcaggccgacctgcagagaagactgaaggaggccagaaaggaggccaaggaggccctggaggccaaggagagatacatggaggagatggccgacaccgccgacgccatcgagatggccaccctggacaaggagatggccgaggagagagccgagagcctgcagcaggaggtggaggccctgaaggagagagtggacgagctgaccaccgacctggagatcctgaaggccgagatcgaggagaagggcagcgacggcgccgccagcagctaccagctgaagcagctggaggagcagaacgccagactgaaggacgccctggtgagaatgagagacctgagcagcagcgagaagcaggagcacgtgaagctgcagaagctgatggagaagaagaaccaggagctggaggtggtgagacagcagagagagagactgcaggaggagctgagccaggccgagagcaccatcgacgagctgaaggagcaggtggacgccgccctgggcgccgaggagatggtggagatgctgaccgacagaaacctgaacctggaggagaaggtgagagagctgagagagaccgtgggcgacctggaggccatgaacgagatgaacgacgagctgcaggagaacgccagagagaccgagctggagctgagagagcagctggacatggccggcgccagagtgagagaggcccagaagagagtggaggccgcccaggagaccgtggccgactaccagcagaccatcaagaagtacagacagctgaccgcccacctgcaggacgtgaacagagagctgaccaaccagcaggaggccagcgtggagagacagcagcagcccccccccgagaccttcgacttcaagatcaagttcgccgagaccaaggcccacgccaaggccatcgagatggagctgagacagatggaggtggcccaggccaacagacacatgagcctgctgaccgccttcatgcccgacagcttcctgagacccggcggcgaccacgactgcgtgctggtgctgctgctgatgcccagactgatctgcaaggccgagctgatcagaaagcaggcccaggagaagttcgagctgagcgagaactgcagcgagagacccggcctgagaggcgccgccggcgagcagctgagcttcgccgccggcctggtgtacagcctgagcctgctgcaggccaccctgcacagatacgagcacgccctgagccagtgcagcgtggacgtgtacaagaaggtgggcagcctgtaccccgagatgagcgcccacgagagaagcctggacttcctgatcgagctgctgcacaaggaccagctggacgagaccgtgaacgtggagcccctgaccaaggccatcaagtactaccagcacctgtacagcatccacctggccgagcagcccgaggactgcaccatgcagctggccgaccacatcaagttcacccagagcgccctggactgcatgagcgtggaggtgggcagactgagagccttcctgcagggcggccaggaggccaccgacatcgccctgctgctgagagacctggagaccagctgcagcgacatcagacagttctgcaagaagatcagaagaagaatgcccggcaccgacgcccccggcatccccgccgccctggccttcggcccccaggtgagcgacaccctgctggactgcagaaagcacctgacctgggtggtggccgtgctgcaggaggtggccgccgccgccgcccagctgatcgcccccctggccgagaacgagggcctgctggtggccgccctggaggagctggccttcaaggccagcgagcagatctacggcacccccagcagcagcccctacgagtgcctgagacagagctgcaacatcctgatcagcaccatgaacaagctggccaccgccatgcaggagggcgagtacgacgccgagagaccccccagcaagcccccccccgtggagctgagagccgccgccctgagagccgagatcaccgacgccgagggcctgggcctgaagctggaggacagagagaccgtgatcaaggagctgaagaagagcctgaagatcaagggcgaggagctgagcgaggccaacgtgagactgagcctgctggagaagaagctggacagcgccgccaaggacgccgacgagagaatcgagaaggtgcagaccagactggaggagacccaggccctgctgagaaagaaggagaaggagttcgaggagaccatggacgccctgcaggccgacatcgaccagctggaggccgagaaggccgagctgaagcagagactgaacagccagagcaagagaaccatcgagggcctgagaggccccccccccagcggcatcgccaccctggtgagcggcatcgccggcggcgccatccccggccaggcccccggcagcgtgcccggccccggcctggtgaaggacagccccctgctgctgcagcagatcagcgccatgagactgcacatcagccagctgcagcacgagaacagcatcctgaagggcgcccagatgaaggccagcctggccagcctgccccccctgcacgtggccaagctgagccacgagggccccggcagcgagctgcccgccggcgccctgtacagaaagaccagccagctgctggagaccctgaaccagctgagcacccacacccacgtggtggacatcaccagaaccagccccgccgccaagagccccagcgcccagctgatggagcaggtggcccagctgaagagcctgagcgacaccgtggagaagctgaaggacgaggtgctgaaggagaccgtgagccagagacccggcgccaccgtgcccaccgacttcgccaccttccccagcagcgccttcctgagagccaaggaggagcagcaggacgacaccgtgtacatgggcaaggtgaccttcagctgcgccgccggcttcggccagagacacagactggtgctgacccaggagcagctgcaccagctgcacagcagactgatcagctag

SEQ ID NO: 79782 - DNA, 2673 bp, synthetic construct
  misc_feature 1..2673: note = Description of Artificial Sequence: Synthetic coding sequence
  source 1..2673: mol_type = other DNA
atgagcgccgaggccagcgccagacccctgagagtgggcagcagagtggaggtgatcggcaagggccacagaggcaccgtggcctacgtgggcgccaccctgttcgccaccggcaagtgggtgggcgtgatcctggacgaggccaagggcaagaacgacggcaccgtgcagggcagaaagtacttcacctgcgacgagggccacggcatcttcgtgagacagagccagatccaggtgttcgaggacggcgccgacaccaccagccccgagacccccgacagcagcgccagcaaggtgctgaagagagagggcaccgacaccaccgccaagaccagcaagctgcccaccagacccgccagcaccggcgtggccggcgccagcagcagcctgggccccagcggcagcgccagcgccggcgagctgagcagcagcgagcccagcacccccgcccagacccccctggccgcccccatcatccccacccccgtgctgaccagccccggcgccgtgccccccctgcccagccccagcaaggaggaggagggcctgagagcccaggtgagagacctggaggagaagctggagaccctgagactgaagagagccgaggacaaggccaagctgaaggagctggagaagcacaagatccagctggagcaggtgcaggagtggaagagcaagatgcaggagcagcaggccgacctgcagagaagactgaaggaggccagaaaggaggccaaggaggccctggaggccaaggagagatacatggaggagatggccgacaccgccgacgccatcgagatggccaccctggacaaggagatggccgaggagagagccgagagcctgcagcaggaggtggaggccctgaaggagagagtggacgagctgaccaccgacctggagatcctgaaggccgagatcgaggagaagggcagcgacggcgccgccagcagctaccagctgaagcagctggaggagcagaacgccagactgaaggacgccctggtgagaatgagagacctgagcagcagcgagaagcaggagcacgtgaagctgcagaagctgatggagaagaagaaccaggagctggaggtggtgagacagcagagagagagactgcaggaggagctgagccaggccgagagcaccatcgacgagctgaaggagcaggtggacgccgccctgggcgccgaggagatggtggagatgctgaccgacagaaacctgaacctggaggagaaggtgagagagctgagagagaccgtgggcgacctggaggccatgaacgagatgaacgacgagctgcaggagaacgccagagagaccgagctggagctgagagagcagctggacatggccggcgccagagtgagagaggcccagaagagagtggaggccgcccaggagaccgtggccgactaccagcagaccatcaagaagtacagacagctgaccgcccacctgcaggacgtgaacagagagctgaccaaccagcaggaggccagcgtggagagacagcagcagcccccccccgagaccttcgacttcaagatcaagttcgccgagaccaaggcccacgccaaggccatcgagatggagctgagacagatggaggtggcccaggccaacagacacatgagcctgctgaccgccttcatgcccgacagcttcctgagacccggcggcgaccacgactgcgtgctggtgctgctgctgatgcccagactgatctgcaaggccgagctgatcagaaagcaggcccaggagaagttcgagctgagcgagaactgcagcgagagacccggcctgagaggcgccgccggcgagcagctgagcttcgccgccggcctggtgtacagcctgagcctgctgcaggccaccctgcacagatacgagcacgccctgagccagtgcagcgtggacgtgtacaagaaggtgggcagcctgtaccccgagatgagcgcccacgagagaagcctggacttcctgatcgagctgctgcacaaggaccagctggacgagaccgtgaacgtggagcccctgaccaaggccatcaagtactaccagcacctgtacagcatccacctggccgagcagcccgaggactgcaccatgcagctggccgaccacatcaagttcacccagagcgccctggactgcatgagcgtggaggtgggcagactgagagccttcctgcagggcggccaggaggccaccgacatcgccctgctgctgagagacctggagaccagctgcagcgacatcagacagttctgcaagaagatcagaagaagaatgcccggcaccgacgcccccggcatccccgccgccctggccttcggcccccaggtgagcgacaccctgctggactgcagaaagcacctgacctgggtggtggccgtgctgcaggaggtggccgccgccgccgcccagctgatcgcccccctggccgagaacgagggcctgctggtggccgccctggaggagctggccttcaaggccagcgagcaggtgggcctggacggctgggtggagggcgtgggcagagtgagcgaccagtgcggcgccttcaccagcgccctgggcagctgcagaagcatgggccccccccccgccgcccccatgagcgtgtgcgccagccacgccaccagcagcagcgtgccctag

SEQ ID NO: 79783 - DNA, 561 bp, synthetic construct
  misc_feature 1..561: note = Description of Artificial Sequence: Synthetic coding sequence
  source 1..561: mol_type = other DNA
atgctgatgggcctgctgagaccctacatcctgggcgagagaggcaccgtgatgacccccagcggcagcagaatgagcgccgaggccagcgccagacccctgagagtgggcagcagagtggaggtgatcggcaagggccacagaggcaccgtggcctacgtgggcgccaccctgttcgccaccggcaagtgggtgggcgtgatcctggacgaggccaagggcaagaacgacggcaccgtgcagggcagaaagtacttcacctgcgacgagggccacggcatcttcgtgagacagagccagatccaggtgttcgaggacggcgccgacaccaccagccccgagacccccgacagcagcgccagcaaggtgctgaagagagagggcaccgacaccaccgccaagaccagcaagctgagaggcctgaagcccaagaaggcccccaccgccagaaagaccaccaccagaagacccaagcccaccagacccgccagcaccggcgtggccggcgccagcagcagcctgggccccagcggcagcgccagcgccggcgagctgagctag

SEQ ID NO: 79784 - DNA, 3711 bp, synthetic construct
  misc_feature 1..3711: note = Description of Artificial Sequence: Synthetic coding sequence
  source 1..3711: mol_type = other DNA
atgagcgccgaggccagcgccagacccctgagagtgggcagcagagtggaggtgatcggcaagggccacagaggcaccgtggcctacgtgggcgccaccctgttcgccaccggcaagtgggtgggcgtgatcctggacgaggccaagggcaagaacgacggcaccgtgcagggcagaaagtacttcacctgcgacgagggccacggcatcttcgtgagacagagccagatccaggtgttcgaggacggcgccgacaccaccagccccgagacccccgacagcagcgccagcaaggtgctgaagagagagggcaccgacaccaccgccaagaccagcaagctgcccaccagacccgccagcaccggcgtggccggcgccagcagcagcctgggccccagcggcagcgccagcgccggcgagctgagcagcagcgagcccagcacccccgcccagacccccctggccgcccccatcatccccacccccgtgctgaccagccccggcgccgtgccccccctgcccagccccagcaaggaggaggagggcctgagagcccaggtgagagacctggaggagaagctggagaccctgagactgaagagagccgaggacaaggccaagctgaaggagctggagaagcacaagatccagctggagcaggtgcaggagtggaagagcaagatgcaggagcagcaggccgacctgcagagaagactgaaggaggccagaaaggaggccaaggaggccctggaggccaaggagagatacatggaggagatggccgacaccgccgacgccatcgagatggccaccctggacaaggagatggccgaggagagagccgagagcctgcagcaggaggtggaggccctgaaggagagagtggacgagctgaccaccgacctggagatcctgaaggccgagatcgaggagaagggcagcgacggcgccgccagcagctaccagctgaagcagctggaggagcagaacgccagactgaaggacgccctggtgagaatgagagacctgagcagcagcgagaagcaggagcacgtgaagctgcagaagctgatggagaagaagaaccaggagctggaggtggtgagacagcagagagagagactgcaggaggagctgagccaggccgagagcaccatcgacgagctgaaggagcaggtggacgccgccctgggcgccgaggagatggtggagatgctgaccgacagaaacctgaacctggaggagaaggtgagagagctgagagagaccgtgggcgacctggaggccatgaacgagatgaacgacgagctgcaggagaacgccagagagaccgagctggagctgagagagcagctggacatggccggcgccagagtgagagaggcccagaagagagtggaggccgcccaggagaccgtggccgactaccagcagaccatcaagaagtacagacagctgaccgcccacctgcaggacgtgaacagagagctgaccaaccagcaggaggccagcgtggagagacagcagcagcccccccccgagaccttcgacttcaagatcaagttcgccgagaccaaggcccacgccaaggccatcgagatggagctgagacagatggaggtggcccaggccaacagacacatgagcctgctgaccgccttcatgcccgacagcttcctgagacccggcggcgaccacgactgcgtgctggtgctgctgctgatgcccagactgatctgcaaggccgagctgatcagaaagcaggcccaggagaagttcgagctgagcgagaactgcagcgagagacccggcctgagaggcgccgccggcgagcagctgagcttcgccgccggcctggtgtacagcctgagcctgctgcaggccaccctgcacagatacgagcacgccctgagccagtgcagcgtggacgtgtacaagaaggtgggcagcctgtaccccgagatgagcgcccacgagagaagcctggacttcctgatcgagctgctgcacaaggaccagctggacgagaccgtgaacgtggagcccctgaccaaggccatcaagtactaccagcacctgtacagcatccacctggccgagcagcccgaggactgcaccatgcagctggccgaccacatcaagttcacccagagcgccctggactgcatgagcgtggaggtgggcagactgagagccttcctgcagggcggccaggaggccaccgacatcgccctgctgctgagagacctggagaccagctgcagcgacatcagacagttctgcaagaagatcagaagaagaatgcccggcaccgacgcccccggcatccccgccgccctggccttcggcccccaggtgagcgacaccctgctggactgcagaaagcacctgacctgggtggtggccgtgctgcaggaggtggccgccgccgccgcccagctgatcgcccccctggccgagaacgagggcctgctggtggccgccctggaggagctggccttcaaggccagcgagcagatctacggcacccccagcagcagcccctacgagtgcctgagacagagctgcaacatcctgatcagcaccatgaacaagctggccaccgccatgcaggagggcgagtacgacgccgagagaccccccagcaagcccccccccgtggagctgagagccgccgccctgagagccgagatcaccgacgccgagggcctgggcctgaagctggaggacagagagaccgtgatcaaggagctgaagaagagcctgaagatcaagggcgaggagctgagcgaggccaacgtgagactgagcctgctggagaagaagctggacagcgccgccaaggacgccgacgagagaatcgagaaggtgcagaccagactggaggagacccaggccctgctgagaaagaaggagaaggagttcgaggagaccatggacgccctgcaggccgacatcgaccagctggaggccgagaaggccgagctgaagcagagactgaacagccagagcaagagaaccatcgagggcctgagaggccccccccccagcggcatcgccaccctggtgagcggcatcgccggcggcgccatccccggccaggcccccggcagcgtgcccggccccggcctggtgaaggacagccccctgctgctgcagcagatcagcgccatgagactgcacatcagccagctgcagcacgagaacagcatcctgaagggcgcccagatgaaggccagcctggccagcctgccccccctgcacgtggccaagctgagccacgagggccccggcagcgagctgcccgccggcgccctgtacagaaagaccagccagctgctggagaccctgaaccagctgagcacccacacccacgtggtggacatcaccagaaccagccccgccgccaagagccccagcgcccagctgatggagcaggtggcccagctgaagagcctgagcgacaccgtggagaagctgaaggacgaggtgctgaaggagaccgtgagccagagacccggcgccaccgtgcccaccgacttcgccaccttccccagcagcgccttcctgagagccaaggaggagcagcaggacgacaccgtgtacatgggcaaggtgaccttcagctgcgccgccggcttcggccagagacacagactggtgctgacccaggagcagctgcaccagctgcacagcagactgatcagctag

SEQ ID NO: 79785 - DNA, 3420 bp, synthetic construct
  misc_feature 1..3420: note = Description of Artificial Sequence: Synthetic coding sequence
  source 1..3420: mol_type = other DNA
atgatgagacaggcccccaccgccagaaagaccaccaccagaagacccaagcccaccagacccgccagcaccggcgtggccggcgccagcagcagcctgggccccagcggcagcgccagcgccggcgagctgagcagcagcgagcccagcacccccgcccagacccccctggccgcccccatcatccccacccccgtgctgaccagccccggcgccgtgccccccctgcccagccccagcaaggaggaggagggcctgagagcccaggtgagagacctggaggagaagctggagaccctgagactgaagagagccgaggacaaggccaagctgaaggagctggagaagcacaagatccagctggagcaggtgcaggagtggaagagcaagatgcaggagcagcaggccgacctgcagagaagactgaaggaggccagaaaggaggccaaggaggccctggaggccaaggagagatacatggaggagatggccgacaccgccgacgccatcgagatggccaccctggacaaggagatggccgaggagagagccgagagcctgcagcaggaggtggaggccctgaaggagagagtggacgagctgaccaccgacctggagatcctgaaggccgagatcgaggagaagggcagcgacggcgccgccagcagctaccagctgaagcagctggaggagcagaacgccagactgaaggacgccctggtgagaatgagagacctgagcagcagcgagaagcaggagcacgtgaagctgcagaagctgatggagaagaagaaccaggagctggaggtggtgagacagcagagagagagactgcaggaggagctgagccaggccgagagcaccatcgacgagctgaaggagcaggtggacgccgccctgggcgccgaggagatggtggagatgctgaccgacagaaacctgaacctggaggagaaggtgagagagctgagagagaccgtgggcgacctggaggccatgaacgagatgaacgacgagctgcaggagaacgccagagagaccgagctggagctgagagagcagctggacatggccggcgccagagtgagagaggcccagaagagagtggaggccgcccaggagaccgtggccgactaccagcagaccatcaagaagtacagacagctgaccgcccacctgcaggacgtgaacagagagctgaccaaccagcaggaggccagcgtggagagacagcagcagcccccccccgagaccttcgacttcaagatcaagttcgccgagaccaaggcccacgccaaggccatcgagatggagctgagacagatggaggtggcccaggccaacagacacatgagcctgctgaccgccttcatgcccgacagcttcctgagacccggcggcgaccacgactgcgtgctggtgctgctgctgatgcccagactgatctgcaaggccgagctgatcagaaagcaggcccaggagaagttcgagctgagcgagaactgcagcgagagacccggcctgagaggcgccgccggcgagcagctgagcttcgccgccggcctggtgtacagcctgagcctgctgcaggccaccctgcacagatacgagcacgccctgagccagtgcagcgtggacgtgtacaagaaggtgggcagcctgtaccccgagatgagcgcccacgagagaagcctggacttcctgatcgagctgctgcacaaggaccagctggacgagaccgtgaacgtggagcccctgaccaaggccatcaagtactaccagcacctgtacagcatccacctggccgagcagcccgaggactgcaccatgcagctggccgaccacatcaagttcacccagagcgccctggactgcatgagcgtggaggtgggcagactgagagccttcctgcagggcggccaggaggccaccgacatcgccctgctgctgagagacctggagaccagctgcagcgacatcagacagttctgcaagaagatcagaagaagaatgcccggcaccgacgcccccggcatccccgccgccctggccttcggcccccaggtgagcgacaccctgctggactgcagaaagcacctgacctgggtggtggccgtgctgcaggaggtggccgccgccgccgcccagctgatcgcccccctggccgagaacgagggcctgctggtggccgccctggaggagctggccttcaaggccagcgagcagatctacggcacccccagcagcagcccctacgagtgcctgagacagagctgcaacatcctgatcagcaccatgaacaagctggccaccgccatgcaggagggcgagtacgacgccgagagaccccccagcaagcccccccccgtggagctgagagccgccgccctgagagccgagatcaccgacgccgagggcctgggcctgaagctggaggacagagagaccgtgatcaaggagctgaagaagagcctgaagatcaagggcgaggagctgagcgaggccaacgtgagactgagcctgctggagaagaagctggacagcgccgccaaggacgccgacgagagaatcgagaaggtgcagaccagactggaggagacccaggccctgctgagaaagaaggagaaggagttcgaggagaccatggacgccctgcaggccgacatcgaccagctggaggccgagaaggccgagctgaagcagagactgaacagccagagcaagagaaccatcgagggcctgagaggccccccccccagcggcatcgccaccctggtgagcggcatcgccggcggcgccatccccggccaggcccccggcagcgtgcccggccccggcctggtgaaggacagccccctgctgctgcagcagatcagcgccatgagactgcacatcagccagctgcagcacgagaacagcatcctgaagggcgcccagatgaaggccagcctggccagcctgccccccctgcacgtggccaagctgagccacgagggccccggcagcgagctgcccgccggcgccctgtacagaaagaccagccagctgctggagaccctgaaccagctgagcacccacacccacgtggtggacatcaccagaaccagccccgccgccaagagccccagcgcccagctgatggagcaggtggcccagctgaagagcctgagcgacaccgtggagaagctgaaggacgaggtgctgaaggagaccgtgagccagagacccggcgccaccgtgcccaccgacttcgccaccttccccagcagcgccttcctgagagccaaggaggagcagcaggacgacaccgtgtacatgggcaaggtgaccttcagctgcgccgccggcttcggccagagacacagactggtgctgacccaggagcagctgcaccagctgcacagcagactgatcagctag

SEQ ID NO: 79786 - DNA, 3762 bp, synthetic construct
  misc_feature 1..3762: note = Description of Artificial Sequence: Synthetic coding sequence
  source 1..3762: mol_type = other DNA
atggcccagagcaagagacacgtgtacagcagaacccccagcggcagcagaatgagcgccgaggccagcgccagacccctgagagtgggcagcagagtggaggtgatcggcaagggccacagaggcaccgtggcctacgtgggcgccaccctgttcgccaccggcaagtgggtgggcgtgatcctggacgaggccaagggcaagaacgacggcaccgtgcagggcagaaagtacttcacctgcgacgagggccacggcatcttcgtgagacagagccagatccaggtgttcgaggacggcgccgacaccaccagccccgagacccccgacagcagcgccagcaaggtgctgaagagagagggcaccgacaccaccgccaagaccagcaagctgcccaccagacccgccagcaccggcgtggccggcgccagcagcagcctgggccccagcggcagcgccagcgccggcgagctgagcagcagcgagcccagcacccccgcccagacccccctggccgcccccatcatccccacccccgtgctgaccagccccggcgccgtgccccccctgcccagccccagcaaggaggaggagggcctgagagcccaggtgagagacctggaggagaagctggagaccctgagactgaagagagccgaggacaaggccaagctgaaggagctggagaagcacaagatccagctggagcaggtgcaggagtggaagagcaagatgcaggagcagcaggccgacctgcagagaagactgaaggaggccagaaaggaggccaaggaggccctggaggccaaggagagatacatggaggagatggccgacaccgccgacgccatcgagatggccaccctggacaaggagatggccgaggagagagccgagagcctgcagcaggaggtggaggccctgaaggagagagtggacgagctgaccaccgacctggagatcctgaaggccgagatcgaggagaagggcagcgacggcgccgccagcagctaccagctgaagcagctggaggagcagaacgccagactgaaggacgccctggtgagaatgagagacctgagcagcagcgagaagcaggagcacgtgaagctgcagaagctgatggagaagaagaaccaggagctggaggtggtgagacagcagagagagagactgcaggaggagctgagccaggccgagagcaccatcgacgagctgaaggagcaggtggacgccgccctgggcgccgaggagatggtggagatgctgaccgacagaaacctgaacctggaggagaaggtgagagagctgagagagaccgtgggcgacctggaggccatgaacgagatgaacgacgagctgcaggagaacgccagagagaccgagctggagctgagagagcagctggacatggccggcgccagagtgagagaggcccagaagagagtggaggccgcccaggagaccgtggccgactaccagcagaccatcaagaagtacagacagctgaccgcccacctgcaggacgtgaacagagagctgaccaaccagcaggaggccagcgtggagagacagcagcagcccccccccgagaccttcgacttcaagatcaagttcgccgagaccaaggcccacgccaaggccatcgagatggagctgagacagatggaggtggcccaggccaacagacacatgagcctgctgaccgccttcatgcccgacagcttcctgagacccggcggcgaccacgactgcgtgctggtgctgctgctgatgcccagactgatctgcaaggccgagctgatcagaaagcaggcccaggagaagttcgagctgagcgagaactgcagcgagagacccggcctgagaggcgccgccggcgagcagctgagcttcgccgccggcctggtgtacagcctgagcctgctgcaggccaccctgcacagatacgagcacgccctgagccagtgcagcgtggacgtgtacaagaaggtgggcagcctgtaccccgagatgagcgcccacgagagaagcctggacttcctgatcgagctgctgcacaaggaccagctggacgagaccgtgaacgtggagcccctgaccaaggccatcaagtactaccagcacctgtacagcatccacctggccgagcagcccgaggactgcaccatgcagctggccgaccacatcaagttcacccagagcgccctggactgcatgagcgtggaggtgggcagactgagagccttcctgcagggcggccaggaggccaccgacatcgccctgctgctgagagacctggagaccagctgcagcgacatcagacagttctgcaagaagatcagaagaagaatgcccggcaccgacgcccccggcatccccgccgccctggccttcggcccccaggtgagcgacaccctgctggactgcagaaagcacctgacctgggtggtggccgtgctgcaggaggtggccgccgccgccgcccagctgatcgcccccctggccgagaacgagggcctgctggtggccgccctggaggagctggccttcaaggccagcgagcagatctacggcacccccagcagcagcccctacgagtgcctgagacagagctgcaacatcctgatcagcaccatgaacaagctggccaccgccatgcaggagggcgagtacgacgccgagagaccccccagcaagcccccccccgtggagctgagagccgccgccctgagagccgagatcaccgacgccgagggcctgggcctgaagctggaggacagagagaccgtgatcaaggagctgaagaagagcctgaagatcaagggcgaggagctgagcgaggccaacgtgagactgagcctgctggagaagaagctggacagcgccgccaaggacgccgacgagagaatcgagaaggtgcagaccagactggaggagacccaggccctgctgagaaagaaggagaaggagttcgaggagaccatggacgccctgcaggccgacatcgaccagctggaggccgagaaggccgagctgaagcagagactgaacagccagagcaagagaaccatcgagggcctgagaggccccccccccagcggcatcgccaccctggtgagcggcatcgccggcggcgccatccccggccaggcccccggcagcgtgcccggccccggcctggtgaaggacagccccctgctgctgcagcagatcagcgccatgagactgcacatcagccagctgcagcacgagaacagcatcctgaagggcgcccagatgaaggccagcctggccagcctgccccccctgcacgtggccaagctgagccacgagggccccggcagcgagctgcccgccggcgccctgtacagaaagaccagccagctgctggagaccctgaaccagctgagcacccacacccacgtggtggacatcaccagaaccagccccgccgccaagagccccagcgcccagctgatggagcaggtggcccagctgaagagcctgagcgacaccgtggagaagctgaaggacgaggtgctgaaggagaccgtgagccagagacccggcgccaccgtgcccaccgacttcgccaccttccccagcagcgccttcctgagagccaaggaggagcagcaggacgacaccgtgtacatgggcaaggtgaccttcagctgcgccgccggcttcggccagagacacagactggtgctgacccaggagcagctgcaccagctgcacagcagactgatcagctag

SEQ ID NO: 79787 - DNA, 1221 bp, synthetic construct
  misc_feature 1..1221: note = Description of Artificial Sequence: Synthetic coding sequence
  source 1..1221: mol_type = other DNA
atggccgaccccaagtacgccgacctgcccggcatcgccagaaacgagcccgacgtgtacgagaccagcgacctgcccgaggacgaccaggccgagttcgacgccttcgcccaggagctggaggagctgaccagcaccagcgtggagcacatcatcgtgaaccccaacgccgcctacgacaagttcaaggacaagagagtgggcaccaagggcctggacttcagcgacagaatcggcaagaccaagagaaccggctacgagagcggcgagtacgagatgctgggcgagggcctgggcgtgaaggagaccccccagcagaagtaccagagactgctgcacgaggtgcaggagctgaccaccgaggtggagaagatcaagaccaccgtgaaggagagcgccaccgaggagaagctgacccccgtgctgctggccaagcagctggccgccctgaagcagcagctggtggccagccacctggagaagctgctgggccccgacgccgccatcaacctgaccgaccccgacggcgccctggccaagagactgctgctgcagctggaggccaccaagaacagcaagggcggcagcggcggcaagaccaccggcaccccccccgacagcagcctggtgacctacgagctgcacagcagacccgagcaggacaagttcagccaggccgccaaggtggccgagctggagaagagactgaccgagctggagaccgccgtgagatgcgaccaggacgcccagaaccccctgagcgccggcctgcagggcgcctgcctgatggagaccgtggagctgctgcaggccaaggtgagcgccctggacctggccgtgctggaccaggtggaggccagactgcagagcgtgctgggcaaggtgaacgagatcgccaagcacaaggccagcgtggaggacgccgacacccagagcaaggtgcaccagctgtacgagaccatccagagatggagccccatcgccagcaccctgcccgagctggtgcagagactggtgaccatcaagcagctgcacgagcaggccatgcagttcggccagctgctgacccacctggacaccacccagcagatgatcgccaacagcctgaaggacaacaccaccctgctgacccaggtgcagaccaccatgagagagaacctggccaccgtggagggcaacttcgccagcatcgacgagagaatgaagaagctgggcaagtag

SEQ ID NO: 79788 - DNA, 1137 bp, synthetic construct
  misc_feature 1..1137: note = Description of Artificial Sequence: Synthetic coding sequence
  source 1..1137: mol_type = other DNA
atgtacgcccagggcaccgaggacagcagaaccctggaggagctgaccagcaccagcgtggagcacatcatcgtgaaccccaacgccgcctacgacaagttcaaggacaagagagtgggcaccaagggcctggacttcagcgacagaatcggcaagaccaagagaaccggctacgagagcggcgagtacgagatgctgggcgagggcctgggcgtgaaggagaccccccagcagaagtaccagagactgctgcacgaggtgcaggagctgaccaccgaggtggagaagatcaagaccaccgtgaaggagagcgccaccgaggagaagctgacccccgtgctgctggccaagcagctggccgccctgaagcagcagctggtggccagccacctggagaagctgctgggccccgacgccgccatcaacctgaccgaccccgacggcgccctggccaagagactgctgctgcagctggaggccaccaagaacagcaagggcggcagcggcggcaagaccaccggcaccccccccgacagcagcctggtgacctacgagctgcacagcagacccgagcaggacaagttcagccaggccgccaaggtggccgagctggagaagagactgaccgagctggagaccgccgtgagatgcgaccaggacgcccagaaccccctgagcgccggcctgcagggcgcctgcctgatggagaccgtggagctgctgcaggccaaggtgagcgccctggacctggccgtgctggaccaggtggaggccagactgcagagcgtgctgggcaaggtgaacgagatcgccaagcacaaggccagcgtggaggacgccgacacccagagcaaggtgcaccagctgtacgagaccatccagagatggagccccatcgccagcaccctgcccgagctggtgcagagactggtgaccatcaagcagctgcacgagcaggccatgcagttcggccagctgctgacccacctggacaccacccagcagatgatcgccaacagcctgaaggacaacaccaccctgctgacccaggtgcagaccaccatgagagagaacctggccaccgtggagggcaacttcgccagcatcgacgagagaatgaagaagctgggcaagtag

SEQ ID NO: 79789 - DNA, 945 bp, synthetic construct
  misc_feature 1..945: note = Description of Artificial Sequence: Synthetic coding sequence
  source 1..945: mol_type = other DNA
atgctgggcgagggcctgggcgtgaaggagaccccccagcagaagtaccagagactgctgcacgaggtgcaggagctgaccaccgaggtggagaagatcaagaccaccgtgaaggagagcgccaccgaggagaagctgacccccgtgctgctggccaagcagctggccgccctgaagcagcagctggtggccagccacctggagaagctgctgggccccgacgccgccatcaacctgaccgaccccgacggcgccctggccaagagactgctgctgcagctggaggccaccaagaacagcaagggcggcagcggcggcaagaccaccggcaccccccccgacagcagcctggtgacctacgagctgcacagcagacccgagcaggacaagttcagccaggccgccaaggtggccgagctggagaagagactgaccgagctggagaccgccgtgagatgcgaccaggacgcccagaaccccctgagcgccggcctgcagggcgcctgcctgatggagaccgtggagctgctgcaggccaaggtgagcgccctggacctggccgtgctggaccaggtggaggccagactgcagagcgtgctgggcaaggtgaacgagatcgccaagcacaaggccagcgtggaggacgccgacacccagagcaaggtgcaccagctgtacgagaccatccagagatggagccccatcgccagcaccctgcccgagctggtgcagagactggtgaccatcaagcagctgcacgagcaggccatgcagttcggccagctgctgacccacctggacaccacccagcagatgatcgccaacagcctgaaggacaacaccaccctgctgacccaggtgcagaccaccatgagagagaacctggccaccgtggagggcaacttcgccagcatcgacgagagaatgaagaagctgggcaagtag

SEQ ID NO: 79790 - DNA, 1221 bp, synthetic construct
  misc_feature 1..1221: note = Description of Artificial Sequence: Synthetic coding sequence
  source 1..1221: mol_type = other DNA
atggccgaccccaagtacgccgacctgcccggcatcgccagaaacgagcccgacgtgtacgagaccagcgacctgcccgaggacgaccaggccgagttcgacgccaccgtgcagcacctggaggagctgaccagcaccagcgtggagcacatcatcgtgaaccccaacgccgcctacgacaagttcaaggacaagagagtgggcaccaagggcctggacttcagcgacagaatcggcaagaccaagagaaccggctacgagagcggcgagtacgagatgctgggcgagggcctgggcgtgaaggagaccccccagcagaagtaccagagactgctgcacgaggtgcaggagctgaccaccgaggtggagaagatcaagaccaccgtgaaggagagcgccaccgaggagaagctgacccccgtgctgctggccaagcagctggccgccctgaagcagcagctggtggccagccacctggagaagctgctgggccccgacgccgccatcaacctgaccgaccccgacggcgccctggccaagagactgctgctgcagctggaggccaccaagaacagcaagggcggcagcggcggcaagaccaccggcaccccccccgacagcagcctggtgacctacgagctgcacagcagacccgagcaggacaagttcagccaggccgccaaggtggccgagctggagaagagactgaccgagctggagaccgccgtgagatgcgaccaggacgcccagaaccccctgagcgccggcctgcagggcgcctgcctgatggagaccgtggagctgctgcaggccaaggtgagcgccctggacctggccgtgctggaccaggtggaggccagactgcagagcgtgctgggcaaggtgaacgagatcgccaagcacaaggccagcgtggaggacgccgacacccagagcaaggtgcaccagctgtacgagaccatccagagatggagccccatcgccagcaccctgcccgagctggtgcagagactggtgaccatcaagcagctgcacgagcaggccatgcagttcggccagctgctgacccacctggacaccacccagcagatgatcgccaacagcctgaaggacaacaccaccctgctgacccaggtgcagaccaccatgagagagaacctggccaccgtggagggcaacttcgccagcatcgacgagagaatgaagaagctgggcaagtag

SEQ ID NO: 79791 - DNA, 1206 bp, synthetic construct
  misc_feature 1..1206: note = Description of Artificial Sequence: Synthetic coding sequence
  source 1..1206: mol_type = other DNA
atggccgaccccaagtacgccgacctgcccggcatcgccagaaacgagcccgacgtgtacgagaccagcgacctgcccgaggacgaccaggccgagttcgacgccgaggagctgaccagcaccagcgtggagcacatcatcgtgaaccccaacgccgcctacgacaagttcaaggacaagagagtgggcaccaagggcctggacttcagcgacagaatcggcaagaccaagagaaccggctacgagagcggcgagtacgagatgctgggcgagggcctgggcgtgaaggagaccccccagcagaagtaccagagactgctgcacgaggtgcaggagctgaccaccgaggtggagaagatcaagaccaccgtgaaggagagcgccaccgaggagaagctgacccccgtgctgctggccaagcagctggccgccctgaagcagcagctggtggccagccacctggagaagctgctgggccccgacgccgccatcaacctgaccgaccccgacggcgccctggccaagagactgctgctgcagctggaggccaccaagaacagcaagggcggcagcggcggcaagaccaccggcaccccccccgacagcagcctggtgacctacgagctgcacagcagacccgagcaggacaagttcagccaggccgccaaggtggccgagctggagaagagactgaccgagctggagaccgccgtgagatgcgaccaggacgcccagaaccccctgagcgccggcctgcagggcgcctgcctgatggagaccgtggagctgctgcaggccaaggtgagcgccctggacctggccgtgctggaccaggtggaggccagactgcagagcgtgctgggcaaggtgaacgagatcgccaagcacaaggccagcgtggaggacgccgacacccagagcaaggtgcaccagctgtacgagaccatccagagatggagccccatcgccagcaccctgcccgagctggtgcagagactggtgaccatcaagcagctgcacgagcaggccatgcagttcggccagctgctgacccacctggacaccacccagcagatgatcgccaacagcctgaaggacaacaccaccctgctgacccaggtgcagaccaccatgagagagaacctggccaccgtggagggcaacttcgccagcatcgacgagagaatgaagaagctgggcaagtag

SEQ ID NO: 79792 - DNA, 561 bp, synthetic construct
  misc_feature 1..561: note = Description of Artificial Sequence: Synthetic coding sequence
  source 1..561: mol_type = other DNA
atggccggcctgaccgacctgcagagactgcaggccagagtggaggagctggagagatgggtgtacggccccggcggcgccagaggcagcagaaaggtggccgacggcctggtgaaggtgcaggtggccctgggcaacatcagcagcaagagagagagagtgaagatcctgtacaagaagatcgaggacctgatcaagtacctggaccccgagtacatcgacagaatcgccatccccgacgccagcaagctgcagttcatcctggccgaggagcagttcatcctgagccaggtggccctgctggagcaggtgaacgccctggtgcccatgctggacagcgcccacatcaaggccgtgcccgagcacgccgccagactgcagagactggcccagatccacatccagcagcaggaccagtgcgtggagatcaccgaggagagcaaggccctgctggaggagtacaacaagaccaccatgctgctgagcaagcagttcgtgcagtgggacgagctgctgtgccagctggaggccgccacccaggtgaagcccgccgaggagtag

SEQ ID NO: 79793 - DNA, 531 bp, synthetic construct
  misc_feature 1..531: note = Description of Artificial Sequence: Synthetic coding sequence
  source 1..531: mol_type = other DNA
atggccggcctgaccgacctgcagagactgcaggccagagtggaggagctggagagatgggtgtacggccccggcggcgccagaggcagcagaaaggtggccgacggcctggtgaaggtgcaggtggccctgggcaacatcagcagcaagagagagagagtgaagatcctgtacaagaagatcgaggacctgatcaagtacctggaccccgagtacatcgacagaatcgccatccccgacgccagcaagctgcagttcatcctggccgaggagcagttcatcctgagccaggtggccctgctggagcaggtgaacgccctggtgcccatgctggacagcgcccacatcaaggccgtgcccgagcacgccgccagactgcagagactggcccagatccacatccagcagcaggccccctggggcgtgggcgtgagagacgaggccggcagcctggtggaggacgtgggcttcgcccagttcctgagcgtgctgcacttcggccccaccggccccgtgtgcggcaaccactag

SEQ ID NO: 79794 - DNA, 486 bp, synthetic construct
  misc_feature 1..486: note = Description of Artificial Sequence: Synthetic coding sequence
  source 1..486: mol_type = other DNA
atggccggcctgaccgacctgcagagactgcaggccagagtggaggagctggagagatgggtgtacggccccggcggcgccagaggcagcagaaaggtggccgacggcctggtgaaggtgcaggtggccctgggcaacatcagcagcaagagagagagagtgaagatcctgtacaagaagatcgaggacctgatcaagtacctggaccccgagtacatcgacagaatcgccatccccgacgccagcaagctgcagttcatcctggccggcaacgccggcctgcacgtgtacatgcacctgagaatgtgggtggtgggcgaggtgaagcacagagacggcctgagcatccagagcagcggcggctacaagccctggatgctgctgagcggcatcgtggcctggttctgggtggaggaccccatggaccccctggtggacatcgagtacagcatccccctgcaccagctgcaggccatggtgccctag

SEQ ID NO: 79795 - DNA, 315 bp, synthetic construct
  misc_feature 1..315: note = Description of Artificial Sequence: Synthetic coding sequence
  source 1..315: mol_type = other DNA
atggccggcctgaccgacctgcagagactgcaggccagagtggaggagctggagagatgggtgtacggccccggcggcgccagaggcagcagaaaggtggccgacggcctggtgaaggtgcaggtggccctgggcaacatcagcagcaagagagagagagtgaagatcctgtacaagaagatcgaggacctgatcaagtacctggaccccgagtacatcgacagaatcgccatccccgacgccagcaagctgcagttcatcctggccgagagaagcagcctgagcttccccagactgcacagctggagcagatag

SEQ ID NO: 79796 - DNA, 477 bp, synthetic construct
  misc_feature 1..477: note = Description of Artificial Sequence: Synthetic coding sequence
  source 1..477: mol_type = other DNA
atggccggcctgaccgacctgcagagactgcaggccagagtggaggagctggagagatgggtgtacggccccggcggcgccagaggcagcagaaaggtggccgacggcctggtgaaggtgcaggtggccctgggcaacatcagcagcaagagagagagagtgaagatcctgtacaagaagatcgaggacctgatcaagtacctggaccccgagtacatcgacagaatcgccatccccgacgccagcaagctgcagttcatcctggccgccgtgcccgagcacgccgccagactgcagagactggcccagatccacatccagcagcaggaccagtgcgtggagatcaccgaggagagcaaggccctgctggaggagtacaacaagaccaccatgctgctgagcaagcagttcgtgcagtgggacgagctgctgtgccagctggaggccgccacccaggtgaagcccgccgaggagtag

SEQ ID NO: 79797 - DNA, 456 bp, synthetic construct
  misc_feature 1..456: note = Description of Artificial Sequence: Synthetic coding sequence
  source 1..456: mol_type = other DNA
cagagactgcaggccagagtggaggagctggagagatgggtgtacggccccggcggcgccagaggcagcagaaaggtggccgacggcctggtgaaggtgcaggtggccctgggcaacatcagcagcaagagagagagagtgaagatcctgtacaagaagatcgaggacctgatcaagtacctggaccccgagtacatcgacagaatcgccatccccgacgccagcaagctgcagttcatcctggccgccgtgcccgagcacgccgccagactgcagagactggcccagatccacatccagcagcaggaccagtgcgtggagatcaccgaggagagcaaggccctgctggaggagtacaacaagaccaccatgctgctgagcaagcagttcgtgcagtgggacgagctgctgtgccagctggaggccgccacccaggtgaagcccgccgaggagtag

SEQ ID NO: 79798 - DNA, 519 bp, synthetic construct
  misc_feature 1..519: note = Description of Artificial Sequence: Synthetic coding sequence
  source 1..519: mol_type = other DNA
atggccggcctgaccgacctgcagagactgcaggccagagtggaggagctggagagatgggtgtacggccccggcggcgccagaggcagcagaaaggtggccgacggcctggtgaaggtgcaggtggccctgggcaacatcagcagcaagagagagagagtgaagatcctgtacaagaagatcgaggacctgatcaagtacctggaccccgagtacatcgacagaatcgccatccccgacgccagcaagctgcagttcatcctggccggcaacgccggcctgcacgtgtacatgcacctgagaatgtgggtggtgggcgaggtgaagcacagagacggcctgagcatccagagcagcggcggctacaagccctggatgctgctgagcggcatcgtggcctggttctgggtggaggaccccatggaccccctggtggacatcgagtacagcatccccctgcaccagctgcaggccatggtgcccgccaccgtgggcgccagccccgtgttctaccagtag

SEQ ID NO: 79799 - DNA, 549 bp, synthetic construct
  misc_feature 1..549: note = Description of Artificial Sequence: Synthetic coding sequence
  source 1..549: mol_type = other DNA
atggagctgggcgagctgctgtacaacaagagcgagtacatcgagaccgccagcggcaacaaggtgagcagacagagcgtgctgtgcggcagccagaacatcgtgctgaacggcaagaccatcgtgatgaacgactgcatcatcagaggcgacctggccaacgtgagagtgggcagacactgcgtggtgaagagcagaagcgtgatcagaccccccttcaagaagttcagcaagggcgtggccttcttccccctgcacatcggcgaccacgtgttcatcgaggaggactgcgtggtgaacgccgcccagatcggcagctacgtgcacgtgggcaagaactgcgtgatcggcagaagatgcgtgctgaaggactgctgcaagatcctggacaacaccgtgctgccccccgagaccgtggtgccccccttcaccgtgttcagcggctgccccggcctgttcagcggcgagctgcccgagtgcacccaggagctgatgatcgacgtgaccaagagctactaccagaagttcctgcccctgacccaggtgtag

SEQ ID NO: 79800 - DNA, 255 bp, synthetic construct
  misc_feature 1..255: note = Description of Artificial Sequence: Synthetic coding sequence
  source 1..255: mol_type = other DNA
atggagctgggcgagctgctgtacaacaagagcgagtacatcgagaccgccagcggcaacaaggtgagcagacagagcgtgctgtgcggcagccagaacatcgtgctgaacggcaagaacttcgtgatcagcgtgttcctgagcccctacatcagatgccacagcgcctgcagagacagaaagagaagcgacgagagcgtgagactgagcgtgaacaacagagagtggtggggcctggtgaactggagaatgtag

SEQ ID NO: 79801 - DNA, 1650 bp, synthetic construct
  misc_feature 1..1650: note = Description of Artificial Sequence: Synthetic coding sequence
  source 1..1650: mol_type = other DNA
atggagttcgccgagctgatcaagacccccagagtggacaacgtggtgctgcacagacccttctaccccgccgtggagggcaccctgtgcctgaccggccaccacctgatcctgagcagcagacaggacaacaccgaggagctgtggctgctgcacagcaacatcgacgccatcgacaagagattcgtgggcagcctgggcaccatcatcatcaagtgcaaggacttcagaatcatccagctggacatccccggcatggaggagtgcctgaacatcgccagcagcatcgaggccctgagcaccctggacagcatcaccctgatgtaccccttcttctacagacccatgttcgaggtgatcgaggacggctggcacagcttcctgcccgagcaggagttcgagctgtacagcagcgccaccagcgagtggagactgagctacgtgaacaaggagttcgccgtgtgccccagctacccccccatcgtgaccgtgcccaagagcatcgacgacgaggccctgagaaaggtggccaccttcagacacggcggcagattccccgtgctgagctactaccacaagaagaacggcatggtgatcatgagaagcggccagcccctgaccggcaccaacggcagaagatgcaaggaggacgagaagctgatcaacgccaccctgagagccggcaagagaggctacatcatcgacaccagaagcctgaacgtggcccagcagaccagagccaagggcggcggcttcgagcaggaggcccactacccccagtggagaagaatccacaagagcatcgagagataccacatcctgcaggagagcctgatcaagctggtggaggcctgcaacgaccagacccacaacatggacagatggctgagcaagctggaggccagcaactggctgacccacatcaaggagatcctgaccaccgcctgcctggccgcccagtgcatcgacagagagggcgccagcatcctgatccacggcaccgagggcaccgacagcaccctgcaggtgaccagcctggcccagatcatcctggagcccagaagcagaaccatcagaggcttcgaggccctgatcgagagagagtggctgcaggccggccaccccttccagcagagatgcgcccagagcgcctactgcaacaccaagcagaagtgggaggcccccgtgttcctgctgttcctggactgcgtgtggcagatcctgagacagttcccctgcagcttcgagttcaacgagaacttcctgatcatgctgttcgagcacgcctacgccagccagttcggcaccttcctgggcaacaacgagagcgagagatgcaagctgaagctgcagcagaagaccatgagcctgtggagctgggtgaaccagcccagcgagctgagcaagttcaccaaccccctgttcgaggccaacaacctggtgatctggcccagcgtggccccccagagcctgcccctgtgggagggcatcttcctgagatggaacagaagcagcaagtacctggacgaggcctacgaggagatggtgaacatcatcgagtacaacaaggagctgcaggccaaggtgaacatcctgagaagacagctggccgagctggagaccgaggacggcatgcaggagagcccctag

SEQ ID NO: 79802 - DNA, 2556 bp, synthetic construct
  misc_feature 1..2556: note = Description of Artificial Sequence: Synthetic coding sequence
  source 1..2556: mol_type = other DNA
atgggcaacagaggcatggaggacctgatccccctggtgaacagactgcaggacgccttcagcgccatcggccagaacgccgacctggacctgccccagatcgccgtggtgggcggccagagcgccggcaagagcagcgtgctggagaacttcgtgggcagagacttcctgcccagaggcagcggcatcgtgaccagaagacccctggtgctgcagctggtgaacgccaccaccgagtacgccgagttcctgcactgcaagggcaagaagttcaccgacttcgaggaggtgagactggagatcgaggccgagaccgacagagtgaccggcaccaacaagggcatcagccccgtgcccatcaacctgagagtgtacagcccccacgtgctgaacctgaccctggtggacctgcccggcatgaccaaggtgcccgtgggcgaccagccccccgacatcgagttccagatcagagacatgctgatgcagttcgtgaccaaggagaactgcctgatcctggccgtgagccccgccaacagcgacctggccaacagcgacgccctgaaggtggccaaggaggtggacccccagggccagagaaccatcggcgtgatcaccaagctggacctgatggacgagggcaccgacgccagagacgtgctggagaacaagctgctgcccctgagaagaggctacatcggcgtggtgaacagaagccagaaggacatcgacggcaagaaggacatcaccgccgccctggccgccgagagaaagttcttcctgagccaccccagctacagacacctggccgacagaatgggcaccccctacctgcagaaggtgctgaaccagcagctgaccaaccacatcagagacaccctgcccggcctgagaaacaagctgcagagccagctgctgagcatcgagaaggaggtggaggagtacaagaacttcagacccgacgaccccgccagaaagaccaaggccctgctgcagatggtgcagcagttcgccgtggacttcgagaagagaatcgagggcagcggcgaccagatcgacacctacgagctgagcggcggcgccagaatcaacagaatcttccacgagagattccccttcgagctggtgaagatggagttcgacgagaaggagctgagaagagagatcagctacgccatcaagaacatccacggcatcagaaccggcctgttcacccccgacatggccttcgagaccatcgtgaagaagcaggtgaagaagatcagagagccctgcctgaagtgcgtggacatggtgatcagcgagctgatcagcaccgtgagacagtgcaccaagaagctgcagcagtaccccagactgagagaggagatggagagaatcgtgaccacccacatcagagagagagagggcagaaccaaggagcaggtgatgctgctgatcgacatcgagctggcctacatgaacaccaaccacgaggacttcatcggcttcgccaacgcccagcagagaagcaaccagatgaacaagaagaagaccagcggcaaccaggacgagatcctggtgatcagaaagggctggctgaccatcaacaacatcggcatcatgaagggcggcagcaaggagtactggttcgtgctgaccgccgagaacctgagctggtacaaggacgacgaggagaaggagaagaagtacatgctgagcgtggacaacctgaagctgagagacgtggagaagggcttcatgagcagcaagcacatcttcgccctgttcaacaccgagcagagaaacgtgtacaaggactacagacagctggagctggcctgcgagacccaggaggaggtggacagctggaaggccagcttcctgagagccggcgtgtaccccgagagagtgggcgacaaggagaaggccagcgagaccgaggagaacggcagcgacagcttcatgcacagcatggacccccagctggagagacaggtggagaccatcagaaacctggtggacagctacatggccatcgtgaacaagaccgtgagagacctgatgcccaagaccatcatgcacctgatgatcaacaacaccaaggagttcatcttcagcgagctgctggccaacctgtacagctgcggcgaccagaacaccctgatggaggagagcgccgagcaggcccagagaagagacgagatgctgagaatgtaccacgccctgaaggaggccctgagcatcatcggcgacatcaacaccaccaccgtgagcacccccatgcccccccccgtggacgacagctggctgcaggtgcagagcgtgcccgccggcagaagaagccccaccagcagccccaccccccagagaagagcccccgccgtgccccccgccagacccggcagcagaggccccgcccccggccccccccccgccggcagcgccctgggcggcgccccccccgtgcccagcagacccggcgccagccccgaccccttcggcccccccccccaggtgcccagcagacccaacagagccccccccggcgtgcccagaatcaccatcagcgacccctag

SEQ ID NO: 79803 - DNA, 2595 bp, synthetic construct
  misc_feature 1..2595: note = Description of Artificial Sequence: Synthetic coding sequence
  source 1..2595: mol_type = other DNA
atgggcaacagaggcatggaggacctgatccccctggtgaacagactgcaggacgccttcagcgccatcggccagaacgccgacctggacctgccccagatcgccgtggtgggcggccagagcgccggcaagagcagcgtgctggagaacttcgtgggcagagacttcctgcccagaggcagcggcatcgtgaccagaagacccctggtgctgcagctggtgaacgccaccaccgagtacgccgagttcctgcactgcaagggcaagaagttcaccgacttcgaggaggtgagactggagatcgaggccgagaccgacagagtgaccggcaccaacaagggcatcagccccgtgcccatcaacctgagagtgtacagcccccacgtgctgaacctgaccctggtggacctgcccggcatgaccaaggtgcccgtgggcgaccagccccccgacatcgagttccagatcagagacatgctgatgcagttcgtgaccaaggagaactgcctgatcctggccgtgagccccgccaacagcgacctggccaacagcgacgccctgaaggtggccaaggaggtggacccccagggccagagaaccatcggcgtgatcaccaagctggacctgatggacgagggcaccgacgccagagacgtgctggagaacaagctgctgcccctgagaagaggctacatcggcgtggtgaacagaagccagaaggacatcgacggcaagaaggacatcaccgccgccctggccgccgagagaaagttcttcctgagccaccccagctacagacacctggccgacagaatgggcaccccctacctgcagaaggtgctgaaccagcagctgaccaaccacatcagagacaccctgcccggcctgagaaacaagctgcagagccagctgctgagcatcgagaaggaggtggaggagtacaagaacttcagacccgacgaccccgccagaaagaccaaggccctgctgcagatggtgcagcagttcgccgtggacttcgagaagagaatcgagggcagcggcgaccagatcgacacctacgagctgagcggcggcgccagaatcaacagaatcttccacgagagattccccttcgagctggtgaagatggagttcgacgagaaggagctgagaagagagatcagctacgccatcaagaacatccacggcatcagaaccggcctgttcacccccgacatggccttcgagaccatcgtgaagaagcaggtgaagaagatcagagagccctgcctgaagtgcgtggacatggtgatcagcgagctgatcagcaccgtgagacagtgcaccaagaagctgcagcagtaccccagactgagagaggagatggagagaatcgtgaccacccacatcagagagagagagggcagaaccaaggagcaggtgatgctgctgatcgacatcgagctggcctacatgaacaccaaccacgaggacttcatcggcttcgccaacgcccagcagagaagcaaccagatgaacaagaagaagaccagcggcaaccaggacgagatcctggtgatcagaaagggctggctgaccatcaacaacatcggcatcatgaagggcggcagcaaggagtactggttcgtgctgaccgccgagaacctgagctggtacaaggacgacgaggagaaggagaagaagtacatgctgagcgtggacaacctgaagctgagagacgtggagaagggcttcatgagcagcaagcacatcttcgccctgttcaacaccgagcagagaaacgtgtacaaggactacagacagctggagctggcctgcgagacccaggaggaggtggacagctggaaggccagcttcctgagagccggcgtgtaccccgagagagtgggcgacaaggagaaggccagcgagaccgaggagaacggcagcgacagcttcatgcacagcatggacccccagctggagagacaggtggagaccatcagaaacctggtggacagctacatggccatcgtgaacaagaccgtgagagacctgatgcccaagaccatcatgcacctgatgatcaacaacaccaaggagttcatcttcagcgagctgctggccaacctgtacagctgcggcgaccagaacaccctgatggaggagagcgccgagcaggcccagagaagagacgagatgctgagaatgtaccacgccctgaaggaggccctgagcatcatcggcgacatcaacaccaccaccgtgagcacccccatgcccccccccgtggacgacagctggctgcaggtgcagagcgtgcccgccggcagaagaagccccaccagcagccccaccccccagagaagagcccccgccgtgccccccgccagacccggcagcagaggccccgcccccggccccccccccgccggcagcgccctgggcggcgccccccccgtgcccagcagacccggcgccagccccgaccccttcggcccccccccccaggtgcccagcagacccaacagagccccccccggcgtgcccagcagaagcggccaggccagccccagcagacccgagagccccagaccccccttcgacctgtag

SEQ ID NO: 79804 - DNA, 1989 bp, synthetic construct
  misc_feature 1..1989: note = Description of Artificial Sequence: Synthetic coding sequence
  source 1..1989: mol_type = other DNA
atggaggacctgatccccctggtgaacagactgcaggacgccttcagcgccatcggccagaacgccgacctggacctgccccagatcgccgtggtgggcggccagagcgccggcaagagcagcgtgctggagaacttcgtgggcagagacttcctgcccagaggcagcggcatcgtgaccagaagacccctggtgctgcagctggtgaacgccaccaccgagtacgccgagttcctgcactgcaagggcaagaagttcaccgacttcgaggaggtgagactggagatcgaggccgagaccgacagagtgaccggcaccaacaagggcatcagccccgtgcccatcaacctgagagtgtacagcccccacgtgctgaacctgaccctggtggacctgcccggcatgaccaaggtgcccgtgggcgaccagccccccgacatcgagttccagatcagagacatgctgatgcagttcgtgaccaaggagaactgcctgatcctggccgtgagccccgccaacagcgacctggccaacagcgacgccctgaaggtggccaaggaggtggacccccagggccagagaaccatcggcgtgatcaccaagctggacctgatggacgagggcaccgacgccagagacgtgctggagaacaagctgctgcccctgagaagaggctacatcggcgtggtgaacagaagccagaaggacatcgacggcaagaaggacatcaccgccgccctggccgccgagagaaagttcttcctgagccaccccagctacagacacctggccgacagaatgggcaccccctacctgcagaaggtgctgaaccagcagctgaccaaccacatcagagacaccctgcccggcctgagaaacaagctgcagagccagctgctgagcatcgagaaggaggtggaggagtacaagaacttcagacccgacgaccccgccagaaagaccaaggccctgctgcagatggtgcagcagttcgccgtggacttcgagaagagaatcgagggcagcggcgaccagatcgacacctacgagctgagcggcggcgccagaatcaacagaatcttccacgagagattccccttcgagctggtgaagatggagttcgacgagaaggagctgagaagagagatcagctacgccatcaagaacatccacggcatcagaaccggcctgttcacccccgacatggccttcgagaccatcgtgaagaagcaggtgaagaagatcagagagccctgcctgaagtgcgtggacatggtgatcagcgagctgatcagcaccgtgagacagtgcaccaagaagctgcagcagtaccccagactgagagaggagatggagagaatcgtgaccacccacatcagagagagagagggcagaaccaaggagcaggtgatgctgctgatcgacatcgagctggcctacatgaacaccaaccacgaggacttcatcggcttcgccaacgcccagcagagaagcaaccagatgaacaagaagaagaccagcggcaaccagatcaccctgcaggtgatcagaaagggctggctgaccatcaacaacatcggcatcatgaagggcggcagcaaggagtactggttcgtgctgaccgccgagaacctgagctggtacaaggacgacgaggagaaggagaagaagtacatgctgagcgtggacaacctgaagctgagagacgtggagaagggcttcatgagcagcaagcacatcttcgccctgttcaacaccgagcagagaaacgtgtacaaggactacagacagctggagctggcctgcgagacccaggaggaggtggacagctggaaggccagcttcctgagagccggcgtgtaccccgagagagtgggcgacaaggagaaggtgagcgtgcccttcagctgcctgctgcccggcatctgcagcctggcccccgcccccgccagattcagcagcaagggccccggcgacgtgctgttctag

SEQ ID NO: 79805 - DNA, 2556 bp, synthetic construct
  misc_feature 1..2556: note = Description of Artificial Sequence: Synthetic coding sequence
  source 1..2556: mol_type = other DNA
atgggcaacagaggcatggaggacctgatccccctggtgaacagactgcaggacgccttcagcgccatcggccagaacgccgacctggacctgccccagatcgccgtggtgggcggccagagcgccggcaagagcagcgtgctggagaacttcgtgggcagagacttcctgcccagaggcagcggcatcgtgaccagaagacccctggtgctgcagctggtgaacgccaccaccgagtacgccgagttcctgcactgcaagggcaagaagttcaccgacttcgaggaggtgagactggagatcgaggccgagaccgacagagtgaccggcaccaacaagggcatcagccccgtgcccatcaacctgagagtgtacagcccccacgtgctgaacctgaccctggtggacctgcccggcatgaccaaggtgcccgtgggcgaccagccccccgacatcgagttccagatcagagacatgctgatgcagttcgtgaccaaggagaactgcctgatcctggccgtgagccccgccaacagcgacctggccaacagcgacgccctgaaggtggccaaggaggtggacccccagggccagagaaccatcggcgtgatcaccaagctggacctgatggacgagggcaccgacgccagagacgtgctggagaacaagctgctgcccctgagaagaggctacatcggcgtggtgaacagaagccagaaggacatcgacggcaagaaggacatcaccgccgccctggccgccgagagaaagttcttcctgagccaccccagctacagacacctggccgacagaatgggcaccccctacctgcagaaggtgctgaaccagcagctgaccaaccacatcagagacaccctgcccggcctgagaaacaagctgcagagccagctgctgagcatcgagaaggaggtggaggagtacaagaacttcagacccgacgaccccgccagaaagaccaaggccctgctgcagatggtgcagcagttcgccgtggacttcgagaagagaatcgagggcagcggcgaccagatcgacacctacgagctgagcggcggcgccagaatcaacagaatcttccacgagagattccccttcgagctggtgaagatggagttcgacgagaaggagctgagaagagagatcagctacgccatcaagaacatccacggcatcagaaccggcctgttcacccccgacctggccttcgaggccaccgtgaagaagcaggtgcagaagctgaaggagcccagcatcaagtgcgtggacatggtggtgagcgagctgaccgccaccatcagaaagtgcagcgagaagctgcagcagtaccccagactgagagaggagatggagagaatcgtgaccacccacatcagagagagagagggcagaaccaaggagcaggtgatgctgctgatcgacatcgagctggcctacatgaacaccaaccacgaggacttcatcggcttcgccaacgcccagcagagaagcaaccagatgaacaagaagaagaccagcggcaaccaggacgagatcctggtgatcagaaagggctggctgaccatcaacaacatcggcatcatgaagggcggcagcaaggagtactggttcgtgctgaccgccgagaacctgagctggtacaaggacgacgaggagaaggagaagaagtacatgctgagcgtggacaacctgaagctgagagacgtggagaagggcttcatgagcagcaagcacatcttcgccctgttcaacaccgagcagagaaacgtgtacaaggactacagacagctggagctggcctgcgagacccaggaggaggtggacagctggaaggccagcttcctgagagccggcgtgtaccccgagagagtgggcgacaaggagaaggccagcgagaccgaggagaacggcagcgacagcttcatgcacagcatggacccccagctggagagacaggtggagaccatcagaaacctggtggacagctacatggccatcgtgaacaagaccgtgagagacctgatgcccaagaccatcatgcacctgatgatcaacaacaccaaggagttcatcttcagcgagctgctggccaacctgtacagctgcggcgaccagaacaccctgatggaggagagcgccgagcaggcccagagaagagacgagatgctgagaatgtaccacgccctgaaggaggccctgagcatcatcggcgacatcaacaccaccaccgtgagcacccccatgcccccccccgtggacgacagctggctgcaggtgcagagcgtgcccgccggcagaagaagccccaccagcagccccaccccccagagaagagcccccgccgtgccccccgccagacccggcagcagaggccccgcccccggccccccccccgccggcagcgccctgggcggcgccccccccgtgcccagcagacccggcgccagccccgaccccttcggcccccccccccaggtgcccagcagacccaacagagccccccccggcgtgcccagaatcaccatcagcgacccctag

SEQ ID NO: 79806 - DNA, 2556 bp, synthetic construct; identical to SEQ ID NO: 79805
  misc_feature 1..2556: note = Description of Artificial Sequence: Synthetic coding sequence
  source 1..2556: mol_type = other DNA

SEQ ID NO: 79807 - DNA, 2595 bp, synthetic construct
  misc_feature 1..2595: note = Description of Artificial Sequence: Synthetic coding sequence
  source 1..2595: mol_type = other DNA
atgggcaacagaggcatggaggacctgatccccctggtgaacagactgcaggacgccttcagcgccatcggccagaacgccgacctggacctgccccagatcgccgtggtgggcggccagagcgccggcaagagcagcgtgctggagaacttcgtgggcagagacttcctgcccagaggcagcggcatcgtgaccagaagacccctggtgctgcagctggtgaacgccaccaccgagtacgccgagttcctgcactgcaagggcaagaagttcaccgacttcgaggaggtgagactggagatcgaggccgagaccgacagagtgaccggcaccaacaagggcatcagccccgtgcccatcaacctgagagtgtacagcccccacgtgctgaacctgaccctggtggacctgcccggcatgaccaaggtgcccgtgggcgaccagccccccgacatcgagttccagatcagagacatgctgatgcagttcgtgaccaaggagaactgcctgatcctggccgtgagccccgccaacagcgacctggccaacagcgacgccctgaaggtggccaaggaggtggacccccagggccagagaaccatcggcgtgatcaccaagctggacctgatggacgagggcaccgacgccagagacgtgctggagaacaagctgctgcccctgagaagaggctacatcggcgtggtgaacagaagccagaaggacatcgacggcaagaaggacatcaccgccgccctggccgccgagagaaagttcttcctgagccaccccagctacagacacctggccgacagaatgggcaccccctacctgcagaaggtgctgaaccagcagctgaccaaccacatcagagacaccctgcccggcctgagaaacaagctgcagagccagctgctgagcatcgagaaggaggtggaggagtacaagaacttcagacccgacgaccccgccagaaagaccaaggccctgctgcagatggtgcagcagttcgccgtggacttcgagaagagaatcgagggcagcggcgaccagatcgacacctacgagctgagcggcggcgccagaatcaacagaatcttccacgagagattccccttcgagctggtgaagatggagttcgacgagaaggagctgagaagagagatcagctacgccatcaagaacatccacggcatcagaaccggcctgttcacccccgacctggccttcgaggccaccgtgaagaagcaggtgcagaagctgaaggagcccagcatcaagtgcgtggacatggtggtgagcgagctgaccgccaccatcagaaagtgcagcgagaagctgcagcagtaccccagactgagagaggagatggagagaatcgtgaccacccacatcagagagagagagggcagaaccaaggagcaggtgatgctgctgatcgacatcgagctggcctacatgaacaccaaccacgaggacttcatcggcttcgccaacgcccagcagagaagcaaccagatgaacaagaagaagaccagcggcaaccaggacgagatcctggtgatcagaaagggctggctgaccatcaacaacatcggcatcatgaagggcggcagcaaggagtactggttcgtgctgaccgccgagaacctgagctggtacaaggacgacgaggagaaggagaagaagtacatgctgagcgtggacaacctgaagctgagagacgtggagaagggcttcatgagcagcaagcacatcttcgccctgttcaacaccgagcagagaaacgtgtacaaggactacagacagctggagctggcctgcgagacccaggaggaggtggacagctggaaggccagcttcctgagagccggcgtgtaccccgagagagtgggcgacaaggagaaggccagcgagaccgaggagaacggcagcgacagcttcatgcacagcatggacccccagctggagagacaggtggagaccatcagaaacctggtggacagctacatggccatcgtgaacaagaccgtgagagacctgatgcccaagaccatcatgcacctgatgatcaacaacaccaaggagttcatcttcagcgagctgctggccaacctgtacagctgcggcgaccagaacaccctgatggaggagagcgccgagcaggcccagagaagagacgagatgctgagaatgtaccacgccctgaaggaggccctgagcatcatcggcgacatcaacaccaccaccgtgagcacccccatgcccccccccgtggacgacagctggctgcaggtgcagagcgtgcccgccggcagaagaagccccaccagcagccccaccccccagagaagagcccccgccgtgccccccgccagacccggcagcagaggccccgcccccggccccccccccgccggcagcgccctgggcggcgccccccccgtgcccagcagacccggcgccagccccgaccccttcggcccccccccccaggtgcccagcagacccaacagagccccccccggcgtgcccagcagaagcggccaggccagccccagcagacccgagagccccagaccccccttcgacctgtag

SEQ ID NO: 79808 - DNA, 1191 bp, synthetic construct
  misc_feature 1..1191: note = Description of Artificial Sequence: Synthetic coding sequence
  source 1..1191: mol_type = other DNA
atggagagaatcgtgaccacccacatcagagagagagagggcagaaccaaggagcaggtgatgctgctgatcgacatcgagctggcctacatgaacaccaaccacgaggacttcatcggcttcgccaacgcccagcagagaagcaaccagatgaacaagaagaagaccagcggcaaccaggacgagatcctggtgatcagaaagggctggctgaccatcaacaacatcggcatcatgaagggcggcagcaaggagtactggttcgtgctgaccgccgagaacctgagctggtacaaggacgacgaggagaaggagaagaagtacatgctgagcgtggacaacctgaagctgagagacgtggagaagggcttcatgagcagcaagcacatcttcgccctgttcaacaccgagcagagaaacgtgtacaaggactacagacagctggagctggcctgcgagacccaggaggaggtggacagctggaaggccagcttcctgagagccggcgtgtaccccgagagagtgggcgacaaggagaaggccagcgagaccgaggagaacggcagcgacagcttcatgcacagcatggacccccagctggagagacaggtggagaccatcagaaacctggtggacagctacatggccatcgtgaacaagaccgtgagagacctgatgcccaagaccatcatgcacctgatgatcaacaacaccaaggagttcatcttcagcgagctgctggccaacctgtacagctgcggcgaccagaacaccctgatggaggagagcgccgagcaggcccagagaagagacgagatgctgagaatgtaccacgccctgaaggaggccctgagcatcatcggcgacatcaacaccaccaccgtgagcacccccatgcccccccccgtggacgacagctggctgcaggtgcagagcgtgcccgccggcagaagaagccccaccagcagccccaccccccagagaagagcccccgccgtgccccccgccagacccggcagcagaggccccgcccccggccccccccccgccggcagcgccctgggcggcgccccccccgtgcccagcagacccggcgccagccccgaccccttcggcccccccccccaggtgcccagcagacccaacagagccccccccggcgtgcccagaatcaccatcagcgacccctag

SEQ ID NO: 79809 - DNA, 1728 bp, synthetic construct
  misc_feature 1..1728: note = Description of Artificial Sequence: Synthetic coding sequence
  source 1..1728: mol_type = other DNA
atggaggccctgatccccgtgatcaacaagctgcaggacgtgttcaacaccgtgggcgccgacatcatccagctgccccagatcgtggtggtgggcacccagagcagcggcaagagcagcgtgctggagagcctggtgggcagagacctgctgcccagaggcaccggcatcgtgaccagaagacccctgatcctgcagctggtgcacgtgagccaggaggacaagagaaagaccaccggcgaggagaacggcgtggaggccgaggagtggggcaagttcctgcacaccaagaacaagctgtacaccgacttcgacgagatcagacaggagatcgagaacgagaccgagagaatcagcggcaacaacaagggcgtgagccccgagcccatccacctgaagatcttcagccccaacgtggtgaacctgaccctggtggacctgcccggcatgaccaaggtgcccgtgggcgaccagcccaaggacatcgagctgcagatcagagagctgatcctgagattcatcagcaaccccaacagcatcatcctggccgtgaccgccgccaacaccgacatggccaccagcgaggccctgaagatcagcagagaggtggaccccgacggcagaagaaccctggccgtgatcaccaagctggacctgatggacgccggcaccgacgccatggacgtgctgatgggcagagtgatccccgtgaagctgggcatcatcggcgtggtgaacagaagccagctggacatcaacaacaagaagagcgtgaccgacagcatcagagacgagtacgccttcctgcagaagaagtaccccagcctggccaacagaaacggcaccaagtacctggccagaaccctgaacagactgctgatgcaccacatcagagactgcctgcccgagctgaagaccagaatcaacgtgctggccgcccagtaccagagcctgctgaacagctacggcgagcccgtggacgacaagagcgccaccctgctgcagctgatcaccaagttcgccaccgagtactgcaacaccatcgagggcaccgccaagtacatcgagaccagcgagctgtgcggcggcgccagaatctgctacatcttccacgagaccttcggcagaaccctggagagcgtggaccccctgggcggcctgaacaccatcgacatcctgaccgccatcagaaacgccaccggccccagacccgccctgttcgtgcccgaggtgagcttcgagctgctggtgaagagacagatcaagagactggaggagcccagcctgagatgcgtggagctggtgcacgaggagatgcagagaatcatccagcactgcagcaactacagcacccaggagctgctgagattccccaagctgcacgacgccatcgtggaggtggtgacctgcctgctgagaaagagactgcccgtgaccaacgagatggtgcacaacctggtggccatcgagctggcctacatcaacaccaagcaccccgacttcgccgacgcctgcggcctgatgaacaacaacatcgaggagcagagaagaaacagactggccagagagctgcccagcgccgtgagcagagacaaggtggccagcggcggcggcggcgtgggcgacggcgtgcaggagcccaccaccggcaactggagaggcatgctgaagaccagcaaggccgaggagctgctggccgagaagaagaagaagaagaagaagaagtag

SEQ ID NO: 79810 - DNA, 2100 bp, synthetic construct
  misc_feature 1..2100: note = Description of Artificial Sequence: Synthetic coding sequence
  source 1..2100: mol_type = other DNA
atggaggccctgatccccgtgatcaacaagctgcaggacgtgttcaacaccgtgggcgccgacatcatccagctgccccagatcgtggtggtgggcacccagagcagcggcaagagcagcgtgctggagagcctggtgggcagagacctgctgcccagaggcaccggcatcgtgaccagaagacccctgatcctgcagctggtgcacgtgagccaggaggacaagagaaagaccaccggcgaggagaacggcgtggaggccgaggagtggggcaagttcctgcacaccaagaacaagctgtacaccgacttcgacgagatcagacaggagatcgagaacgagaccgagagaatcagcggcaacaacaagggcgtgagccccgagcccatccacctgaagatcttcagccccaacgtggtgaacctgaccctggtggacctgcccggcatgaccaaggtgcccgtgggcgaccagcccaaggacatcgagctgcagatcagagagctgatcctgagattcatcagcaaccccaacagcatcatcctggccgtgaccgccgccaacaccgacatggccaccagcgaggccctgaagatcagcagagaggtggaccccgacggcagaagaaccctggccgtgatcaccaagctggacctgatggacgccggcaccgacgccatggacgtgctgatgggcagagtgatccccgtgaagctgggcatcatcggcgtggtgaacagaagccagctggacatcaacaacaagaagagcgtgaccgacagcatcagagacgagtacgccttcctgcagaagaagtaccccagcctggccaacagaaacggcaccaagtacctggccagaaccctgaacagactgctgatgcaccacatcagagactgcctgcccgagctgaagaccagaatcaacgtgctggccgcccagtaccagagcctgctgaacagctacggcgagcccgtggacgacaagagcgccaccctgctgcagctgatcaccaagttcgccaccgagtactgcaacaccatcgagggcaccgccaagtacatcgagaccagcgagctgtgcggcggcgccagaatctgctacatcttccacgagaccttcggcagaaccctggagagcgtggaccccctgggcggcctgaacaccatcgacatcctgaccgccatcagaaacgccaccggccccagacccgccctgttcgtgcccgaggtgagcttcgagctgctggtgaagagacagatcaagagactggaggagcccagcctgagatgcgtggagctggtgcacgaggagatgcagagaatcatccagcactgcagcaactacagcacccaggagctgctgagattccccaagctgcacgacgccatcgtggaggtggtgacctgcctgctgagaaagagactgcccgtgaccaacgagatggtgcacaacctggtggccatcgagctggcctacatcaacaccaagcaccccgacttcgccgacgcctgcggcctgatgaacaacaacatcgaggagcagagaagaaacagactggccagagagctgcccagcgccgtgagcagagacaaggtggccagcggcggcggcggcgtgggcgacggcgtgcaggagcccaccaccggcaactggagaggcatgctgaagaccagcaaggccgaggagctgctggccgaggagaagagcaagcccatccccatcatgcccgccagcccccagaagggccacgccgtgaacctgctggacgtgcccgtgcccgtggccagaaagctgagcgccagagagcagagagactgcgaggtgatcgagagactgatcaagagctacttcctgatcgtgagaaagaacatccaggacagcgtgcccaaggccgtgatgcacttcctggtgaaccacgtgaaggacaccctgcagagcgagctggtgggccagctgtacaagagcagcctgctggacgacctgctgaccgagagcgaggacatggcccagagaagaaaggaggccgccgacatgctgaaggccctgcagggcgccagccagatcatcgccgagatcagagagacccacctgtggtag

SEQ ID NO: 79811 - DNA, 2376 bp, synthetic construct
  misc_feature 1..2376: note = Description of Artificial Sequence: Synthetic coding sequence
  source 1..2376: mol_type = other DNA
atggcctgcagagagggcgccggcagcagaagagccagaagcaacggctgcagactgcccagaagaggcagaagaagaggcggcagaagaagaaccgtgggccccggccccatccactgcagaggcagaagagccctgggccccagagtgttcagagtgatggaggccctgatccccgtgatcaacaagctgcaggacgtgttcaacaccgtgggcgccgacatcatccagctgccccagatcgtggtggtgggcacccagagcagcggcaagagcagcgtgctggagagcctggtgggcagagacctgctgcccagaggcaccggcatcgtgaccagaagacccctgatcctgcagctggtgcacgtgagccaggaggacaagagaaagaccaccggcgaggagaacgaccccgccacctggaagaacagcagacacctgagcaagggcgtggaggccgaggagtggggcaagttcctgcacaccaagaacaagctgtacaccgacttcgacgagatcagacaggagatcgagaacgagaccgagagaatcagcggcaacaacaagggcgtgagccccgagcccatccacctgaagatcttcagccccaacgtggtgaacctgaccctggtggacctgcccggcatgaccaaggtgcccgtgggcgaccagcccaaggacatcgagctgcagatcagagagctgatcctgagattcatcagcaaccccaacagcatcatcctggccgtgaccgccgccaacaccgacatggccaccagcgaggccctgaagatcagcagagaggtggaccccgacggcagaagaaccctggccgtgatcaccaagctggacctgatggacgccggcaccgacgccatggacgtgctgatgggcagagtgatccccgtgaagctgggcatcatcggcgtggtgaacagaagccagctggacatcaacaacaagaagagcgtgaccgacagcatcagagacgagtacgccttcctgcagaagaagtaccccagcctggccaacagaaacggcaccaagtacctggccagaaccctgaacagactgctgatgcaccacatcagagactgcctgcccgagctgaagaccagaatcaacgtgctggccgcccagtaccagagcctgctgaacagctacggcgagcccgtggacgacaagagcgccaccctgctgcagctgatcaccaagttcgccaccgagtactgcaacaccatcgagggcaccgccaagtacatcgagaccagcgagctgtgcggcggcgccagaatctgctacatcttccacgagaccttcggcagaaccctggagagcgtggaccccctgggcggcctgaacaccatcgacatcctgaccgccatcagaaacgccaccggccccagacccgccctgttcgtgcccgaggtgagcttcgagctgctggtgaagagacagatcaagagactggaggagcccagcctgagatgcgtggagctggtgcacgaggagatgcagagaatcatccagcactgcagcaactacagcacccaggagctgctgagattccccaagctgcacgacgccatcgtggaggtggtgacctgcctgctgagaaagagactgcccgtgaccaacgagatggtgcacaacctggtggccatcgagctggcctacatcaacaccaagcaccccgacttcgccgacgcctgcggcctgatgaacaacaacatcgaggagcagagaagaaacagactggccagagagctgcccagcgccgtgagcagagacaagagcagcaaggtgcccagcgccctggcccccgccagccaggagcccagccccgccgccagcgccgaggccgacggcaaggtggccagcggcggcggcggcgtgggcgacggcgtgcaggagcccaccaccggcaactggagaggcatgctgaagaccagcaaggccgaggagctgctggccgaggagaagagcaagcccatccccatcatgcccgccagcccccagaagggccacgccgtgaacctgctggacgtgcccgtgcccgtggccagaaagctgagcgccagagagcagagagactgcgaggtgatcgagagactgatcaagagctacttcctgatcgtgagaaagaacatccaggacagcgtgcccaaggccgtgatgcacttcctggtgaaccacgtgaaggacaccctgcagagcgagctggtgggccagctgtacaagagcagcctgctggacgacctgctgaccgagagcgaggacatggcccagagaagaaaggaggccgccgacatgctgaaggccctgcagggcgccagccagatcatcgccgagatcagagagacccacctgtggtag

SEQ ID NO: 79812 - DNA, 1602 bp, synthetic construct
  misc_feature 1..1602: note = Description of Artificial Sequence: Synthetic coding sequence
  source 1..1602: mol_type = other DNA
atgttccacaagaagatcaacggcaagcagcaggagaagaagatgaccctgctgcacggcaagacccaggacaccttcctgaagggctggaagcagaagaacggcgtgaacttcttcacccccaagatcagaagccagctggacatcaacaacaagaagagcgtgaccgacagcatcagagacgagtacgccttcctgcagaagaagtaccccagcctggccaacagaaacggcaccaagtacctggccagaaccctgaacagactgctgatgcaccacatcagagactgcctgcccgagctgaagaccagaatcaacgtgctggccgcccagtaccagagcctgctgaacagctacggcgagcccgtggacgacaagagcgccaccctgctgcagctgatcaccaagttcgccaccgagtactgcaacaccatcgagggcaccgccaagtacatcgagaccagcgagctgtgcggcggcgccagaatctgctacatcttccacgagaccttcggcagaaccctggagagcgtggaccccctgggcggcctgaacaccatcgacatcctgaccgccatcagaaacgccaccggccccagacccgccctgttcgtgcccgaggtgagcttcgagctgctggtgaagagacagatcaagagactggaggagcccagcctgagatgcgtggagctggtgcacgaggagatgcagagaatcatccagcactgcagcaactacagcacccaggagctgctgagattccccaagctgcacgacgccatcgtggaggtggtgacctgcctgctgagaaagagactgcccgtgaccaacgagatggtgcacaacctggtggccatcgagctggcctacatcaacaccaagcaccccgacttcgccgacgcctgcggcctgatgaacaacaacatcgaggagcagagaagaaacagactggccagagagctgcccagcgccgtgagcagagacaagagcagcaaggtgcccagcgccctggcccccgccagccaggagcccagccccgccgccagcgccgaggccgacggcaagctgatccaggacagcagaagagagaccaagaacgtggccagcggcggcggcggcgtgggcgacggcgtgcaggagcccaccaccggcaactggagaggcatgctgaagaccagcaaggccgaggagctgctggccgaggagaagagcaagcccatccccatcatgcccgccagcccccagaagggccacgccgtgaacctgctggacgtgcccgtgcccgtggccagaaagctgagcgccagagagcagagagactgcgaggtgatcgagagactgatcaagagctacttcctgatcgtgagaaagaacatccaggacagcgtgcccaaggccgtgatgcacttcctggtgaaccacgtgaaggacaccctgcagagcgagctggtgggccagctgtacaagagcagcctgctggacgacctgctgaccgagagcgaggacatggcccagagaagaaaggaggccgccgacatgctgaaggccctgcagggcgccagccagatcatcgccgagatcagagagacccacctgtggtag

SEQ ID NO: 79813 - DNA, 2133 bp, synthetic construct
  misc_feature 1..2133: note = Description of Artificial Sequence: Synthetic coding sequence
  source 1..2133: mol_type = other DNA
atggaggccctgatccccgtgatcaacaagctgcaggacgtgttcaacaccgtgggcgccgacatcatccagctgccccagatcgtggtggtgggcacccagagcagcggcaagagcagcgtgctggagagcctggtgggcagagacctgctgcccagaggcaccggcatcgtgaccagaagacccctgatcctgcagctggtgcacgtgagccaggaggacaagagaaagaccaccggcgaggagaacggcgtggaggccgaggagtggggcaagttcctgcacaccaagaacaagctgtacaccgacttcgacgagatcagacaggagatcgagaacgagaccgagagaatcagcggcaacaacaagggcgtgagccccgagcccatccacctgaagatcttcagccccaacgtggtgaacctgaccctggtggacctgcccggcatgaccaaggtgcccgtgggcgaccagcccaaggacatcgagctgcagatcagagagctgatcctgagattcatcagcaaccccaacagcatcatcctggccgtgaccgccgccaacaccgacatggccaccagcgaggccctgaagatcagcagagaggtggaccccgacggcagaagaaccctggccgtgatcaccaagctggacctgatggacgccggcaccgacgccatggacgtgctgatgggcagagtgatccccgtgaagctgggcatcatcggcgtggtgaacagaagccagctggacatcaacaacaagaagagcgtgaccgacagcatcagagacgagtacgccttcctgcagaagaagtaccccagcctggccaacagaaacggcaccaagtacctggccagaaccctgaacagactgctgatgcaccacatcagagactgcctgcccgagctgaagaccagaatcaacgtgctggccgcccagtaccagagcctgctgaacagctacggcgagcccgtggacgacaagagcgccaccctgctgcagctgatcaccaagttcgccaccgagtactgcaacaccatcgagggcaccgccaagtacatcgagaccagcgagctgtgcggcggcgccagaatctgctacatcttccacgagaccttcggcagaaccctggagagcgtggaccccctgggcggcctgaacaccatcgacatcctgaccgccatcagaaacgccaccggccccagacccgccctgttcgtgcccgaggtgagcttcgagctgctggtgaagagacagatcaagagactggaggagcccagcctgagatgcgtggagctggtgcacgaggagatgcagagaatcatccagcactgcagcaactacagcacccaggagctgctgagattccccaagctgcacgacgccatcgtggaggtggtgacctgcctgctgagaaagagactgcccgtgaccaacgagatggtgcacaacctggtggccatcgagctggcctacatcaacaccaagcaccccgacttcgccgacgcctgcggcctgatgaacaacaacatcgaggagcagagaagaaacagactggccagagagctgcccagcgccgtgagcagagacaagctgatccaggacagcagaagagagaccaagaacgtggccagcggcggcggcggcgtgggcgacggcgtgcaggagcccaccaccggcaactggagaggcatgctgaagaccagcaaggccgaggagctgctggccgaggagaagagcaagcccatccccatcatgcccgccagcccccagaagggccacgccgtgaacctgctggacgtgcccgtgcccgtggccagaaagctgagcgccagagagcagagagactgcgaggtgatcgagagactgatcaagagctacttcctgatcgtgagaaagaacatccaggacagcgtgcccaaggccgtgatgcacttcctggtgaaccacgtgaaggacaccctgcagagcgagctggtgggccagctgtacaagagcagcctgctggacgacctgctgaccgagagcgaggacatggcccagagaagaaaggaggccgccgacatgctgaaggccctgcagggcgccagccagatcatcgccgagatcagagagacccacctgtggtag

SEQ ID NO: 79814 - DNA, 2178 bp, synthetic construct
  misc_feature 1..2178: note = Description of Artificial Sequence: Synthetic coding sequence
  source 1..2178: mol_type = other DNA
atggaggccctgatccccgtgatcaacaagctgcaggacgtgttcaacaccgtgggcgccgacatcatccagctgccccagatcgtggtggtgggcacccagagcagcggcaagagcagcgtgctggagagcctggtgggcagagacctgctgcccagaggcaccggcatcgtgaccagaagacccctgatcctgcagctggtgcacgtgagccaggaggacaagagaaagaccaccggcgaggagaacggcgtggaggccgaggagtggggcaagttcctgcacaccaagaacaagctgtacaccgacttcgacgagatcagacaggagatcgagaacgagaccgagagaatcagcggcaacaacaagggcgtgagccccgagcccatccacctgaagatcttcagccccaacgtggtgaacctgaccctggtggacctgcccggcatgaccaaggtgcccgtgggcgaccagcccaaggacatcgagctgcagatcagagagctgatcctgagattcatcagcaaccccaacagcatcatcctggccgtgaccgccgccaacaccgacatggccaccagcgaggccctgaagatcagcagagaggtggaccccgacggcagaagaaccctggccgtgatcaccaagctggacctgatggacgccggcaccgacgccatggacgtgctgatgggcagagtgatccccgtgaagctgggcatcatcggcgtggtgaacagaagccagctggacatcaacaacaagaagagcgtgaccgacagcatcagagacgagtacgccttcctgcagaagaagtaccccagcctggccaacagaaacggcaccaagtacctggccagaaccctgaacagactgctgatgcaccacatcagagactgcctgcccgagctgaagaccagaatcaacgtgctggccgcccagtaccagagcctgctgaacagctacggcgagcccgtggacgacaagagcgccaccctgctgcagctgatcaccaagttcgccaccgagtactgcaacaccatcgagggcaccgccaagtacatcgagaccagcgagctgtgcggcggcgccagaatctgctacatcttccacgagaccttcggcagaaccctggagagcgtggaccccctgggcggcctgaacaccatcgacatcctgaccgccatcagaaacgccaccggccccagacccgccctgttcgtgcccgaggtgagcttcgagctgctggtgaagagacagatcaagagactggaggagcccagcctgagatgcgtggagctggtgcacgaggagatgcagagaatcatccagcactgcagcaactacagcacccaggagctgctgagattccccaagctgcacgacgccatcgtggaggtggtgacctgcctgctgagaaagagactgcccgtgaccaacgagatggtgcacaacctggtggccatcgagctggcctacatcaacaccaagcaccccgacttcgccgacgcctgcggcctgatgaacaacaacatcgaggagcagagaagaaacagactggccagagagctgcccagcgccgtgagcagagacaagagcagcaaggtgcccagcgccctggcccccgccagccaggagcccagccccgccgccagcgccgaggccgacggcaaggtggccagcggcggcggcggcgtgggcgacggcgtgcaggagcccaccaccggcaactggagaggcatgctgaagaccagcaaggccgaggagctgctggccgaggagaagagcaagcccatccccatcatgcccgccagcccccagaagggccacgccgtgaacctgctggacgtgcccgtgcccgtggccagaaagctgagcgccagagagcagagagactgcgaggtgatcgagagactgatcaagagctacttcctgatcgtgagaaagaacatccaggacagcgtgcccaaggccgtgatgcacttcctggtgaaccacgtgaaggacaccctgcagagcgagctggtgggccagctgtacaagagcagcctgctggacgacctgctgaccgagagcgaggacatggcccagagaagaaaggaggccgccgacatgctgaaggccctgcagggcgccagccagatcatcgccgagatcagagagacccacctgtggtag

SEQ ID NO: 79815 - DNA, 2211 bp, synthetic construct
  misc_feature 1..2211: note = Description of Artificial Sequence: Synthetic coding sequence
  source 1..2211: mol_type = other DNA
atggaggccctgatccccgtgatcaacaagctgcaggacgtgttcaacaccgtgggcgccgacatcatccagctgccccagatcgtggtggtgggcacccagagcagcggcaagagcagcgtgctggagagcctggtgggcagagacctgctgcccagaggcaccggcatcgtgaccagaagacccctgatcctgcagctggtgcacgtgagccaggaggacaagagaaagaccaccggcgaggagaacggcgtggaggccgaggagtggggcaagttcctgcacaccaagaacaagctgtacaccgacttcgacgagatcagacaggagatcgagaacgagaccgagagaatcagcggcaacaacaagggcgtgagccccgagcccatccacctgaagatcttcagccccaacgtggtgaacctgaccctggtggacctgcccggcatgaccaaggtgcccgtgggcgaccagcccaaggacatcgagctgcagatcagagagctgatcctgagattcatcagcaaccccaacagcatcatcctggccgtgaccgccgccaacaccgacatggccaccagcgaggccctgaagatcagcagagaggtggaccccgacggcagaagaaccctggccgtgatcaccaagctggacctgatggacgccggcaccgacgccatggacgtgctgatgggcagagtgatccccgtgaagctgggcatcatcggcgtggtgaacagaagccagctggacatcaacaacaagaagagcgtgaccgacagcatcagagacgagtacgccttcctgcagaagaagtaccccagcctggccaacagaaacggcaccaagtacctggccagaaccctgaacagactgctgatgcaccacatcagagactgcctgcccgagctgaagaccagaatcaacgtgctggccgcccagtaccagagcctgctgaacagctacggcgagcccgtggacgacaagagcgccaccctgctgcagctgatcaccaagttcgccaccgagtactgcaacaccatcgagggcaccgccaagtacatcgagaccagcgagctgtgcggcggcgccagaatctgctacatcttccacgagaccttcggcagaaccctggagagcgtggaccccctgggcggcctgaacaccatcgacatcctgaccgccatcagaaacgccaccggccccagacccgccctgttcgtgcccgaggtgagcttcgagctgctggtgaagagacagatcaagagactggaggagcccagcctgagatgcgtggagctggtgcacgaggagatgcagagaatcatccagcactgcagcaactacagcacccaggagctgctgagattccccaagctgcacgacgccatcgtggaggtggtgacctgcctgctgagaaagagactgcccgtgaccaacgagatggtgcacaacctggtggccatcgagctggcctacatcaacaccaagcaccccgacttcgccgacgcctgcggcctgatgaacaacaacatcgaggagcagagaagaaacagactggccagagagctgcccagcgccgtgagcagagacaagagcagcaaggtgcccagcgccctggcccccgccagccaggagcccagccccgccgccagcgccgaggccgacggcaagctgatccaggacagcagaagagagaccaagaacgtggccagcggcggcggcggcgtgggcgacggcgtgcaggagcccaccaccggcaactggagaggcatgctgaagaccagcaaggccgaggagctgctggccgaggagaagagcaagcccatccccatcatgcccgccagcccccagaagggccacgccgtgaacctgctggacgtgcccgtgcccgtggccagaaagctgagcgccagagagcagagagactgcgaggtgatcgagagactgatcaagagctacttcctgatcgtgagaaagaacatccaggacagcgtgcccaaggccgtgatgcacttcctggtgaaccacgtgaaggacaccctgcagagcgagctggtgggccagctgtacaagagcagcctgctggacgacctgctgaccgagagcgaggacatggcccagagaagaaaggaggccgccgacatgctgaaggccctgcagggcgccagccagatcatcgccgagatcagagagacccacctgtggtag

SEQ ID NO: 79816 - DNA, 2250 bp, synthetic construct
  misc_feature 1..2250: note = Description of Artificial Sequence: Synthetic coding sequence
  source 1..2250: mol_type = other DNA
atggaggccctgatccccgtgatcaacaagctgcaggacgtgttcaacaccgtgggcgccgacatcatccagctgccccagatcgtggtggtgggcacccagagcagcggcaagagcagcgtgctggagagcctggtgggcagagacctgctgcccagaggcaccggcatcgtgaccagaagacccctgatcctgcagctggtgcacgtgagccaggaggacaagagaaagaccaccggcgaggagaacgaccccgccacctggaagaacagcagacacctgagcaagggcgtggaggccgaggagtggggcaagttcctgcacaccaagaacaagctgtacaccgacttcgacgagatcagacaggagatcgagaacgagaccgagagaatcagcggcaacaacaagggcgtgagccccgagcccatccacctgaagatcttcagccccaacgtggtgaacctgaccctggtggacctgcccggcatgaccaaggtgcccgtgggcgaccagcccaaggacatcgagctgcagatcagagagctgatcctgagattcatcagcaaccccaacagcatcatcctggccgtgaccgccgccaacaccgacatggccaccagcgaggccctgaagatcagcagagaggtggaccccgacggcagaagaaccctggccgtgatcaccaagctggacctgatggacgccggcaccgacgccatggacgtgctgatgggcagagtgatccccgtgaagctgggcatcatcggcgtggtgaacagaagccagctggacatcaacaacaagaagagcgtgaccgacagcatcagagacgagtacgccttcctgcagaagaagtaccccagcctggccaacagaaacggcaccaagtacctggccagaaccctgaacagactgctgatgcaccacatcagagactgcctgcccgagctgaagaccagaatcaacgtgctggccgcccagtaccagagcctgctgaacagctacggcgagcccgtggacgacaagagcgccaccctgctgcagctgatcaccaagttcgccaccgagtactgcaacaccatcgagggcaccgccaagtacatcgagaccagcgagctgtgcggcggcgccagaatctgctacatcttccacgagaccttcggcagaaccctggagagcgtggaccccctgggcggcctgaacaccatcgacatcctgaccgccatcagaaacgccaccggccccagacccgccctgttcgtgcccgaggtgagcttcgagctgctggtgaagagacagatcaagagactggaggagcccagcctgagatgcgtggagctggtgcacgaggagatgcagagaatcatccagcactgcagcaactacagcacccaggagctgctgagattccccaagctgcacgacgccatcgtggaggtggtgacctgcctgctgagaaagagactgcccgtgaccaacgagatggtgcacaacctggtggccatcgagctggcctacatcaacaccaagcaccccgacttcgccgacgcctgcggcctgatgaacaacaacatcgaggagcagagaagaaacagactggccagagagctgcccagcgccgtgagcagagacaagagcagcaaggtgcccagcgccctggcccccgccagccaggagcccagccccgccgccagcgccgaggccgacggcaagctgatccaggacagcagaagagagaccaagaacgtggccagcggcggcggcggcgtgggcgacggcgtgcaggagcccaccaccggcaactggagaggcatgctgaagaccagcaaggccgaggagctgctggccgaggagaagagcaagcccatccccatcatgcccgccagcccccagaagggccacgccgtgaacctgctggacgtgcccgtgcccgtggccagaaagctgagcgccagagagcagagagactgcgaggtgatcgagagactgatcaagagctacttcctgatcgtgagaaagaacatccaggacagcgtgcccaaggccgtgatgcacttcctggtgaaccacgtgaaggacaccctgcagagcgagctggtgggccagctgtacaagagcagcctgctggacgacctgctgaccgagagcgaggacatggcccagagaagaaaggaggccgccgacatgctgaaggccctgcagggcgccagccagatcatcgccgagatcagagagacccacctgtggtag

SEQ ID NO: 79817 - DNA, 2613 bp, synthetic construct
  misc_feature 1..2613: note = Description of Artificial Sequence: Synthetic coding sequence
  source 1..2613: mol_type = other DNA
atgggcaacagaggcatggaggagctgatccccctggtgaacaagctgcaggacgccttcagcagcatcggccagagctgccacctggacctgccccagatcgccgtggtgggcggccagagcgccggcaagagcagcgtgctggagaacttcgtgggcagagacttcctgcccagaggcagcggcatcgtgaccagaagacccctgatcctgcagctgatcttcagcaagaccgagcacgccgagttcctgcactgcaagagcaagaagttcaccgacttcgacgaggtgagacaggagatcgaggccgagaccgacagagtgaccggcaccaacaagggcatcagccccgtgcccatcaacctgagagtgtacagcccccacgtgctgaacctgaccctgatcgacctgcccggcatcaccaaggtgcccgtgggcgaccagccccccgacatcgagtaccagatcaaggacatgatcctgcagttcatcagcagagagagcagcctgatcctggccgtgacccccgccaacatggacctggccaacagcgacgccctgaagctggccaaggaggtggacccccagggcctgagaaccatcggcgtgatcaccaagctggacctgatggacgagggcaccgacgccagagacgtgctggagaacaagctgctgcccctgagaagaggctacatcggcgtggtgaacagaagccagaaggacatcgagggcaagaaggacatcagagccgccctggccgccgagagaaagttcttcctgagccaccccgcctacagacacatggccgacagaatgggcaccccccacctgcagaagaccctgaaccagcagctgaccaaccacatcagagagagcctgcccgccctgagaagcaagctgcagagccagctgctgagcctggagaaggaggtggaggagtacaagaacttcagacccgacgaccccaccagaaagaccaaggccctgctgcagatggtgcagcagttcggcgtggacttcgagaagagaatcgagggcagcggcgaccaggtggacaccctggagctgagcggcggcgccagaatcaacagaatcttccacgagagattccccttcgagctggtgaagatggagttcgacgagaaggacctgagaagagagatcagctacgccatcaagaacatccacggcgtgagaaccggcctgttcacccccgacatggccttcgaggccatcgtgaagaagcagatcgtgaagctgaaggagcccagcctgaagtgcgtggacctggtggtgagcgagctggccaccgtgatcaagaagtgcgccgagaagctgagcagctaccccagactgagagaggagaccgagagaatcgtgaccacctacatcagagagagagagggcagaaccaaggaccagatcctgctgctgatcgacatcgagcagagctacatcaacaccaaccacgaggacttcatcggcttcgccaacgcccagcagagaagcacccagctgaacaagaagagagccatccccaaccagcccgagaccctggtgatcagaagaggctggctgaccatcaacaacatcagcctgatgaagggcggcagcaaggagtactggttcgtgctgaccgccgagagcctgagctggtacaaggacgaggaggagaaggagaagaagtacatgctgcccctggacaacctgaagatcagagacgtggagaagggcttcatgagcaacaagcacgtgttcgccatcttcaacaccgagcagagaaacgtgtacaaggacctgagacagatcgagctggcctgcgacagccaggaggacgtggacagctggaaggccagcttcctgagagccggcgtgtaccccgagaaggaccaggccgagaacgaggacggcgcccaggagaacaccttcagcatggacccccagctggagagacaggtggagaccatcagaaacctggtggacagctacgtggccatcatcaacaagagcatcagagacctgatgcccaagaccatcatgcacctgatgatcaacaacaccaaggccttcatccaccacgagctgctggcctacctgtacagcagcgccgaccagagcagcctgatggaggagagcgccgaccaggcccagagaagagacgacatgctgagaatgtaccacgccctgaaggaggccctgaacatcatcggcgacatcagcaccagcaccgtgagcacccccgtgcccccccccgtggacgacacctggctgcagagcgccagcagccacagccccaccccccagagaagacccgtgagcagcatccacccccccggcagaccccccgccgtgagaggccccacccccggcccccccctgatccccgtgcccgtgggcgccgccgccagcttcagcgccccccccatccccagcagacccggcccccagagcgtgttcgccaacagcgacctgttccccgcccccccccagatccccagcagacccgtgagaatcccccccggcatcccccccggcgtgcccagcagaagaccccccgccgcccccagcagacccaccatcatcagacccgccgagcccagcctgctggactag

SEQ ID NO: 79818 - DNA, 2601 bp, synthetic construct
  misc_feature 1..2601: note = Description of Artificial Sequence: Synthetic coding sequence
  source 1..2601: mol_type = other DNA
atgggcaacagaggcatggaggagctgatccccctggtgaacaagctgcaggacgccttcagcagcatcggccagagctgccacctggacctgccccagatcgccgtggtgggcggccagagcgccggcaagagcagcgtgctggagaacttcgtgggcagagacttcctgcccagaggcagcggcatcgtgaccagaagacccctgatcctgcagctgatcttcagcaagaccgagcacgccgagttcctgcactgcaagagcaagaagttcaccgacttcgacgaggtgagacaggagatcgaggccgagaccgacagagtgaccggcaccaacaagggcatcagccccgtgcccatcaacctgagagtgtacagcccccacgtgctgaacctgaccctgatcgacctgcccggcatcaccaaggtgcccgtgggcgaccagccccccgacatcgagtaccagatcaaggacatgatcctgcagttcatcagcagagagagcagcctgatcctggccgtgacccccgccaacatggacctggccaacagcgacgccctgaagctggccaaggaggtggacccccagggcctgagaaccatcggcgtgatcaccaagctggacctgatggacgagggcaccgacgccagagacgtgctggagaacaagctgctgcccctgagaagaggctacatcggcgtggtgaacagaagccagaaggacatcgagggcaagaaggacatcagagccgccctggccgccgagagaaagttcttcctgagccaccccgcctacagacacatggccgacagaatgggcaccccccacctgcagaagaccctgaaccagcagctgaccaaccacatcagagagagcctgcccgccctgagaagcaagctgcagagccagctgctgagcctggagaaggaggtggaggagtacaagaacttcagacccgacgaccccaccagaaagaccaaggccctgctgcagatggtgcagcagttcggcgtggacttcgagaagagaatcgagggcagcggcgaccaggtggacaccctggagctgagcggcggcgccagaatcaacagaatcttccacgagagattccccttcgagctggtgaagatggagttcgacgagaaggacctgagaagagagatcagctacgccatcaagaacatccacggcgtgagaaccggcctgttcacccccgacctggccttcgaggccatcgtgaagaagcaggtggtgaagctgaaggagccctgcctgaagtgcgtggacctggtgatccaggagctgatcaacaccgtgagacagtgcaccagcaagctgagcagctaccccagactgagagaggagaccgagagaatcgtgaccacctacatcagagagagagagggcagaaccaaggaccagatcctgctgctgatcgacatcgagcagagctacatcaacaccaaccacgaggacttcatcggcttcgccaacgcccagcagagaagcacccagctgaacaagaagagagccatccccaaccaggtgatcagaagaggctggctgaccatcaacaacatcagcctgatgaagggcggcagcaaggagtactggttcgtgctgaccgccgagagcctgagctggtacaaggacgaggaggagaaggagaagaagtacatgctgcccctggacaacctgaagatcagagacgtggagaagggcttcatgagcaacaagcacgtgttcgccatcttcaacaccgagcagagaaacgtgtacaaggacctgagacagatcgagctggcctgcgacagccaggaggacgtggacagctggaaggccagcttcctgagagccggcgtgtaccccgagaaggaccaggccgagaacgaggacggcgcccaggagaacaccttcagcatggacccccagctggagagacaggtggagaccatcagaaacctggtggacagctacgtggccatcatcaacaagagcatcagagacctgatgcccaagaccatcatgcacctgatgatcaacaacaccaaggccttcatccaccacgagctgctggcctacctgtacagcagcgccgaccagagcagcctgatggaggagagcgccgaccaggcccagagaagagacgacatgctgagaatgtaccacgccctgaaggaggccctgaacatcatcggcgacatcagcaccagcaccgtgagcacccccgtgcccccccccgtggacgacacctggctgcagagcgccagcagccacagccccaccccccagagaagacccgtgagcagcatccacccccccggcagaccccccgccgtgagaggccccacccccggcccccccctgatccccgtgcccgtgggcgccgccgccagcttcagcgccccccccatccccagcagacccggcccccagagcgtgttcgccaacagcgacctgttccccgcccccccccagatccccagcagacccgtgagaatcccccccggcatcccccccggcgtgcccagcagaagaccccccgccgcccccagcagacccaccatcatcagacccgccgagcccagcctgctggactag

SEQ ID NO: 79819 - DNA, 2613 bp, synthetic construct
  misc_feature 1..2613: note = Description of Artificial Sequence: Synthetic coding sequence
  source 1..2613: mol_type = other DNA
atgggcaacagaggcatggaggagctgatccccctggtgaacaagctgcaggacgccttcagcagcatcggccagagctgccacctggacctgccccagatcgccgtggtgggcggccagagcgccggcaagagcagcgtgctggagaacttcgtgggcagagacttcctgcccagaggcagcggcatcgtgaccagaagacccctgatcctgcagctgatcttcagcaagaccgagcacgccgagttcctgcactgcaagagcaagaagttcaccgacttcgacgaggtgagacaggagatcgaggccgagaccgacagagtgaccggcaccaacaagggcatcagccccgtgcccatcaacctgagagtgtacagcccccacgtgctgaacctgaccctgatcgacctgcccggcatcaccaaggtgcccgtgggcgaccagccccccgacatcgagtaccagatcaaggacatgatcctgcagttcatcagcagagagagcagcctgatcctggccgtgacccccgccaacatggacctggccaacagcgacgccctgaagctggccaaggaggtggacccccagggcctgagaaccatcggcgtgatcaccaagctggacctgatggacgagggcaccgacgccagagacgtgctggagaacaagctgctgcccctgagaagaggctacatcggcgtggtgaacagaagccagaaggacatcgagggcaagaaggacatcagagccgccctggccgccgagagaaagttcttcctgagccaccccgcctacagacacatggccgacagaatgggcaccccccacctgcagaagaccctgaaccagcagctgaccaaccacatcagagagagcctgcccgccctgagaagcaagctgcagagccagctgctgagcctggagaaggaggtggaggagtacaagaacttcagacccgacgaccccaccagaaagaccaaggccctgctgcagatggtgcagcagttcggcgtggacttcgagaagagaatcgagggcagcggcgaccaggtggacaccctggagctgagcggcggcgccagaatcaacagaatcttccacgagagattccccttcgagctggtgaagatggagttcgacgagaaggacctgagaagagagatcagctacgccatcaagaacatccacggcgtgagaaccggcctgttcacccccgacctggccttcgaggccatcgtgaagaagcaggtggtgaagctgaaggagccctgcctgaagtgcgtggacctggtgatccaggagctgatcaacaccgtgagacagtgcaccagcaagctgagcagctaccccagactgagagaggagaccgagagaatcgtgaccacctacatcagagagagagagggcagaaccaaggaccagatcctgctgctgatcgacatcgagcagagctacatcaacaccaaccacgaggacttcatcggcttcgccaacgcccagcagagaagcacccagctgaacaagaagagagccatccccaaccagggcgagatcctggtgatcagaagaggctggctgaccatcaacaacatcagcctgatgaagggcggcagcaaggagtactggttcgtgctgaccgccgagagcctgagctggtacaaggacgaggaggagaaggagaagaagtacatgctgcccctggacaacctgaagatcagagacgtggagaagggcttcatgagcaacaagcacgtgttcgccatcttcaacaccgagcagagaaacgtgtacaaggacctgagacagatcgagctggcctgcgacagccaggaggacgtggacagctggaaggccagcttcctgagagccggcgtgtaccccgagaaggaccaggccgagaacgaggacggcgcccaggagaacaccttcagcatggacccccagctggagagacaggtggagaccatcagaaacctggtggacagctacgtggccatcatcaacaagagcatcagagacctgatgcccaagaccatcatgcacctgatgatcaacaacaccaaggccttcatccaccacgagctgctggcctacctgtacagcagcgccgaccagagcagcctgatggaggagagcgccgaccaggcccagagaagagacgacatgctgagaatgtaccacgccctgaaggaggccctgaacatcatcggcgacatcagcaccagcaccgtgagcacccccgtgcccccccccgtggacgacacctggctgcagagcgccagcagccacagccccaccccccagagaagacccgtgagcagcatccacccccccggcagaccccccgccgtgagaggccccacccccggcccccccctgatccccgtgcccgtgggcgccgccgccagcttcagcgccccccccatccccagcagacccggcccccagagcgtgttcgccaacagcgacctgttccccgcccccccccagatccccagcagacccgtgagaatcccccccggcatcccccccggcgtgcccagcagaagaccccccgccgcccccagcagacccaccatcatcagacccgccgagcccagcctgctggactag

SEQ ID NO: 79820 - DNA, 1461 bp, synthetic construct
  misc_feature 1..1461: note = Description of Artificial Sequence: Synthetic coding sequence
  source 1..1461: mol_type = other DNA
cacgtgaccgtggccgccgccgacagctggaagccccccgccagcgcccagcacgtgggcagagcccccagagccggcgccgccacctgcttcctgggccccagaccccccagccacctgggcggcagagacttcctgcccagaggcagcggcatcgtgaccagaagacccctgatcctgcagctgatcttcagcaagaccgagcacgccgagttcctgcactgcaagagcaagaagttcaccgacttcgacgaggtgagacaggagatcgaggccgagaccgacagagtgaccggcaccaacaagggcatcagccccgtgcccatcaacctgagagtgtacagcccccacgtgctgaacctgaccctgatcgacctgcccggcatcaccaaggtgcccgtgggcgaccagccccccgacatcgagtaccagatcaaggacatgatcctgcagttcatcagcagagagagcagcctgatcctggccgtgacccccgccaacatggacctggccaacagcgacgccctgaagctggccaaggaggtggacccccagggcctgagaaccatcggcgtgatcaccaagctggacctgatggacgagggcaccgacgccagagacgtgctggagaacaagctgctgcccctgagaagaggctacatcggcgtggtgaacagaagccagaaggacatcgagggcaagaaggacatcagagccgccctggccgccgagagaaagttcttcctgagccaccccgcctacagacacatggccgacagaatgggcaccccccacctgcagaagaccctgaaccagcagctgaccaaccacatcagagagagcctgcccgccctgagaagcaagctgcagagccagctgctgagcctggagaaggaggtggaggagtacaagaacttcagacccgacgaccccaccagaaagaccaaggccctgctgcagatggtgcagcagttcggcgtggacttcgagaagagaatcgagggcagcggcgaccaggtggacaccctggagctgagcggcggcgccagaatcaacagaatcttccacgagagattccccttcgagctggtgaagatggagttcgacgagaaggacctgagaagagagatcagctacgccatcaagaacatccacggcgtgagaaccggcctgttcacccccgacatggccttcgaggccatcgtgaagaagcagatcgtgaagctgaaggagcccagcctgaagtgcgtggacctggtggtgagcgagctggccaccgtgatcaagaagtgcgccgagaagctgagcagctaccccagactgagagaggagaccgagagaatcgtgaccacctacatcagagagagagagggcagaaccaaggaccagatcctgctgctgatcgacatcgagcagagctacatcaacaccaaccacgaggacttcatcggcttcgcctag

SEQ ID NO: 79821 - DNA, 2613 bp, synthetic construct
  misc_feature 1..2613: note = Description of Artificial Sequence: Synthetic coding sequence
  source 1..2613: mol_type = other DNA
atgggcaacagaggcatggaggagctgatccccctggtgaacaagctgcaggacgccttcagcagcatcggccagagctgccacctggacctgccccagatcgccgtggtgggcggccagagcgccggcaagagcagcgtgctggagaacttcgtgggcagagacttcctgcccagaggcagcggcatcgtgaccagaagacccctgatcctgcagctgatcttcagcaagaccgagcacgccgagttcctgcactgcaagagcaagaagttcaccgacttcgacgaggtgagacaggagatcgaggccgagaccgacagagtgaccggcaccaacaagggcatcagccccgtgcccatcaacctgagagtgtacagcccccacgtgctgaacctgaccctgatcgacctgcccggcatcaccaaggtgcccgtgggcgaccagccccccgacatcgagtaccagatcaaggacatgatcctgcagttcatcagcagagagagcagcctgatcctggccgtgacccccgccaacatggacctggccaacagcgacgccctgaagctggccaaggaggtggacccccagggcctgagaaccatcggcgtgatcaccaagctggacctgatggacgagggcaccgacgccagagacgtgctggagaacaagctgctgcccctgagaagaggctacatcggcgtggtgaacagaagccagaaggacatcgagggcaagaaggacatcagagccgccctggccgccgagagaaagttcttcctgagccaccccgcctacagacacatggccgacagaatgggcaccccccacctgcagaagaccctgaaccagcagctgaccaaccacatcagagagagcctgcccgccctgagaagcaagctgcagagccagctgctgagcctggagaaggaggtggaggagtacaagaacttcagacccgacgaccccaccagaaagaccaaggccctgctgcagatggtgcagcagttcggcgtggacttcgagaagagaatcgagggcagcggcgaccaggtggacaccctggagctgagcggcggcgccagaatcaacagaatcttccacgagagattccccttcgagctggtgaagatggagttcgacgagaaggacctgagaagagagatcagctacgccatcaagaacatccacggcgtgagaaccggcctgttcacccccgacatggccttcgaggccatcgtgaagaagcagatcgtgaagctgaaggagcccagcctgaagtgcgtggacctggtggtgagcgagctggccaccgtgatcaagaagtgcgccgagaagctgagcagctaccccagactgagagaggagaccgagagaatcgtgaccacctacatcagagagagagagggcagaaccaaggaccagatcctgctgctgatcgacatcgagcagagctacatcaacaccaaccacgaggacttcatcggcttcgccaacgcccagcagagaagcacccagctgaacaagaagagagccatccccaaccagggcgagatcctggtgatcagaagaggctggctgaccatcaacaacatcagcctgatgaagggcggcagcaaggagtactggttcgtgctgaccgccgagagcctgagctggtacaaggacgaggaggagaaggagaagaagtacatgctgcccctggacaacctgaagatcagagacgtggagaagggcttcatgagcaacaagcacgtgttcgccatcttcaacaccgagcagagaaacgtgtacaaggacctgagacagatcgagctggcctgcgacagccaggaggacgtggacagctggaaggccagcttcctgagagccggcgtgtaccccgagaaggaccaggccgagaacgaggacggcgcccaggagaacaccttcagcatggacccccagctggagagacaggtggagaccatcagaaacctggtggacagctacgtggccatcatcaacaagagcatcagagacctgatgcccaagaccatcatgcacctgatgatcaacaacaccaaggccttcatccaccacgagctgctggcctacctgtacagcagcgccgaccagagcagcctgatggaggagagcgccgaccaggcccagagaagagacgacatgctgagaatgtaccacgccctgaaggaggccctgaacatcatcggcgacatcagcaccagcaccgtgagcacccccgtgcccccccccgtggacgacacctggctgcagagcgccagcagccacagccccaccccccagagaagacccgtgagcagcatccacccccccggcagaccccccgccgtgagaggccccacccccggcccccccctgatccccgtgcccgtgggcgccgccgccagcttcagcgccccccccatccccagcagacccggcccccagagcgtgttcgccaacagcgacctgttccccgcccccccccagatccccagcagacccgtgagaatcccccccggcatcccccccggcgtgcccagcagaagaccccccgccgcccccagcagacccaccatcatcagacccgccgagcccagcctgctggactag

SEQ ID NO: 79822 - DNA, 2601 bp, synthetic construct
  misc_feature 1..2601: note = Description of Artificial Sequence: Synthetic coding sequence
  source 1..2601: mol_type = other DNA
atgggcaacagaggcatggaggagctgatccccctggtgaacaagctgcaggacgccttcagcagcatcggccagagctgccacctggacctgccccagatcgccgtggtgggcggccagagcgccggcaagagcagcgtgctggagaacttcgtgggcagagacttcctgcccagaggcagcggcatcgtgaccagaagacccctgatcctgcagctgatcttcagcaagaccgagcacgccgagttcctgcactgcaagagcaagaagttcaccgacttcgacgaggtgagacaggagatcgaggccgagaccgacagagtgaccggcaccaacaagggcatcagccccgtgcccatcaacctgagagtgtacagcccccacgtgctgaacctgaccctgatcgacctgcccggcatcaccaaggtgcccgtgggcgaccagccccccgacatcgagtaccagatcaaggacatgatcctgcagttcatcagcagagagagcagcctgatcctggccgtgacccccgccaacatggacctggccaacagcgacgccctgaagctggccaaggaggtggacccccagggcctgagaaccatcggcgtgatcaccaagctggacctgatggacgagggcaccgacgccagagacgtgctggagaacaagctgctgcccctgagaagaggctacatcggcgtggtgaacagaagccagaaggacatcgagggcaagaaggacatcagagccgccctggccgccgagagaaagttcttcctgagccaccccgcctacagacacatggccgacagaatgggcaccccccacctgcagaagaccctgaaccagcagctgaccaaccacatcagagagagcctgcccgccctgagaagcaagctgcagagccagctgctgagcctggagaaggaggtggaggagtacaagaacttcagacccgacgaccccaccagaaagaccaaggccctgctgcagatggtgcagcagttcggcgtggacttcgagaagagaatcgagggcagcggcgaccaggtggacaccctggagctgagcggcggcgccagaatcaacagaatcttccacgagagattccccttcgagctggtgaagatggagttcgacgagaaggacctgagaagagagatcagctacgccatcaagaacatccacggcgtgagaaccggcctgttcacccccgacatggccttcgaggccatcgtgaagaagcagatcgtgaagctgaaggagcccagcctgaagtgcgtggacctggtggtgagcgagctggccaccgtgatcaagaagtgcgccgagaagctgagcagctaccccagactgagagaggagaccgagagaatcgtgaccacctacatcagagagagagagggcagaaccaaggaccagatcctgctgctgatcgacatcgagcagagctacatcaacaccaaccacgaggacttcatcggcttcgccaacgcccagcagagaagcacccagctgaacaagaagagagccatccccaaccaggtgatcagaagaggctggctgaccatcaacaacatcagcctgatgaagggcggcagcaaggagtactggttcgtgctgaccgccgagagcctgagctggtacaaggacgaggaggagaaggagaagaagtacatgctgcccctggacaacctgaagatcagagacgtggagaagggcttcatgagcaacaagcacgtgttcgccatcttcaacaccgagcagagaaacgtgtacaaggacctgagacagatcgagctggcctgcgacagccaggaggacgtggacagctggaaggccagcttcctgagagccggcgtgtaccccgagaaggaccaggccgagaacgaggacggcgcccaggagaacaccttcagcatggacccccagctggagagacaggtggagaccatcagaaacctggtggacagctacgtggccatcatcaacaagagcatcagagacctgatgcccaagaccatcatgcacctgatgatcaacaacaccaaggccttcatccaccacgagctgctggcctacctgtacagcagcgccgaccagagcagcctgatggaggagagcgccgaccaggcccagagaagagacgacatgctgagaatgtaccacgccctgaaggaggccctgaacatcatcggcgacatcagcaccagcaccgtgagcacccccgtgcccccccccgtggacgacacctggctgcagagcgccagcagccacagccccaccccccagagaagacccgtgagcagcatccacccccccggcagaccccccgccgtgagaggccccacccccggcccccccctgatccccgtgcccgtgggcgccgccgccagcttcagcgccccccccatccccagcagacccggcccccagagcgtgttcgccaacagcgacctgttccccgcccccccccagatccccagcagacccgtgagaatcccccccggcatcccccccggcgtgcccagcagaagaccccccgccgcccccagcagacccaccatcatcagacccgccgagcccagcctgctggactag

SEQ ID NO: 79823 - DNA, 1200 bp, synthetic construct
  misc_feature 1..1200: note = Description of Artificial Sequence: Synthetic coding sequence
  source 1..1200: mol_type = other DNA
atgctgcccctggagccctacctgacccagaccagcgccgtgccccagatgagccacttcatgtgccacagccccacccacaagccccagggcctgctgccctgggcccccttccaccaggccagcgtgagcctgtaccccatcagcccctggcccagcgagagcgtgtgcccccccacctgccccggcggcgccagctgctggttccccgccggcaacgcctgggacagagtggagctgggcttcctgggcttcggcgccggcggcgtgagcatcgccgtgcccggcttccccctgagctgcggccagggctgctgcgccggcggctggctgggccacggcgccagattccccgccaagctgagagccttcccccaggtgatcagaagaggctggctgaccatcaacaacatcagcctgatgaagggcggcagcaaggagtactggttcgtgctgaccgccgagagcctgagctggtacaaggacgaggaggagaaggagaagaagtacatgctgcccctggacaacctgaagatcagagacgtggagaagggcttcatgagcaacaagcacgtgttcgccatcttcaacaccgagcagagaaacgtgtacaaggacctgagacagatcgagctggcctgcgacagccaggaggacgtggacagctggaaggccagcttcctgagagccggcgtgtaccccgagaaggaccaggccgagaacgaggacggcgcccaggagaacaccttcagcatggacccccagctggagagacaggtggagaccatcagaaacctggtggacagctacgtggccatcatcaacaagagcatcagagacctgatgcccaagaccatcatgcacctgatgatcaacaacaccaaggccttcatccaccacgagctgctggcctacctgtacagcagcgccgaccagagcagcctgatggaggagagcgccgaccaggcccagagaagagacgacatgctgagaatgtaccacgccctgaaggaggccctgaacatcatcggcgacatcagcaccagcaccgtgagcacccccgtgcccccccccgtggacgacacctggctgcagagcgccagcagccacagccccaccccccagagaagacccgtgagcagcatccacccccccggcagaccccccgccgtgagaggccccacccccggccccccctag

SEQ ID NO: 79824 - DNA, 13284 bp, synthetic construct
  misc_feature 1..13284: note = Description of Artificial Sequence: Synthetic coding sequence
  source 1..13284: mol_type = other DNA
atgagcagcaaggccgagaagaagcagagactgagcggcagaggcagcagccaggccagctggagcggcagagccaccagagccgccgtggccacccaggagcagggcaacgcccccgccgtgagcgagcccgagctgcaggccgagctgcccaaggaggagcccgagcccagactggagggcccccaggcccagagcgaggagagcgtggagcccgaggccgacgtgaagcccctgttcctgagcagagccgccctgaccggcctggccgacgccgtgtggacccaggagcacgacgccatcctggagcacttcgcccaggaccccaccgagagcatcctgaccatcttcatcgacccctgcttcggcctgaagctggagctgggcatgcccgtgcagacccagaaccagctggtgtacttcatcagacaggcccccgtgcccatcacctgggagaacttcgaggccaccgtgcagttcggcaccgtgagaggcccctacatccccgccctgctgagactgctgggcggcgtgttcgccccccagatcttcgccaacaccggctggcccgagagcatcagaaaccacttcgccagccacctgcacaagttcctggcctgcctgaccgacaccagatacaagctggagggccacaccgtgctgtacatccccgccgaggccatgaacatgaagcccgagatggtgatcaaggacaaggagctggtgcagagactggagaccagcatgatccactggaccagacagatcaaggagatgctgagcgcccaggagaccgtggagaccggcgagaacctgggccccctggaggagatcgagttctggagaaacagatgcatggacctgagcggcatcagcaagcagctggtgaagaagggcgtgaagcacgtggagagcatcctgcacctggccaagagcagctacctggcccccttcatgaagctggcccagcagatccaggacggcagcagacaggcccagagcaacctgaccttcctgagcatcctgaaggagccctaccaggagctggccttcatgaagcccaaggacatcagcagcaagctgcccaagctgatcagcctgatcagaatcatctgggtgaacagcccccactacaacaccagagagagactgaccagcctgttcagaaaggtgtgcgactgccagtaccacttcgccagatgggaggacggcaagcagggccccctgccctgcttcttcggcgcccagggcccccagatcaccagaaacctgctggagatcgaggacatcttccacaagaacctgcacaccctgagagccgtgagaggcggcatcctggacgtgaagaacacctgctggcacgaggactacaacaagttcagagccggcatcaaggacctggaggtgatgacccagaacctgatcaccagcgccttcgagctggtgagagacgtgccccacggcgtgctgctgctggacaccttccacagactggccagcagagaggccatcaagagaacctacgacaagaaggccgtggacctgtacatgctgttcaacagcgagctggccctggtgaacagagagagaaacaagaagtggcccgacctggagccctacgtggcccagtacagcggcaaggccagatgggtgcacatcctgagaagaagaatcgacagagtgatgacctgcctggccggcgcccacttcctgcccagaatcggcaccggcaaggagagcgtgcacacctaccagcagatggtgcaggccatcgacgagctggtgagaaagaccttccaggagtggaccagcagcctggacaaggactgcatcagaagactggacacccccctgctgagaatcagccaggagaaggccggcatgctggacgtgaacttcgacaagagcctgctgatcctgttcgccgagatcgactactgggagagactgctgttcgagaccccccactacgtggtgaacgtggccgagagagccgaggacctgagaatcctgagagagaacctgctgctggtggccagagactacaacagaatcatcgccatgctgagccccgacgagcaggccctgttcaaggagagaatcagactgctggacaagaagatccaccccggcctgaagaagctgcactgggccctgaagggcgccagcgccttcttcatcaccgagtgcagaatccacgccagcaaggtgcagatgatcgtgaacgagttcaaggccagcaccctgaccatcggctggagagcccaggagatgagcgagaagctgctggtgagaatcagcggcaagagagtgtacagagacctggagttcgaggaggaccagagagagcacagagccgccgtgcagcagaagctgatgaacctgcaccaggacgtggtgaccatcatgaccaacagctacgaggtgttcaagaacgacggccccgagatccagcagcagtggatgctgtacatgatcagactggacagaatgatggaggacgccctgagactgaacgtgaagtggagcctgctggagctgagcaaggccatcaacggcgacggcaagaccagccccaaccccctgttccaggtgctggtgatcctgaagaacgacctgcagggcagcgtggcccaggtggagttcagccccaccctgcagaccctggccggcgtggtgaacgacatcggcaaccacctgttcagcaccatcagcgtgttctgccacctgcccgacatcctgaccaagagaaagctgcacagagagcccatccagaccgtggtggagcaggacgaggacatcaagaagatccagacccagatcagcagcggcatgaccaacaacgccagcctgctgcagaactacctgaagacctgggacatgtacagagagatctgggagatcaacaaggacagcttcatccacagataccagagactgaacccccccgtgagcagcttcgtggccgacatcgccagatacaccgaggtggccaacaacgtgcagaaggaggagaccgtgaccaacatccagttcgtgctgctggactgcagccacctgaagttcagcctggtgcagcactgcaacgagtggcagaacaagttcgccaccctgctgagagagatggccgccggcagactgctggagctgcacacctacctgaaggagaacgccgagaagatcagcagacccccccagaccctggaggagctgggcgtgagcctgcagctggtggacgccctgaagcacgacctggccaacgtggagacccagatcccccccatccacgagcagttcgccatcctggagaagtacgaggtgcccgtggaggacagcgtgctggagatgctggacagcctgaacggcgagtgggtggtgttccagcagaccctgctggacagcaagcagatgctgaagaagcacaaggagaagttcaagaccggcctgatccacagcgccgacgacttcaagaagaaggcccacaccctgctggaggacttcgagttcaagggccacttcaccagcaacgtgggctacatgagcgccctggaccagatcacccaggtgagagccatgctgatggccatgagagaggaggagaacagcctgagagccaacctgggcatcttcaagatcgagcagccccccagcaaggacctgcagaacctggagaaggagctggacgccctgcagcagatctgggagatcgccagagactgggaggagaactggaacgagtggaagaccggcagattcctgatcctgcagaccgagaccatggagaccaccgcccacggcctgttcagaagactgaccaagctggccaaggagtacaaggacagaaactgggagatcatcgagaccaccagaagcaagatcgagcagttcaagagaaccatgcccctgatcagcgacctgagaaaccccgccctgagagagagacactgggaccaggtgagagacgagatccagagagagttcgaccaggagagcgagagcttcaccctggagcagatcgtggagctgggcatggaccagcacgtggagaagatcggcgagatcagcgccagcgccaccaaggagctggccatcgaggtggccctgcagaacatcgccaagacctgggacgtgacccagctggacatcgtgccctacaaggacaagggccaccacagactgagaggcaccgaggaggtgttccaggccctggaggacaaccaggtggccctgagcaccatgaaggccagcagattcgtgaaggccttcgagaaggacgtggaccactgggagagatgcctgagcctgatcctggaggtgatcgagatgatcctgaccgtgcagagacagtggatgtacctggagaacatcttcctgggcgaggacatcagaaagcagctgcccaacgagagcaccctgttcgaccaggtgaacagcaactggaaggccatcatggacagaatgaacaaggacaacaacgccctgagaagcacccaccaccccggcctgctggacaccctgatcgagatgaacaccatcctggaggacatccagaagagcctggacatgtacctggagaccaagagacacatcttccccagattctacttcctgagcaacgacgacctgctggagatcctgggccagagcagaaaccccgaggccgtgcagccccacctgaagaagtgcttcgacaacatcaagctgctgagaatccagaaggtgggcggccccagcagcaagtgggaggccgtgggcatgttcagcggcgacggcgagtacatcgacttcctgcacagcgtgttcctggagggccccgtggagagctggctgggcgacgtggagcagaccatgagagtgaccctgagagacctgctgagaaactgccacctggccctgagaaagttcctgaacaagagagacaagtgggtgaaggagtgggccggccaggtggtgatcaccgccagccagatccagtggaccgccgacgtgaccaagtgcctgctgaccgccaaggagagagccgacaagaagatcctgaaggtgatgaagaagaaccaggtgagcatcctgaacaagtacagcgaggccatcagaggcaacctgaccaagatcatgagactgaagatcgtggccctggtgaccatcgagatccacgccagagacgtgctggagaagctgtacaagagcggcctgatggacgtgaacagcttcgactggctgagccagctgagattctactgggagaaggacctggacgactgcgtgatcagacagaccaacacccagttccagtacaactacgagtacctgggcaacagcggcagactggtgatcacccccctgaccgacagatgctacatgaccctgaccaccgccctgcacctgcacagaggcggcagccccaagggccccgccggcaccggcaagaccgagaccgtgaaggacctgggcaaggccctgggcatctacgtgatcgtggtgaactgcagcgagggcctggactacaagagcatgggcagaatgtacagcggcctggcccagaccggcgcctggggctgcttcgacgagttcaacagaatcaacatcgaggtgctgagcgtggtggcccaccagatcctgtgcatcctgagcgccctggccgccggcctgacccacttccacttcgacggcttcgagatcaacctggtgtggagctgcggcatcttcatcaccatgaaccccggctacgccggcagaaccgagctgcccgagaacctgaagagcatgttcagacccatcgccatggtggtgcccgacagcaccctgatcgccgagatcatcctgttcggcgagggcttcggcaactgcaagatcctggccaagaaggtgtacaccctgtacagcctggccgtgcagcagctgagcagacaggaccactacgacttcggcctgagagccctgaccagcctgctgagatacgccggcaagaagagaagactgcagcccgacctgaccgacgaggaggtgctgctgctgagcatgagagacatgaacatcgccaagctgaccagcgtggacgcccccctgttcaacgccatcgtgcaggacctgttccccaacatcgagctgcccgtgatcgactacggcaagctgagagagaccgtggagcaggagatcagagacatgggcctgcagagcacccccttcaccctgaccaaggtgttccagctgtacgagaccaagaacagcagacacagcaccatgatcgtgggctgcaccggcagcggcaagaccgccagctggagaatcctgcaggccagcctgagcagcctgtgcagagccggcgaccccaacttcaacatcgtgagagagttccccctgaaccccaaggccctgagcctgggcgagctgtacggcgagtacgacctgagcaccaacgagtggaccgacggcatcctgagcagcgtgatgagaaccgcctgcgccgacgagaagcccgacgagaagtggatcctgttcgacggccccgtggacaccctgtggatcgagaacatgaacagcgtgatggacgacaacaaggtgctgaccctgatcaacggcgagagaatcgccatgcccgagcaggtgagcctgctgttcgaggtggaggacctggccatggccagccccgccaccgtgagcagatgcggcatggtgtacaccgactacgccgacctgggctggaagccctacgtgcagagctggctggagaagagacccaaggccgaggtggagcccctgcagagaatgttcgagaagctgatcaacaagatgctggccttcaagaaggacaactgcaaggagctggtgcccctgcccgagtacagcggcatcaccagcctgtgcaagctgtacagcgccctggccacccccgagaacggcgtgaaccccgccgacggcgagaactacgtgaccatggtggagatgaccttcgtgttcagcatgatctggagcgtgtgcgccagcgtggacgaggagggcagaaagagaatcgacagctacctgagagagatcgagggcagcttccccaacaaggacaccgtgtacgagtacttcgtggaccccaagatcagaagctggaccagcttcgaggacaagctgcccaagagctggagatacccccccaacgcccccttctacaagatcatggtgcccaccgtggacaccgtgagatacaactacctggtgagcagcctggtggccaaccagaaccccatcctgctggtgggccccgtgggcaccggcaagaccagcatcgcccagagcgtgctgcagagcctgcccagcagccagtggagcgtgctggtggtgaacatgagcgcccagaccaccagcaacaacgtgcagagcatcatcgagagcagagtggagaagagaaccaagggcgtgtacgtgcccttcggcggcaagagcatgatcaccttcatggacgacctgaacatgcccgccaaggacatgttcggcagccagccccccctggagctgatcagactgtggatcgactacggcttctggtacgacagaaccaagcagaccatcaagtacatcagagagatgttcctgatggccgccatgggcccccccggcggcggcagaaccgtgatcagccccagactgagaagcagattcaacatcatcaacatgaccttccccaccaagagccagatcatcagaatcttcggcaccatgatcaaccagaagctgcaggacttcgaggaggaggtgaagcccatcggcaacgtggtgaccgaggccaccctggacatgtacaacaccgtggtgcagagattcctgcccacccccaccaagatgcactacctgttcaacctgagagacatcagcaaggtgttccagggcatgctgagagccaacaaggacttccacgacaccaagagcagcatcaccagactgtggatccacgagtgcttcagagtgttcagcgacagactggtggacgccgccgacaccgaggccttcatgggcatcatcagcgacaagctgggcagcttcttcgacctgaccttccaccacctgtgccccagcaagagaccccccatcttcggcgacttcctgaaggagcccaaggtgtacgaggacctgaccgacctgaccgtgctgaagaccgtgatggagaccgccctgaacgagtacaacctgagccccagcgtggtgcccatgcagctggtgctgttcagagaggccatcgagcacatcaccagaatcgtgagagtgatcggccagcccagaggcaacatgctgctggtgggcatcggcggcagcggcagacagagcctggccagactggccagcagcatctgcgactacaccaccttccagatcgaggtgaccaagcactacagaaagcaggagttcagagacgacatcaagagactgtacagacaggccggcgtggagctgaagaccaccagcttcatcttcgtggacacccagatcgccgacgagagcttcctggaggacatcaacaacatcctgagcagcggcgaggtgcccaacctgtacaagcccgacgagttcgaggagatccagagccacatcatcgaccaggccagagtggagcaggtgcccgagagcagcgacagcctgttcgcctacctgatcgagagagtgcagaacaacctgcacatcgtgctgtgcctgagccccatgggcgaccccttcagaaactggatcagacagtaccccgccctggtgaactgcaccaccatcaactggttcagcgagtggccccaggaggccctgctggaggtggccgagaagtgcctgatcggcgtggacctgggcacccaggagaacatccacagaaaggtggcccagatcttcgtgaccatgcactggagcgtggcccagtacagccagaagatgctgctggagctgagaagacacaactacgtgacccccaccaagtacctggagctgctgagcggctacaagaagctgctgggcgagaagagacaggagctgctggcccaggccaacaagctgagaaccggcctgttcaagatcgacgagaccagagagaaggtgcaggtgatgagcctggagctggaggacgccaagaagaaggtggccgagttccagaagcagtgcgaggagtacctggtgatcatcgtgcagcagaagagagaggccgacgagcagcagaaggccgtgaccgccaacagcgagaagatcgccgtggaggagatcaagtgccaggccctggccgacaacgcccagaaggacctggaggaggccctgcccgccctggaggaggccatgagagccctggagagcctgaacaagaaggacatcggcgagatcaagagctacggcagaccccccgcccaggtggagatcgtgatgcaggccgtgatgatcctgagaggcaacgagcccacctgggccgaggccaagagacagctgggcgagcagaacttcatcaagagcctgatcaacttcgacaaggacaacatcagcgacaaggtgctgaagaagatcggcgcctactgcgcccagcccgacttccagcccgacatcatcggcagagtgagcctggccgccaagagcctgtgcatgtgggtgagagccatggagctgtacggcagactgtacagagtggtggagcccaagagaatcagaatgaacgccgccctggcccagctgagagagaagcaggccgccctggccgaggcccaggagaagctgagagaggtggccgagaagctggagatgctgaagaagcagtacgacgagaagctggcccagaaggaggagctgagaaagaagagcgaggagatggagctgaagctggagagagccggcatgctggtgagcggcctggccggcgagaaggccagatgggaggagaccgtgcagggcctggaggaggacctgggctacctggtgggcgactgcctgctggccgccgccttcctgagctacatgggccccttcctgaccaactacagagacgagatcgtgaaccagatctggatcggcaagatctgggagctgcaggtgccctgcagccccagcttcgccatcgacaacttcctgtgcaaccccaccaaggtgagagactggaacatccagggcctgcccagcgacgccttcagcaccgagaacggcatcatcgtgaccagaggcaacagatgggccctgatgatcgacccccaggcccaggccctgaagtggatcaagaacatggagggcggccagggcctgaagatcatcgacctgcagatgagcgactacctgagaatcctggagcacgccatccacttcggctaccccgtgctgctgcagaacgtgcaggagtacctggaccccaccctgaaccccatgctgaacaagagcgtggccagaatcggcggcagactgctgatgagaatcggcgacaaggaggtggagtacaacaccaacttcagattctacatcaccaccaagctgagcaacccccactacagccccgagaccagcgccaagaccaccatcgtgaacttcgccgtgaaggagcagggcctggaggcccagctgctgggcatcgtggtgagaaaggagagacccgagctggaggagcagaaggacagcctggtgatcaacatcgccgccggcaagagaaagctgaaggagctggaggacgagatcctgagactgctgaacgaggccaccggcagcctgctggacgacgtgcagctggtgaacaccctgcacaccagcaagatcaccgccaccgaggtgaccgagcagctggagaccagcgagaccaccgagatcaacaccgacctggccagagaggcctacagaccctgcgcccagagagccagcatcctgttcttcgtgctgaacgacatgggctgcatcgaccccatgtaccagttcagcctggacgcctacatcagcctgttcatcctgagcatcgacaagagccacagaagcaacaagctggaggacagaatcgactacctgaacgactaccacacctacgccgtgtacagatacacctgcagaaccctgttcgagagacacaagctgctgttcagcttccacatgtgcgccaagatcctggagaccagcggcaagctgaacatggacgagtacaacttcttcctgagaggcggcgtggtgctggacagagagggccagatggacaacccctgcagcagctggctggccgacgcctactgggacaacatcaccgagctggacaagctgaccaacttccacggcctgatgaacagcttcgagcagtaccccagagactggcacctgtggtacaccaacgccgcccccgagaaggccatgctgcccggcgagtgggagaacgcctgcaacgagatgcagagaatgctgatcgtgagaagcctgagacaggacagagtggccttctgcgtgaccagcttcatcatcaccaacctgggcagcagattcatcgagccccccgtgctgaacatgaagagcgtgctggaggacagcacccccagaagccccctggtgttcatcctgagccccggcgtggaccccaccagcgccctgctgcagctggccgagcacatgggcatggcccagagattccacgccctgagcctgggccagggccaggcccccatcgccgccagactgctgagagagggcgtgacccagggccactgggtgttcctggccaactgccacctgagcctgagctggatgcccaacctggacaagctggtggagcagctgcaggtggaggacccccaccccagcttcagactgtggctgagcagcatcccccaccccgacttccccatcagcatcctgcaggtgagcatcaagatgaccaccgagccccccaagggcctgaaggccaacatgaccagactgtaccagctgatgagcgagccccagttcagcagatgcagcaagcccgccaagtacaagaagctgctgttcagcctgtgcttcttccacagcgtgctgctggagagaaagaagttcctgcagctgggctggaacatcatctacggcttcaacgacagcgacttcgaggtgagcgagaacctgctgagcctgtacctggacgagtacgaggagaccccctgggacgccctgaagtacctgatcgccggcatcaactacggcggccacgtgaccgacgactgggacagaagactgctgaccacctacatcaacgactacttctgcgaccagagcctgagcacccccttccacagactgagcgccctggagacctacttcatccccaaggacggcagcctggccagctacaaggagtacatcagcctgctgcccggcatggacccccccgaggccttcggccagcaccccaacgccgacgtggccagccagatcaccgaggcccagaccctgttcgacaccctgctgagcctgcagccccagatcacccccaccagagccggcggccagaccagagaggagaaggtgctggagctggccgccgacgtgaagcagaagatccccgagatgatcgactacgagggcacccagaagctgctggccctggaccccagccccctgaacgtggtgctgctgcaggagatccagagatacaacaccctgatgcagaccatcctgttcagcctgaccgacctggagaagggcatccagggcctgatcgtgatgagcaccagcctggaggagatcttcaactgcatcttcgacgcccacgtgccccccctgtggggcaaggcctaccccagccagaagcccctggccgcctggaccagagacctggccatgagagtggagcagttcgagctgtgggccagcagagccagaccccccgtgatcttctggctgagcggcttcaccttccccaccggcttcctgaccgccgtgctgcagagcagcgccagacagaacaacgtgagcgtggacagcctgagctgggagttcatcgtgagcaccgtggacgacagcaacctggtgtacccccccaaggacggcgtgtgggtgagaggcctgtacctggagggcgccggctgggacagaaagaacagctgcctggtggaggccgagcccatgcagctggtgtgcctgatgcccaccatccacttcagacccgccgagagcagaaagaagagcgccaagggcatgtacagctgcccctgctactactaccccaacagagccggcagcagcgacagagccagcttcgtgatcggcatcgacctgagaagcggcgccatgacccccgaccactggatcaagagaggcaccgccctgctgatgagcctggacagctag

SEQ ID NO: 79825 - DNA, 1782 bp, synthetic construct
  misc_feature 1..1782: note = Description of Artificial Sequence: Synthetic coding sequence
  source 1..1782: mol_type = other DNA
atggagatcgtgtacgtgtacgtgaagaagagaagcgagttcggcaagcagtgcaacttcagcgacagacaggccgagctgaacatcgacatcatgcccaaccccgagctggccgagcagttcgtggagagaaaccccgtggacaccggcatccagtgcagcatcagcatgagcgagcacgaggccaacagcgagagattcgagatggagaccagaggcgtgaaccacgtggagggcggctggcccaaggacgtgaaccccctggagctggagcagaccatcagattcagaaagaaggtggagaaggacgagaactacgtgaacgccatcatgcagctgggcagcatcatggagcactgcatcaagcagaacaacgccatcgacatctacgaggagtacttcaacgacgaggaggccatggaggtgatggaggaggaccccagcgccaagaccatcaacgtgttcagagacccccaggagatcaagagagccgccacccacctgagctggcaccccgacggcaacagaaagctggccgtggcctacagctgcctggacttccagagagcccccgtgggcatgagcagcgacagctacatctgggacctggagaaccccaacaagcccgagctggccctgaagcccagcagccccctggtgaccctggagttcaaccccaaggacagccacgtgctgctgggcggctgctacaacggccagatcgcctgctgggacaccagaaagggcagcctggtggccgagctgagcaccatcgagagcagccacagagaccccgtgtacggcaccatctggctgcagagcaagaccggcaccgagtgcttcagcgccagcaccgacggccaggtgatgtggtgggacatcagaaagatgagcgagcccaccgaggtggtgatcctggacatcaccaagaaggagcagctggagaacgccctgggcgccatcagcctggagttcgagagcaccctgcccaccaagttcatggtgggcaccgagcagggcatcgtgatcagctgcaacagaaaggccaagaccagcgccgagaagatcgtgtgcaccttccccggccaccacggccccatctacgccctgcagagaaaccccttctaccccaagaacttcctgaccgtgggcgactggaccgccagaatctggagcgaggacagcagagagagcagcatcatgtggaccaagtaccacatggcctacctgaccgacgccgcctggagccccgtgagacccaccgtgttcttcaccaccagaatggacggcaccctggacatctgggacttcatgttcgagcagtgcgaccccaccctgagcctgaaggacaacggctgcctgatcgcctgcggcagccagctgggcaccaccaccctgctggaggtgagccccggcctgagcaccctgcagagaaacgagaagaacgtggccagcagcatgttcgagagagagaccagaagagagaagatcctggaggccagacacagagagatgagactgaaggagaagggcaaggccgagggcagagacgaggagcagaccgacgaggagctggccgtggacctggaggccctggtgagcaaggccgaggaggagttcttcgacatcatcttcgccgagctgaagaagaaggaggccgacgccatcaagctgacccccgtgccccagcagcccagccccgaggaggaccaggtggtggaggagggcgaggaggccgccggcgaggagggcgacgaggaggtggaggaggacctggcctag

SEQ ID NO: 79826 - DNA, 2676 bp, synthetic construct
  misc_feature 1..2676: note = Description of Artificial Sequence: Synthetic coding sequence
  source 1..2676: mol_type = other DNA
gagaaggacaacggcctggacgtgttcaagctgagcgacagagacttcctgagaagcatggagaacgccatcagattcggcaagccctgcctgctggagaacgtgggcgaggagctggaccccgccctggagcccgtgctgctgaagcagacctacaagcagcagggcaacaccgtgctgaagctgggcgacaccgtgatcccctaccacgaggacttcagaatgtacatcaccaccaagctgcccaacccccactacacccccgagatcagcaccaagctgaccctgatcaacttcaccctgagccccagcggcctggaggaccagctgctgggccaggtggtggccgaggagagacccgacctggaggaggccaagaaccagctgatcatcagcaacgccaagatgagacaggagctgaaggacatcgaggaccagatcctgtacagactgagcagcagcgagggcaaccccgtggacgacatggagctgatcaaggtgctggaggccagcaagatgaaggccgccgagatccaggccaaggtgagaatcgccgagcagaccgagaaggacatcgacctgaccagaatggagtacatccccgtggccatcagaacccagatcctgttcttctgcgtgagcgacctggccaacgtggaccccatgtaccagtacagcctggagtggttcctgaacatcttcctgagcggcatcgccaacagcgagagagccgacaacctgaagaagagaatcagcaacatcaacagatacctgacctacagcctgtacagcaacgtgtgcagaagcctgttcgagaagcacaagctgatgttcgccttcctgctgtgcgtgagaatcatgatgaacgagggcaagatcaaccagagcgagtggagatacctgctgagcggcggcagcatcagcatcatgaccgagaaccccgcccccgactggctgagcgacagagcctggagagacatcctggccctgagcaacctgcccaccttcagcagcttcagcagcgacttcgtgaagcacctgagcgagttcagagtgatcttcgacagcctggagccccacagagagcccctgcccggcatctgggaccagtacctggaccagttccagaagctgctggtgctgagatgcctgagaggcgacaaggtgaccaacgccatgcaggacttcgtggccaccaacctggagcccagattcatcgagccccagaccgccaacctgagcgtggtgttcaaggacagcaacagcaccacccccctgatcttcgtgctgagccccggcaccgaccccgccgccgacctgtacaagttcgccgaggagatgaagttcagcaagaagctgagcgccatcagcctgggccagggccagggccccagagccgaggccatgatgagaagcagcatcgagagaggcaagtgggtgttcttccagaactgccacctggcccccagctggatgcccgccctggagagactgatcgagcacatcaaccccgacaaggtgcacagagacttcagactgtggctgaccagcctgcccagcaacaagttccccgtgagcatcctgcagaacggcagcaagatgaccatcgagccccccagaggcgtgagagccaacctgctgaagagctacagcagcctgggcgaggacttcctgaacagctgccacaaggtgatggagttcaagagcctgctgctgagcctgtgcctgttccacggcaacgccctggagagacacaagttcggccccctgggcttcaacatcccctacgagttcaccgacggcgacctgagaatctgcatcagccagctgaagatgttcctggacgagtacgacgacatcccctacaaggtgctgaagtacaccgccggcgagatcaactacggcggcagagtgaccgacgactgggacagaagatgcatcatgaacatcctggaggacttctacaaccccgacgtgctgagccccgagcacagctacagcgccagcggcatctaccaccagatcccccccacctacgacctgcacggctacctgagctacatcaagagcctgcccctgaacgacatgcccgagatcttcggcctgcacgacaacgccaacatcaccttcgcccagaacgagaccttcgccctgctgggcaccatcatccagctgcagcccaagagcagcagcgccggcagccagggcagagaggagatcgtggaggacgtgacccagaacatcctgctgaaggtgcccgagcccatcaacctgcagtgggtgatggccaagtaccccgtgctgtacgaggagagcatgaacaccgtgctggtgcaggaggtgatcagatacaacagactgctgcaggtgatcacccagaccctgcaggacctgctgaaggccctgaagggcctggtggtgatgagcagccagctggagctgatggccgccagcctgtacaacaacaccgtgcccgagctgtggagcgccaaggcctaccccagcctgaagcccctgagcagctgggtgatggacctgctgcagagactggacttcctgcaggcctggatccaggacggcatccccgccgtgttctggatcagcggcttcttcttcccccaggccttcaacagacacagcgccgagttctgcccccagatctgccacctgcactag

SEQ ID NO: 79827 - DNA, 12798 bp, synthetic construct
  misc_feature 1..12798: note = Description of Artificial Sequence: Synthetic coding sequence
  source 1..12798: mol_type = other DNA
atggagcagcccaacagcaagggctacagcctgggcagaaccccccagggccccgagtgcagcagcgcccccgccgtgcaggtgggcacccacagaggcctggagtacaaccccggcaagatcctgcccggcagcgactacggcctgggcaacccccccgccctggaccccaagctgccccacctgcccctgccccccgccccccccaccctgagcgacctgggccagcccagaaagagccccctgaccggcaccgacaagaagtaccccctgatgaagcagagaggcttctacagcgacatcctgagccccggcaccctggaccagctgggcgaggtgtgcagaggccccagaatgagccagaacctgctgagacaggccgacctggacaagttcacccccagagtgggcagcttcgaggtgcccgaggacttccaggagagaatggagcagcagtgcatcggcagcaccaccagactgctggcccagaccgacttccccctgcaggcctacgagcccaagatgcaggtgcccttccaggtgctgcccggccagcaccccagaaagatcgagatcgagagaagaaagcagcagtacctgagcctggacatcgagcagctgctgttcagccagggcatcgacagcaacaagctgatgcccagacacctggaccaccagcacccccagaccatcgagcagggccacgaccccatcttccccatctacctgcccctgaaggtgttcgacaacgaggacttcgactgcagaacccccagagagtggatcaacatgggcctggagcccggcagcctggacagaaagcccgtgcccggcaaggccctgctgcccaccgacgacttcctgggccacgaggaccccaagagccagaagctgaagtacaagtggtgcgaggtgggcgtgctggactacgacgaggagaagaagctgtacctggtgcacaagaccgacgagaagggcctggtgagagacgagatgggcagacccatcctgaacgccggcgtgaccaccgagggcagaccccccctgcaggtgtgccagtactgggtgcccagaatccagctgctgttctgcgccgaggacccctgcatgttcgcccagagagtggtgcaggccaacgccctgagaaagaacaccgaggccctgctgctgtacaacctgtacgtggactgcatgcccagcgacggccagcacgtgatcagcgagcagagcctgagcaagatcaagcagtgggccctgagcacccccagaatgagaaagggccccagcgtgctggagcacctgagcagcctggccagagaggtgagcctggactacgagagaagcatgaacaagatcaacttcgaccacgtggtgagcagcaagcccgagaccttcagctacgtgaccctgcccaagaaggaggaggagcaggtgcccgagagaggcctggtgagcgtgcccaagtaccacttctgggagcagaaggaggacttcaccttcgtgagcctgctgaccagacccgaggtgatcaccgccctgagcaaggtgagagccgagtgcaacaaggtgaccgccatgagcctgttccacagcagcctgagcaagtacagccacctggaggagttcgagcagatccagagccagaccttcagccaggtgcagatgttcctgaaggacagctggatcagcagcctgaaggtggccatgagaagcagcctgagagacatgagcaagggctggtacaacctgtacgagaccaactgggaggtgtacctgatgagcaagctgagaaagctgatggagctggtgaagtacatgctgcaggacaccctgagattcctggtgcaggacagcctggccagcttcagccagttcatcagcgacacctgctgcagcgtgctgaactgcaccgacgacatggtgtggggcgacgacctgatcaacagcccctacagacccagaaagaaccccctgttcatcatggacctggtgctggacagcagcggcgtgcactacagcacccccctggagcagttcgaggccagcctgctgaacctgttcgacaagggcatcctggccacccacgccgtgccccagctggagaagctggtgatggaggacatcttcatcagcggcgaccccctgctggagagcgtgggcctgcacgagcccctggtggaggagctgagagccaccatcgccagcgccgtgagcaaggccatgatccccctgcaggcctacgccaaggagtacagaaagtacctggagctgaacaacaacgacatcgccagcttcctgaagacctaccagacccagggcctgctggcccaggaggtgagagaggtggtgctgacccacctgagagagaaggagatcctggacagcagcctgcccagcagcatcatcatcggccccttctacatcaacaccgacaacgtgaagcagagcctgagcaagaagagaaaggccctggccaccagcgtgctggacatcctggccaagaacctgcacaaggaggtggacagcatctgcgaggagttcagaagcatcagcagaaagatctacgagaagcccaacagcatcgaggagctggccgagctgagagagtggatgaagggcatccccgagagactggtgggcctggaggagagaatcgtgaaggtgatggacgactaccaggtgatggacgagttcctgtacaacctgagcagcgacgacttcaacgacaagtggatcgccagcaactggcccagcaagatcctgggccagatcgagctggtgcagcagcagcacgtggaggacgaggagaagttcagaaagatccagatcatggaccagaacaacttccaggagaagctggagggcctgcagctggtggtggccggcttcagcatccacgtggagatcagcagagcccacgagatcgccaacgaggtgagaagagtgaagaagcagctgaaggactgccagcagctggccatgctgtacaacaacagagagagaatcttcagcctgcccatcaccaactacgacaagctgagcagaatggtgaaggagttccagccctacctggacctgtggaccaccgccagcgactggctgagatggagcgagagctggatgaacgaccccctgagcgccatcgacgccgagcagctggagaagaacgtggtggaggccttcaagaccatgcacaagtgcgtgaagcagttcaaggacatgcccgcctgccaggaggtggccctggacatcagagccagaatcgaggagttcaagccctacatccccctgatccagggcctgagaaaccccggcatgagaatcagacactgggagaccctgagcaaccagatcaacatcaacgtgagacccaaggccaacctgaccttcgccagatgcctggagatgaacctgcaggaccacatcgagagcatcagcaaggtggccgaggtggccggcaaggagtacgccatcgagcaggccctggacaagatggagaaggagtggagcaccatcctgttcaacgtgctgccctacaaggccaccgacacctacatcctgaagagccccgacgaggccagccagctgctggacgaccacatcgtgatgacccagaacatgagcttcagcccctacaagaagcccttcgagcagagaatcaacagctgggagaacaagctgaagctgacccaggaggtgctggaggagtggctgaactgccagagaagctggctgtacctggagcccatcttcagcagcgaggacatcaaccagcagctgcccgtggagagcaagagataccagaccatggagagaatctggaagaagatcatgaagaacgcctacgagaacagagaggtgatcaacgtgtgcagcgacctgagaatgctggacagcctgagagactgcaacaagatcctggacctggtgcagaagggcctgagcgagtacctggagaccaagagaagcgccttccccagattctacttcctgagcgacgacgagctgctggagatcctgagccagaccaaggaccccaccgccgtgcagccccacctgagaaagtgcttcgagaacatcgccagactgctgttccaggaggacctggagatcacccacatgtacagcgccgagggcgaggaggtgcagctgtgcttcagcatctaccccagcagcaacgtggaggactggctgagagaggtggagagaagcatgaaggccagcgtgcacgacatcatcgagaaggccatcagagcctaccccaccatgcccagaacccagtgggtgctgaactggcccggccaggtgaccatcgccggctgccagacctactggaccatggaggtggccgaggccctggaggccggcaacctgagaagccagctgttcccccagctgtgccagcagctgagcgacctggtggccctggtgagaggcaagctgagcagaatgcagagagccgtgctgagcgccctgatcgtgatcgaggtgcacgccaaggacgtggtgagcaagctgatccaggagaacgtggtgagcgtgaacgacttccagtggatcagccagctgagatactactggaccaacaacgacctgtacatcagagccgtgaacgccgagttcatctacggctacgagtacctgggcaacagcggcagactggtgatcacccccctgaccgacagatgctacctgaccctgaccggcgccctgcacctgaagttcggcggcgcccccgccggccccgccggcaccggcaagaccgagaccaccaaggacctgggcaaggccctggccatccagaccgtggtgttcaactgcagcgaccagctggacttcatggccatgggcaagttcttcaagggcctggccagcgccggcgcctgggcctgcttcgacgagttcaacagaatcgacatcgaggtgctgagcgtggtggcccagcagatcaccaccatccagaaggcccagcagcagagagtggagagattcatgttcgagggcgtggagatccccctggtgcccagctgcgccgtgttcatcaccatgaaccccggctacgccggcagaaccgagctgcccgacaacctgaaggccctgttcagacccgtggccatgatggtgcccgactacgccatgatcaccgagatcagcctgtacagcttcggcttcaacgaggccagcgtgctggccaagaagatcaccaccaccttcaagctgagcagcgagcagctgagcagccaggaccactacgacttcggcatgagagccgtgaagaccgtgatcagcgccgccggcaacctgaagagagagaaccccagcatgaacgaggagctgatctgcctgagagccatcagagacgtgaacgtgcccaagttcctgcaggaggacctgaagctgttcagcggcatcgtgagcgacctgttccccaccatcaaggaggaggacaccgactacggcatcctggacgaggccatcagagaggcctgcagaaacagcaacctgaaggacgtggagggcttcctgaccaagtgcatccagctgtacgagaccaccgtggtgagacacggcctgatgctggtgggccccaccggcagcggcaagagcacctgctacagagtgctggccgccgccatgaccagcctgaagggccagcccagcatcagcggcggcatgtacgaggccgtgaactactacgtgctgaaccccaagagcatcaccatgggccagctgtacggcgagttcgacctgctgacccacgagtggaccgacggcatcttcagcagcttcatcagagccggcgccatcaccagcgacaccaacaagaagtggtacatgttcgacggccccgtggacgccatctggatcgagaacatgaacaccgtgctggacgacaacaagaagctgtgcctgagcagcggcgagatcatcaagctgaccgaggccatgaccatgatgttcgaggtgcaggacctggccgtggccagccccgccaccgtgagcagatgcggcatggtgtacctggagcccagcatcctgggcctgatgcccttcatcgagtgctggctgagaaagctgccccccctgctgaagccctacgaggagcacttcaaggccctgttcgtgagcttcctggaggagagcatcagcttcgtgagaagcagcgtgaaggaggtgatcgccagcaccaactgcaacctgaccatgagcctgctgaagctgctggactgcttcttcaagcccttcctgcccagagagggcctgaagaagatccccagcgagaagctgagcagaatcgtggagctgatcgagccctggttcatcttcagcctgatctggagcgtgggcgccaccggcgacagcagcggcagaaccagcttcagccactggctgagactgaagatggagaacgagcagctgaccctgctgttccccgaggagggcctggtgttcgactacagactggaggacgccggcatcagcggcaccaacgacagcgaggacgaggaggaggagtacaagcaggtggcctgggtgaagtggatggacagcagcgcccccttcaccatggtgcccgacaccaactactgcaacatcatcgtgcccaccatggacaccgtgcagatgagccacctgctggacatgctgctgaccaacaagaagcccgtgctgtgcatcggccccaccggcaccggcaagaccctgaccatcagcgacaagctgctgaagaacctggccctggactacatcagccacttcctgaccttcagcgccagaaccagcgccaaccagacccaggacttcatcgacagcaagctggacaagagaagaaagggcgtgttcggcccccccctgggcagaaacttcatcttcttcatcgacgacctgaacatgcccgccctggagacctacggcgcccagccccccatcgagctgctgagacagtggatggaccacggcggctggtacgacagaaagatcatcggcgccttcaagaacctggtggacatcaacttcgtgtgcgccatgggcccccccggcggcggcagaaacaccgtgacccccagactgatgagacacttcaactacctgagcttcgccgagatggacgaggtgagcaagaagagaatcttcagcaccatcctgggcaactggctggacggcctgctgggcgagaagagctacagagagagagtgcccggcgccccccacatcgcccacttcaccgagcccctggtggaggccaccatcatggtgtacgccaccatcaccagccagctgctgcccacccccgccaagagccactacaccttcaacctgagagacctgagcaaggtgttccagggcatgctgatggccgaccccgccaaggtggaggaccaggtgcagctgctgagactgtggtaccacgagaactgcagagtgttcagagacagactggtgaacgaggaggacagaagctggttcgaccagctgctgaagagatgcatggagcagtgggaggtgaccttcaacaaggtgtgccccttccagcccatcctgtacggcgacttcatgagccccggcagcgacgtgaagagctacgagctgatcaccagcgagagcaagatgatgcaggtgatcgaggagtacatcgaggactacaaccagatcaacaccgccaagctgaagctggtgctgttcatggacgccatgagccacatctgcagaatcagcagaaccctgagacaggccctgggcaacgccctgctgctgggcgtgggcggcagcggcagaagcagcctgaccagactggccagccacatggccgagtacgagtgcttccagatcgagctgagcaagaactacggcatgagcgagtggagagacgacgtgaagaaggtgctgctgaaggccggcctgcagaacctgcccatcaccttcctgttcagcgacacccagatcaagaacgagagcttcctggaggacatcaacaacgtgctgaacagcggcgacatccccaacctgtacaccgccgacgagcaggaccagatcgtgagcaccatgagaccctacatccaggagcagggcctgcagcccaccaaggccaacctgatggccgcctacaccggcagagtgagaagcaacatccacatggtgctgtgcatgagccccatcggcgaggtgttcagagccagactgagacagttccccagcctggtgaactgctgcaccatcgactggttcaacgagtggcccgccgaggccctgaagagcgtggccaccgtgttcctgaacgagatccccgagctggagagcagccaggaggagatccagggcctgatccaggtgtgcgtgtacatccaccagagcgtgagcaagaagtgcatcgagtacctggccgagctgaccagacacaactacgtgacccccaagagctacctggagctgctgcacatcttcagcatcctgatcggccagaagaagctggagctgaagaccgccaagaacagaatgaagagcggcctggacaagctgctgagaaccagcgaggacgtggccaagatgcaggaggacctggagagcatgcaccccctgctggaggaggccgccaaggacaccatgctgaccatggagcagatcaaggtggacaccgccatcgccgaggagaccagaaacagcgtgcagaccgaggagatcaaggccaacgagaaggccaagaaggcccaggccatcgccgacgacgcccagaaggacctggacgaggccctgcccgccctggacgccgccctggccagcctgagaaacctgaacaagaacgacgtgaccgaggtgagagccatgcagagacccccccccggcgtgaagctggtgatcgaggccgtgtgcatcatgaagggcatcaagcccaagaaggtgcccggcgagaagcccggcaccaaggtggacgactactgggagcccggcaagggcctgctgcaggaccccggccacttcctggagagcctgttcaagttcgacaaggacaacatcggcgacgtggtgatcaaggccatccagccctacatcgacaacgaggagttccagcccgccaccatcgccaaggtgagcaaggcctgcaccagcatctgccagtgggtgagagccatgcacaagtaccacttcgtggccaaggccgtggagcccaagagacaggccctgctggaggcccaggacgacctgggcgtgacccagagaatcctggacgaggccaagcagagactgagagaggtggaggacggcatcgccaccatgcaggccaagtacagagagtgcatcaccaagaaggaggagctggagctgaagtgcgagcagtgcgagcagagactgggcagagccggcaagctgatcaacggcctgagcgacgagaaggtgagatggcaggagaccgtggagaacctgcagtacatgctgaacaacatcagcggcgacgtgctggtggccgccggcttcgtggcctacctgggccccttcaccggccagtacagaaccgtgctgtacgacagctgggtgaagcagctgagaagccacaacgtgccccacaccagcgagcccaccctgatcggcaccctgggcaaccccgtgaagatcagaagctggcagatcgccggcctgcccaacgacaccctgagcgtggagaacggcgtgatcaaccagttcagccagagatggacccacttcatcgacccccagagccaggccaacaagtggatcaagaacatggagaaggacaacggcctggacgtgttcaagctgagcgacagagacttcctgagaagcatggagaacgccatcagattcggcaagccctgcctgctggagaacgtgggcgaggagctggaccccgccctggagcccgtgctgctgaagcagacctacaagcagcagggcaacaccgtgctgaagctgggcgacaccgtgatcccctaccacgaggacttcagaatgtacatcaccaccaagctgcccaacccccactacacccccgagatcagcaccaagctgaccctgatcaacttcaccctgagccccagcggcctggaggaccagctgctgggccaggtggtggccgaggagagacccgacctggaggaggccaagaaccagctgatcatcagcaacgccaagatgagacaggagctgaaggacatcgaggaccagatcctgtacagactgagcagcagcgagggcaaccccgtggacgacatggagctgatcaaggtgctggaggccagcaagatgaaggccgccgagatccaggccaaggtgagaatcgccgagcagaccgagaaggacatcgacctgaccagaatggagtacatccccgtggccatcagaacccagatcctgttcttctgcgtgagcgacctggccaacgtggaccccatgtaccagtacagcctggagtggttcctgaacatcttcctgagcggcatcgccaacagcgagagagccgacaacctgaagaagagaatcagcaacatcaacagatacctgacctacagcctgtacagcaacgtgtgcagaagcctgttcgagaagcacaagctgatgttcgccttcctgctgtgcgtgagaatcatgatgaacgagggcaagatcaaccagagcgagtggagatacctgctgagcggcggcagcatcagcatcatgaccgagaaccccgcccccgactggctgagcgacagagcctggagagacatcctggccctgagcaacctgcccaccttcagcagcttcagcagcgacttcgtgaagcacctgagcgagttcagagtgatcttcgacagcctggagccccacagagagcccctgcccggcatctgggaccagtacctggaccagttccagaagctgctggtgctgagatgcctgagaggcgacaaggtgaccaacgccatgcaggacttcgtggccaccaacctggagcccagattcatcgagccccagaccgccaacctgagcgtggtgttcaaggacagcaacagcaccacccccctgatcttcgtgctgagccccggcaccgaccccgccgccgacctgtacaagttcgccgaggagatgaagttcagcaagaagctgagcgccatcagcctgggccagggccagggccccagagccgaggccatgatgagaagcagcatcgagagaggcaagtgggtgttcttccagaactgccacctggcccccagctggatgcccgccctggagagactgatcgagcacatcaaccccgacaaggtgcacagagacttcagactgtggctgaccagcctgcccagcaacaagttccccgtgagcatcctgcagaacggcagcaagatgaccatcgagccccccagaggcgtgagagccaacctgctgaagagctacagcagcctgggcgaggacttcctgaacagctgccacaaggtgatggagttcaagagcctgctgctgagcctgtgcctgttccacggcaacgccctggagagacacaagttcggccccctgggcttcaacatcccctacgagttcaccgacggcgacctgagaatctgcatcagccagctgaagatgttcctggacgagtacgacgacatcccctacaaggtgctgaagtacaccgccggcgagatcaactacggcggcagagtgaccgacgactgggacagaagatgcatcatgaacatcctggaggacttctacaaccccgacgtgctgagccccgagcacagctacagcgccagcggcatctaccaccagatcccccccacctacgacctgcacggctacctgagctacatcaagagcctgcccctgaacgacatgcccgagatcttcggcctgcacgacaacgccaacatcaccttcgcccagaacgagaccttcgccctgctgggcaccatcatccagctgcagcccaagagcagcagcgccggcagccagggcagagaggagatcgtggaggacgtgacccagaacatcctgctgaaggtgcccgagcccatcaacctgcagtgggtgatggccaagtaccccgtgctgtacgaggagagcatgaacaccgtgctggtgcaggaggtgatcagatacaacagactgctgcaggtgatcacccagaccctgcaggacctgctgaaggccctgaagggcctggtggtgatgagcagccagctggagctgatggccgccagcctgtacaacaacaccgtgcccgagctgtggagcgccaaggcctaccccagcctgaagcccctgagcagctgggtgatggacctgctgcagagactggacttcctgcaggcctggatccaggacggcatccccgccgtgttctggatcagcggcttcttcttcccccaggccttcctgaccggcaccctgcagaacttcgccagaaagttcgtgatcagcatcgacaccatcagcttcgacttcaaggtgatgttcgaggcccccagcgagctgacccagagaccccaggtgggctgctacatccacggcctgttcctggagggcgccagatgggaccccgaggccttccagctggccgagagccagcccaaggagctgtacaccgagatggccgtgatctggctgctgcccacccccaacagaaaggcccaggaccaggacttctacctgtgccccatctacaagaccctgaccagagccggcaccctgagcaccaccggccacagcaccaactacgtgatcgccgtggagatccccacccaccagccccagagacactggatcaagagaggcgtggccctgatctgcgccctggactactag

SEQ ID NO: 79828 - DNA, 13416 bp, synthetic construct
  misc_feature 1..13416: note = Description of Artificial Sequence: Synthetic coding sequence
  source 1..13416: mol_type = other DNA
atggtgcccgaggaggtggaggtggagatcgacgagatccccgtgctgagcgaggagggcgaggaggaggaggagacctacagccagaaggtggagagcgtggacaaggtgagagccaagagagtgagcctgagaaccgagagcctgggccagcccctgaacagagaggacgaggagatggacaaggagatcagcgagaagctgcccagcaagagaaccgccaagcacatcatggagaagatgcacctgcacatgctgtgcacccccctgcccgaggagttcctggaccagaacgtggtgttcttcctgagaaacaccaaggaggccatcagcgaggccaccgacatgaaggaggccatggagatcatgcccgagaccctggagtacggcatcatcaacgccaacgtgctgcacttcctgaagaacatcatctgccaggtgttcctgcccgccctgagcttcaaccagcacagaaccagcaccaccgtgggcgtgaccagcggcgaggtgagcaacagcagcgagcacgagagcgacctgccccccatgcccggcgaggccgtggagtaccacagcatccagctgatcagagacgagttcctgatgaacgtgcagaagttcgccagcaacatccagagaaccatgcagcagctggagggcgagatcaagctggagatgcccatcatcagcgtggagggcgaggtgagcgacctggccgccgaccccgagaccgtggacatcctggagcagtgcgtgatcaactggctgaaccagatcagcaccgccgtggaggcccagctgaagaagaccccccagggcaagggccccctggccgagatcgagttctggagagagagaaacgccaccctgagcgccctgcacgagcagaccaagctgcccatcgtgagaaaggtgctggacgtgatcaaggagagcgacagcatgctggtggccaacctgcagcccgtgttcaccgagctgttcaagttccacaccgaggccagcgacaacgtgagattcctgagcaccgtggagagatacttcaagaacatcacccacggcagcggcttccacgtggtgctggacaccatccccgccatgatgagcgccctgagaatggtgtggatcatcagcagacactacaacaaggacgagagaatgatccccctgatggagagaatcgcctgggagatcgccgagagagtgtgcagagtggtgaacctgagaaccctgttcaaggagaacagagccagcgcccagagcaagaccctggaggccagaaacaccctgagactgtggaagaaggcctacttcgacaccagagccaagatcgaggccagcggcagagaggacagatgggagttcgacagaaagagactgttcgagagaaccgactacatggccaccatctgccaggacctgagcgacgtgctgcagatcctggaggagttctacaacatcttcggccccgagctgaaggccgtgaccggcgaccccaagagaatcgacgacgtgctgtgcagagtggacggcctggtgacccccatggagaacctgaccttcgaccccttcagcatcaagagcagccagttctggaagtacgtgatggacgagttcaagatcgaggtgctgatcgacatcatcaacaagatcttcgtgcagaacctggagaacccccccctgtacaagaaccacccccccgtggccggcgccatctactgggagagaagcctgttcttcagaatcaagcacaccatcctgagattccaggaggtgcaggagatcctggacagcgacagaggccaggaggtgaagcagaagtacctggaggtgggcagaaccatgaaggagtacgaggacagaaagtacgagcagtggatggaggtgaccgagcaggtgctgcccgccctgatgaagaagagcctgctgaccaagagcagcatcgccaccgaggagcccagcaccctggagagaggcgccgtgttcgccatcaacttcagccccgccctgagagagatcatcaacgagaccaagtacctggagcagctgggcttcaccgtgcccgagctggccagaaacgtggccctgcaggaggacaagttcctgagatacaccgccggcatccagagaatgctggaccactaccacatgctgatcggcaccctgaacgacgccgagagcgtgctgctgaaggaccacagccaggagctgctgagagtgttcagaagcggctacaagagactgaactggaacagcctgggcatcggcgactacatcaccggctgcaagcaggccatcggcaagttcgagagcctggtgcaccagatccacaagaacgccgacgacatcagcagcagactgaccctgatcgaggccatcaacctgttcaagtaccccgccgccaagagcgaggaggagctgcccggcgtgaaggagttcttcgagcacatcgagagagagagagccagcgacgtggaccacatggtgagatggtacctggccatcggccccctgctgaccaaggtggagggcctggtggtgcacaccaacaccggcaaggcccccaagctggccagctactacaagtactgggagaagaagatctacgaggtgctgaccaagctgatcctgaagaacctgcagagcttcaacagcctgatcctgggcaacgtgcccctgttccacaccgagaccatcctgaccgcccccgagatcatcctgcaccccaacaccaacgagatcgacaagatgtgcttccactgcgtgagaaactgcgtggagatcaccaagcacttcgtgagatggatgaacggcagctgcatcgagtgccccccccagaagggcgaggaggaggaggtggtgatcatcaacttctacaacgacatcagcctgaacccccagatcatcgagcaggccgtgatgatcccccagaacgtgcacagaatcctgatcaacctgatgaagtacctgcagaagtggaagagatacagacccctgtggaagctggacaaggccatcgtgatggagaagttcgccgccaagaagcccccctgcgtggcctacgacgagaagctgcagttctacagcaagatcgcctacgaggtgatgagacaccccctgatcaaggacgagcactgcatcagactgcagctgagacacctggccaacaccgtgcaggagaacgccaagagctgggtgatcagcctgggcaagctgctgaacgagagcgccaaggaggagctgtacaacctgcacgaggagatggagcacctggccaagaacctgagaaagatccccaacaccctggaggacctgaagttcgtgctggccaccatcgccgagatcagaagcaagagcctggtgatggagctgagatacagagacgtgcaggagagatacagaaccatggccatgtacaacctgttcccccccgacgccgagaaggagctggtggacaagatcgagagcatctggagcaacctgttcaacgacagcgtgaacgtggagcacgccctgggcgacatcaagagaaccttcaccgagctgaccagaggcgagatcatgaactacagagtgcagatcgaggagttcgccaagagattctacagcgagggccccggcagcgtgggcgacgacctggacaagggcgtggagctgctgggcgtgtacgagagagagctggccagacacgagaagagcagacaggagctggccaacgccgagaagctgttcgacctgcccatcaccatgtaccccgagctgctgaaggtgcagaaggagatgagcggcctgagaatgatctacgagctgtacgagggcctgaaggtggccaaggaggagtggagccagaccctgtggatcaacctgaacgtgcagatcctgcaggagggcatcgagggcttcctgagagccctgagaaagctgcccagacccgtgagaggcctgagcgtgacctactacctggaggccaagatgaaggccttcaaggacagcatccccctgctgctggacctgaagaacgaggccctgagagacagacactggaaggagctgatggagaagaccagcgtgttcttcgagatgaccgagaccttcaccctggagaacatgttcgccatggagctgcacaagcacaccgacgtgctgaacgagatcgtgaccgccgccatcaaggaggtggccatcgagaaggccgtgaaggagatcctggacacctgggagaacatgaagttcaccgtggtgaagtactgcaagggcacccaggagagaggctacatcctgggcagcgtggacgagatcatccagagcctggacgacaacaccttcaacctgcagagcatcagcggcagcagattcgtgggccccttcctgcagaccgtgcacaagtgggagaagaccctgagcctgatcggcgaggtgatcgagatctggatgctggtgcagagaaagtggatgtacctggagagcatcttcatcggcggcgacatcagaagccagctgcccgaggaggccaagaagttcgacaacatcgacaaggtgttcaagagaatcatgggcgagaccctgaaggaccccgtgatcaagagatgctgcgaggcccccaacagactgagcgacctgcagaacgtgagcgagggcctggagaagtgccagaagagcctgaacgactacctggacagcaagagaaacgccttccccagattcttcttcatcagcgacgacgagctgctgagcatcctgggcagcagcgaccccctgtgcgtgcaggagcacatgatcaagatgtacgacaacatcgccagcctgagattcaacgacggcgacagcggcgagaagctggtgagcgccatgatcagcgccgagggcgaggtgatggagttcagaaagatcctgagagccgagggcagagtggaggactggatgaccgccgtgctgaacgagatgagaagaaccaacagactgatcaccaaggaggccatcttcagatactgcgaggacagaagcagagtggactggatgctgctgtaccagggcatggtggtgctggccgccagccaggtgtggtggacctgggaggtggaggacgtgttccacaaggcccagaagggcgagaagcaggccatgaagaactacggcagaaagatgcacagacagatcgacgagctggtgaccagaatcaccatgcccctgagcaagaacgacagaaagaagtacaacaccgtgctgatcatcgacgtgcacgccagagacatcgtggacagcttcatcagaggcagcatcctggaggccagagagttcgactgggagagccagctgagattctactgggacagagagcccgacgagctgaacatcagacagtgcaccggcaccttcggctacggctacgagtacatgggcctgaacggcagactggtgatcacccccctgaccgacagaatctacctgaccctgacccaggccctgagcatgtacctgggcggcgcccccgccggccccgccggcaccggcaagaccgagaccaccaaggacctggccaaggccctgggcctgctgtgcgtggtgaccaactgcggcgagggcatggactacagagccgtgggcaagatcttcagcggcctggcccagtgcggcgcctggggctgcttcgacgagttcaacagaatcgacgccagcgtgctgagcgtgatcagcagccagatccagaccatcagaaacgccctgatccaccagctgaccaccttccagttcgagggccaggagatcagcctggacagcagaatgggcatcttcatcaccatgaaccccggctacgccggcagaaccgagctgcccgagagcgtgaaggccctgttcagacccgtggtggtgatcgtgcccgacctgcagcagatctgcgagatcatgctgttcagcgagggcttcctggaggccaagaccctggccaagaagatgaccgtgctgtacaagctggccagagagcagctgagcaagcagtaccactacgacttcggcctgagagccctgaagagcgtgctggtgatggccggcgagctgaagagaggcagcagcgacctgagagaggacgtggtgctgatgagagccctgagagacatgaacctgcccaagttcgtgttcgaggacgtgcccctgttcctgggcctgatcagcgacctgttccccggcctggactgccccagagtgagataccccgacttcaacgacgccgtggagcaggtgctggaggagaacggctacgccgtgctgcccatccaggtggacaaggtggtgcagatgttcgagaccatgctgaccagacacaccaccatggtggtgggccccaccagaggcggcaagagcgtggtgatcaacaccctgtgccaggcccagaccaagctgggcctgaccaccaagctgtacatcctgaaccccaaggccgtgagcgtgatcgagctgtacggcatcctggaccccaccaccagagactggaccgacggcgtgctgagcaacatcttcagagagatcaacaagcccaccgacaagaaggagagaaagtacatcctgttcgacggcgacgtggacgccctgtgggtggagaacatgaacagcgtgatggacgacaacagactgctgaccctggccaacggcgagagaatcagactgcaggcccactgcgccctgctgttcgaggtgggcgacctgcagtacgccagccccgccaccgtgagcagatgcggcatggtgtacgtggaccccaagaacctgaagtacagaccctactggaagaagtgggtgaaccagatccccaacaaggtggagcagtacaacctgaacagcctgttcgagaagtacgtgccctacctgatggacgtgatcgtggagggcatcgtggacggcagacaggccgagaagctgaagaccatcgtgccccagaccgacctgaacatggtgacccagctggccaagatgctggacgccctgctggagggcgagatcgaggacctggacctgctggagtgctacttcctggaggccctgtactgcagcctgggcgccagcctgctggaggacggcagaatgaagttcgacgagtacatcaagagactggccagcctgagcaccgtggacaccgagggcgtgtgggccaaccccggcgagctgcccggccagctgcccaccctgtacgacttccacttcgacaacaagagaaaccagtgggtgccctggagcaagctggtgcccgagtacatccacgcccccgagagaaagttcatcaacatcctggtgcacaccgtggacaccaccagaaccacctggatcctggagcagatggtgaagatcaagcagcccgtgatcttcgtgggcgagagcggcaccagcaagaccgccaccacccagaacttcctgaagaacctgagcgaggagaccaacatcgtgctgatggtgaacttcagcagcagaaccaccagcatggacatccagagaaacctggaggccaacgtggagaagagaaccaaggacacctacggcccccccatgggcaagagactgctggtgttcatggacgacatgaacatgcccagagtggacgagtacggcacccagcagcccatcgccctgctgaagctgctgctggagaagggctacctgtacgacagaggcaaggagctgaactgcaagagcatcagagacctgggcttcatcgccgccatgggcaaggccggcggcggcagaaacgaggtggaccccagattcatcagcctgttcagcgtgttcaacgtgcccttccccagcgaggagagcctgcacctgatctacagcagcatcctgaagggccacaccagcaccttccacgagagcatcgtggccgtgagcggcaagctgaccttctgcaccctggccctgtacaagaacatcgtgcaggacctgccccccacccccagcaagttccactacatcttcaacctgagagacctgagcagagtgttcaacggcctggtgctgaccaaccccgagagattccagaccgtggcccagatggtgagagtgtggagaaacgagtgcctgagagtgttccacgacagactgatcagcgagaccgacaagcagctggtgcagcagcacatcggcagcctggtggtggagcacttcaaggacgacgtggaggtggtgatgagagaccccatcctgttcggcgacttccagatggccctgcacgagggcgagcccagaatctacgaggacatccaggactacgaggccgccaaggccctgttccaggagatcctggaggagtacaacgagagcaacaccaagatgaacctggtgctgttcgacgacgccctggagcacctgaccagagtgcacagaatcatcagaatggacagaggccacgccctgctggtgggcgtgggcggcagcggcaagcagagcctgagcagactggccgccttcaccgccagctgcgaggtgttcgagatcctgctgagcagaggctacagcgagaacagcttcagagaggacctgaagagcctgtacctgaagctgggcatcgagaacaaggccatgatcttcctgttcaccgacgcccacgtggccgaggagggcttcctggagctgatcaacaacatgctgaccagcggcatcgtgcccgccctgttcagcgaggaggagaaggagagcatcctgagccagatcggccaggaggccctgaagcagggcatgggccccgccaaggagagcgtgtggcagtacttcgtgaacaagagcgccaacaacctgcacatcgtgctgggcatgagccccgtgggcgacaccctgagaacctggtgcagaaacttccccggcatggtgaacaacaccggcatcgactggttcatgccctggcccccccaggccctgcacgccgtggccaagagcttcctgggctacaaccccatgatccccgccgagaacatcgagaacgtggtgaagcacgtggtgctggtgcaccagagcgtggaccactacagccagcagttcctgcagaagctgagaagaagcaactacgtgacccccaagaactacctggacttcatcaacacctacagcaagctgctggacgagaagacccagtgcaacatcgcccagtgcaagagactggacggcggcctggacaagctgaaggaggccaccatccagctggacgagctgaaccagaagctggccgagcagaagatcgtgctggccgagaagagcgccgcctgcgaggccctgctggaggagatcgccgtgaacaccgccgtggccgaggagaagaagaagctggccgaggagaaggccatggagatcgaggagcagaacaaggtgatcgccatggagaaggccgaggccgagaccaccctggccgaggtgatgcccatcctggaggccgccaagctggagctgcagaagctggacaagagcgacgtgaccgagatcagaagcttcgccaagccccccaagcaggtgcagaccgtgtgcgagtgcatcctgatcatgaagggctacaaggagctgaactggaagaccgccaagggcgtgatgagcgaccccaacttcctgagaagcctgatggagatcgacttcgacagcatcacccagagccaggtgaagaacatcaagggcctgctgaagaccctgaacaccaccaccgaggagatggaggccgtgagcaaggccggcctgggcatgctgaagttcgtggaggccgtgatgggctactgcgacgtgttcagagagatcaagcccaagagagagaaggtggccagactggagagaaacttctacctgaccaagagagagctggagagaatccagaacgagctggccgccatccagaaggagctggagaccctgggcgccaagtacgaggccgccatcctggagaagcagaagctgcaggaggaggccgagatcatggagagaagactgatcgccgccgacaagctgatcagcggcctgggcagcgagaacatcagatggctgaacgacctggacgagctgatgcacagaagagtgaagctgctgggcgactgcctgctgtgcgccgccttcctgagctacgagggcgccttcacctgggagttcagagacgagatggtgaacagaatctggcagaacgacatcctggagagagagatccccctgagccagcccttcagactggagagcctgctgaccgacgacgtggagatcagcagatggggcagccagggcctgccccccgacgagctgagcgtgcagaacggcatcctgaccaccagagccagcagattccccctgtgcatcgacccccagcagcaggccctgaactggatcaagagaaaggaggagaagaacaacctgagagtggccagcttcaacgaccccgacttcctgaagcagctggagatgagcatcaagtacggcacccccttcctgttcagagacgtggacgagtacatcgaccccgtgatcgacaacgtgctggagaagaacatcaaggtgagccagggcagacagttcatcatcctgggcgacaaggaggtggactacgacagcaacttcagactgtacctgaacaccaagctggccaaccccagatacagccccagcgtgttcggcaaggccatggtgatcaactacaccgtgaccctgaagggcctggaggaccagctgctgagcgtgctggtggcctacgagagaagagagctggaggagcagagagagcacctgatccaggagaccagcgagaacaagaacctgctgaaggacctggaggacagcctgctgagagagctggccaccagcaccggcaacatgctggacaacgtggacctggtgcacaccctggaggagaccaagagcaaggccaccgaggtgagcgagaagctgaagctggccgagaagaccgccctggacatcgacagactgagagacggctacagacccgccgccagaagaggcgccatcctgttcttcgtgctgagcgagatggccctggtgaacagcatgtaccagtacagcctgatcgccttcctggaggtgttcagactgagcctgaagaagagcctgcccgacagcatcctgatgaagagactgagaaacatcatggacaccctgaccttcagcatctacaaccacggctgcaccggcctgttcgagagacacaagctgctgttcagcttcaacatgaccatcaagatcgagcaggccgagggcagagtgccccaggaggagctggacttcttcctgaagggcaacatcagcctggagaagagcaagagaaagaagccctgcgcctggctgagcgaccagggctgggaggacatcatcctgctgagcgagatgttcagcgacaacttcggccagctgcccgacgacgtggagaacaaccagaccgtgtggcaggagtggtacgacctggacagcctggagcagttccccgtgcccctgggctacgacaacaacatcacccccttccagaagctgctgatcctgagatgcttcagagtggacagagtgtacagagccgtgaccgactacgtgaccgtgaccatgggcgagaagtacgtgcagccccccatgatcagcttcgaggccatcttcgagcagagcaccccccacagccccatcgtgttcatcctgagccccggcagcgaccccgccaccgacctgatgaagctggccgagagaagcggcttcggcggcaacagactgaagttcctggccatgggccagggccaggagaaggtggccctgcagctgctggagaccgccgtggccagaggccagtggctgatgctgcagaactgccacctgctggtgaagtggctgaaggacctggagaagagcctggagagaatcaccaagccccaccccgacttcagactgtggctgaccaccgaccccaccaagggcttccccatcggcatcctgcagaagagcctgaaggtggtgaccgagccccccaacggcctgaagctgaacatgagagccacctacttcaagatcagccacgagatgctggaccagtgcccccaccccgccttcaagcccctggtgtacgtgctggccttcttccacgccgtggtgcaggagagaagaaagttcggcaagatcggctggaacgtgtactacgacttcaacgagagcgacttccaggtgtgcatggagatcctgaacacctacctgaccaaggccttccagcagagagaccccagaatcccctggggcagcctgaagtacctgatcggcgaggtgatgtacggcggcagagccatcgacagcttcgacagaagaatcctgaccatctacatggacgagtacctgggcgacttcatcttcgacaccttccagcccttccacttcttcagaaacaaggaggtggactacaagatccccgtgggcgacgagaaggagaagttcgtggaggccatcgaggccctgcccctggccaacacccccgaggtgttcggcctgcaccccaacgccgagatcggctactacacccaggccgccagagacatgtgggcccacctgctggagctgcagccccagaccggcgagagcagcagcggcatcagcagagacgactacatcggccaggtggccaaggagatcgagaacaagatgcccaaggtgttcgacctggaccaggtgagaaagagactgggcaccggcctgagccccaccagcgtggtgctgctgcaggagctggagagattcaacaagctggtggtgagaatgaccaagagcctggccgagctgcagagagccctggccggcgaggtgggcatgagcaacgagctggacgacgtggccagaagcctgttcatcggccacatccccaacatctggagaagactggcccccgacaccctgaagagcctgggcaactggatggtgtacttcctgagaagattcagccagtacatgctgtgggtgaccgagagcgagcccagcgtgatgtggctgagcggcctgcacatccccgagagctacctgaccgccctggtgcaggccacctgcagaaagaacggctggcccctggacagaagcaccctgttcacccaggtgaccaagttccaggacgccgacgaggtgaacgagagagccggccagggctgcttcgtgagcggcctgtacctggagggcgccgactgggacatcgagaagggctgcctgatcaagagcaagcccaaggtgctggtggtggacctgcccatcctgaagatcatccccatcgaggcccacagactgaagctgcagaacaccttcagaacccccgtgtacaccaccagcatgagaagaaacgccatgggcgtgggcctggtgttcgaggccgacctgttcaccaccagacacatcagccactgggtgctgcagggcgtgtgcctgaccctgaacagcgactag

SEQ ID NO: 79829 - DNA, 13572 bp, synthetic construct
  misc_feature 1..13572: note = Description of Artificial Sequence: Synthetic coding sequence
  source 1..13572: mol_type = other DNA
atggccgcccaggtggccgccagagaggccagagacttcagagaggcccccaccctgagactgaccagcggcgccggcctggaggccgtgggcgccgtggagctggaggaggaggaggagaacgaggaggaggccgccgccagaagagccagaagcttcgcccaggacgccagagtgagattcctgggcggcagactggccatgatgctgggcttcaccgaggagaagtggagccagtacctggagagcgaggacaacagacaggtgctgggcgagttcctggagagcaccagccccgcctgcctggtgttcagcttcgccgccagcggcagactggccgccagccaggagatccccagagacgccaaccacaagctggtgttcatcagcaagaagatcaccgagagcatcggcgtgaacgacttcagccaggtggtgctgttcggcgagctgcccgccctgagcctgggccacgtgagcgccttcctggacgagatcctggtgcccgtgctgagcaacaagaacaaccacaagagctggagctgcttcaccagccaggacatggagtaccacatcgaggtgatgaagaagaagatgtacatcttcagaggcaagatgagcagaagaaccctgctgcccatccccaccgtggccggcaagatggacctggaccagaactgcagcgagaacaagccccccagcaacgagagaatcatcctgcacgccatcgagagcgtggtgatcgagtggagccaccagatccaggagatcatcgagagagacagcgtgcagagactgctgaacggcctgcacctgagcccccaggccgagctggacttctggatgatgagaagagagaacctgagctgcatctacgaccagctgcaggcccccgtggtgctgaagatggtgaagatcctgaccaccaagcagagcagctacttccccaccctgaaggacatcttcctggccgtggagaacgccctgctggaggcccaggacgtggagctgtacctgagacccctgagaagacacatccagtgcctgcaggagaccgagttcccccagaccagaatcctgatcgcccccctgttccacaccatctgcctgatctggagccacagcaagttctacaacacccccgccagagtgatcgtgctgctgcaggagttctgcaacctgttcatcaaccaggccaccgcctacctgagccccgaggacctgctgagaggcgagatcgaggagagcctggagaaggtgcaggtggccgtgaacatcctgaagaccttcaagaacagcttcttcaactacagaaagaagctggccagctacttcatgggcagaaagctgagaccctgggacttccagagccacctggtgttctgcagattcgacaagttcctggacagactgatcaagatcgaggacatcttcgccaccaccctggagttcgagaagctggagagactggagttcggcggcaccaagggcgccatcctgaacggccaggtgcacgagatgagcgaggagctgatggagctgtgcaagctgttcaagcagagcacctacgaccccagcgactgcaccaacatggagttcgagagcgactacgtggccttcaagagcaagaccctggagttcgacagaagactgggcaccatcatctgcgaggccttcttcaactgcaacggcctggaggccgccttcaagctgctgaccatcttcggcaacttcctggagaagcccgtggtgatggagatcttcagcctgcactacagcaccctggtgcacatgttcaacaccgagctggacgtgtgcaagcagctgtacaacgagcacatgaagcagatcgagtgcggccacgtggtgctgaacaagaacatgcccttcaccagcggcaacatgaagtgggcccagcaggtgctgcagagactgcagatgttctggagcaacttcgccagcctgagatacctgttcctgggcaaccccgaccacgccctggtgtaccagaagtacgtggagatgaccaccctgctggaccagttcgagagcagaatctacaacgagtggaagagcaacgtggacgagatctgcgagttcaacctgaaccagcccctggtgaagttcagcgccatcaacggcctgctgtgcgtgaacttcgaccccaagctggtggccgtgctgagagaggtgaagtacctgctgatgctgaagaagcaggacatccccgacagcgccctggccatcttcaagaagagaaacaccatcctgaagtacatcggcaacctggacctgctggtgcagggctacaacaagctgaagcagaccctgctggaggtggagtaccccctgatcgaggacgagctgagagccatcgacgagcagctgaccgccgccaccacctggctgacctggcaggacgactgctggggctacatcgagagagtgagagccgccaccagcgagctggagcacagagtggagagaacccagaagaacgtgaaggtgatccagcagaccatgagaggctgggccagatgcgtgctgccccccagaagagagcacagaagagaggccgccttcaccctggaggacaagggcgacctgttcaccaagaagtacaagctgatccagggcgacggctgcaagatccacaacctggtggaggagaacagaaagctgttcaaggccaaccccagcctggacacctggaagatctacgtggagttcatcgacgacatcgtggtggagggcttcttccaggccatcatgcacgacctggacttcttcctgaagaacaccgagaagcagctgaagcccgcccccttcttccaggcccagatgatcctgctgccccccgagatcgtgttcaagcccagcctggacagagaggccggcgacggcttctacgacctggtggaggagatgctgtgcaacagcttcagaatgagcgcccagatgaacagaatcgccacccacctggagatcaagaactaccagaacgacatggacaacatgctgggcctggccgaggtgagacaggagatcatgaacagagtggtgaacgtgatcaacaaggtgctggacttcagaaacaccctggagacccacacctacctgtgggtggacgacagagccgagttcatgaagcacttcctgctgtacggccacgccgtgagcagcgacgagatggacgcccacgccaacgaggagatccccgagcagccccccaccctggagcagttcaaggagcagatcgacatctacgaggccctgtacgtgcagatgagcaagttcgaggacttcagagtgttcgacagctggttcaaggtggacatgaagcccttcaaggtgagcctgctgaccatcatcaagaagtggagctggatgttccaggagcacctgctgagattcgtgatcgacagcctgaacgagctgcaggagttcatcaaggagaccgacagcggcctgcagagagagctgaacgagggcgaccacgacggcctggtggacatcatggtgcacctgctggccgtgagaagcagacagagagccaccgacgagctgttcgagcccctgaaggagaccatcaccctgctggagagctacggccagaagatgcccgagcaggtgtacatccagctggaggagctgcccgagagatgggagaccaccaagaagatcgccgccaccgtgagacacgaggtgagccccctgcacaacgccgaggtgaccctgatcagaaagaagtgcatcctgttcgacgccaagcaggccgagttcagagagagattcagacactacgcccccctgggcttcaacgccgagaacccctacaccgccctggacaaggccaacgaggagctggaggccctggaggaggagatgctgcagatgcaggagagcaccagactgttcgaggtggccctgcccgagtacaagcagatgaagcagtgcagaaaggagatcaagctgctgaagggcctgtgggacgtgatcatctacgtgagaagaagcatcgacaactggaccaagacccagtggagacagatccacgtggagcagatggacgtggagctgagaagattcgccaaggccagcagcatcaccgagatctggagcctgaacaaggaggtgagagtgtgggacgcctacaccggcctggagggcaccgtgaaggacatgaccgccagcctgagagccatcaccgagctgcagagccccgccctgagagacagacactggcaccagctgatgaaggccatcggcgtgaagttcctgatcaacgaggccaccaccctggccgacctgctggccctgagactgcacagagtggaggacgacgtgagaagaatcgtggacaaggccgtgaaggagctgggcaccgagaaggtgatcaccgagatcagccagacctgggccaccatgaagttcagctacgaggtgcactacagaaccggcatccccctgctgaagagcgacgagcagctgttcgagaccctggagcacaaccaggtgcagctgcagaccctgctgcagagcaagtacgtggagtacttcatcgagcaggtgctgagctggcagaacaagctgaacatcgccgacctggtgatcttcacctggatggaggtgcagagaacctggagccacctggagagcatcttcgtgtgcagcgaggacatcagaatccagctggtgaaggacgccagaagattcgacggcgtggacgccgagttcaaggagctgatgttcaagaccgccaaggtggagaacgtgctggaggccacctgcagacccaacctgtacgagaagctgaaggacctgcagagcagactgagcctgtgcgagaaggccctggccgagtacctggagaccaagagaatcgccttccccagattctacttcgtgagcagcgccgacctgctggacatcctgagcaagggcgcccagcccaagcaggtgacctgccacctggccaagctgttcgacagcatcgccgacctgcagttcgaggacaaccaggacgtgagcgcccacagagccgtgggcatgtacagcaaggagaaggagtacgtgcccttccaggccgagtgcgagtgcgtgggccacgtggagacctggctgctgcagctggagcagaccatgcaggagaccgtgagacacagcatcaccgaggccatcgtggcctacgaggagaagcccagagagctgtggatcttcgacttccccgcccaggtggccctgaccagcagccagatctggtggaccaccgacgtgggcatcgccttcagcagactggaggagggctacgagaccgccctgaaggacttccacaagaagcagatcagccagctgaacaccctgatcaccctgctgctgggcgagctgccccccggcgacagacagaagatcatgaccatctgcaccatcgacgtgcacgccagagacgtggtggccaagctgatcagccagaagcaggtggtggtgagcccccaggccttcacctggctgagccagctgagacacagatgggaggacacccagaagcactgcttcgtgaacatctgcgacgcccagttccagtacttctacgagtacctgggcaacagccccagactggtgatcacccccctgaccgacagatgctacatcaccctgacccagagcctgcacctgaccatgagcggcgcccccgccggccccgccggcaccggcaagaccgagaccaccaaggacctgggcagagccctgggcatgatggtgtacgtgttcaactgcagcgagcagatggactacaagagcatcggcaacatctacaagggcctggtgcagaccggcgcctggggctgcttcgacgagttcaacagaatcagcgtggaggtgctgagcgtggtggccgtgcaggtgaagatgatccacgacgccatcagaaacagaaagaagagattcgtgttcctgggcgaggccatcaccctgaagcccagcgtgggcatcttcatcaccatgaaccccggctacgccggcagaaccgagctgcccgagaacctgaaggccctgttcagaccctgcgccatggtggcccccgacatcgagctgatctgcgagatcctgctggtggccgagggcttcgtggacgccagagccctggccagaaagttcatcaccctgtacaccctgtgcaaggagctgctgagcaagcaggaccactacgactggggcctgagagccatcaagagcgtgctggtggtggccggcagcctgaagagaggcgacaagaacagacccgaggaccaggtgctgatgagagccctgagagacttcaacatgcccaagatcgtgaccgacgacatccccgtgttcctgggcctggtgggcgacctgttccccgccctggacgtgcccagaagaagaaagctgcacttcgagcagatggtgagacagagcaccctggagctgagactgcagcccgaggagagcttcatcctgaaggtggtgcagctggaggagctgctggccgtgagacacagcgtgttcgtggtgggcaacgccggcaccggcaagagcaagatcctgagaaccctgaacagaacctacgtgaacatgaagcagaagcccgtgtggaacgacctgaaccccaaggccgtgaccaccgacgagctgttcggcttcatccaccacgccaccagagagtggaaggacggcaagatcgtgtacagctacttcatcggcctgttcagcagcatcctgagagagcaggccaacctgaagcacgacggccccaagtggatcgtgctggacggcgacatcgaccccatgtggatcgagagcctgaacaccgtgatggacgacaacaaggtgctgaccctggccagcaacgagagaatcgccctgacccccttcatgagactgctgttcgagatccaccacctgagaagcgccacccccgccaccgtgagcagagccggcatcctgtacgtgaacccccaggacctgggctggaacccctacgtggccagctggatcgacagaagaagacaccagagcgagaaggccaacctgaccatcctgttcgacaagtacgtgcccgcctgcctggacaagctgagaaccagcttcaagaccatcaccagcatccccgagagcagcctggtgcagaccctgtgcgtgctgctggagtgcctgctgacccccgagaacgtgcccagcgacagccccaaggaggtgtacgaggtgtacttcgtgttcgcctgcatctgggccttcggcggcaccctgctgcaggaccagatcagcgactaccaggccgacttcagcagatggtggcagaaggagatgaaggccgtgaagttccccagccagggcaccatcttcgactactacgtggaccacaagaccaagaagctgctgccctgggccgacaagatcgcccagttcaccatggaccccgacgtgcccctgcagaccgtgctggtgcacaccaccgagaccgccagactgagatacttcatggagctgctgctggagaagggcaagcccctgatgctggtgggcaacgccggcgtgggcaagaccgtgttcgtgggcgacaccctggccagcctgagcgaggactacatcgtgagcagagtgcccttcaactactacaccaccagcaccgccctgcagaagatcctggagaagcccctggagaagaaggccggccacaactacggccccggcggcaacaagaagctgatctacttcatcgacgacatgaacatgcccgaggtggacctgtacggcaccgtgcagccccacaccctgatcagacagcacatcgactacggccactggtacgacagacagaaggtgatgctgaaggagatccacaactgccagtacgtggcctgcatgaaccccatggtgggcagcttcaccatcaaccccagactgcagagacacttcaccgtgttcgccttcaacttccccagcctggacgccctgaacaccatctacggccagatcttcagcttccacttccagcagcaggccttcgcccccagcatcctgagaagcggccccaccctgatccaggccaccatcgccttccaccagaccatgatgtgcaacttcctgcccaccgccatcaagttccactacatcttcaacctgagagacctgagcaacgtgttccagggcatcctgttcgccagccccgagtgcctgaagggccccctggacctgatccacctgtggctgcacgagagcgccagagtgtacggcgacaagctgatcgacaagaaggactgcgacctgttccagagaagaatgctggagaccgcctacaagtacttcgagggcatcgacagccacatgctgctgcagcagcccctgatctactgccacttcgccgacagaggcaaggacccccactacatgcccgtgaaggactgggaggtgctgaagaccatcctgaccgagaccctggacaactacaacgagctgaacgccgccatgcacctggtgctgttcgaggacgccatgcagcacgtgtgcagaatcagcagaatcctgagaaccccccagggctgcgccctgctggtgggcgtgggcggcagcggcaagcagagcctgagcagactggccgcctacctgagaggcctggaggtgttccagatcaccctgaccgagggctacggcatccaggagctgagagtggacctggccaacctgtacatcagaaccggcgccaagaacatgcccaccgtgttcctgctgaccgacgcccaggtgctggacgagagcttcctggtgctgatcaacgacctgctggccagcggcgagatccccgacctgttcagcgacgaggacgtggacaagatcatcagcggcatccacaacgaggtgcacgccctgggcatggtggacagcagagagaactgctggaagttcttcatggccagagtgagactgcagctgaagatcatcctgtgcttcagccccgtgggcagaaccctgagagtgagagccagaaagttccccgccatcgtgaactgcaccgccatcgactggttccacgcctggccccaggaggccctggtgagcgtgagcagaagattcatcgaggagaccaagggcatcgagcccgtgcacaaggacagcatcagcctgttcatggcccacgtgcacaccaccgtgaacgagatgagcaccagatactaccagaacgagagaagacacaactacaccacccccaagagcttcctggagcagatcagcctgttcaagaacctgctgaagaagaagcagaacgaggtgagcgagaagaaggagagactggtgaacggcatccagaagctgaagaccaccgccagccaggtgggcgacctgaaggccagactggccagccaggaggccgagctgcagctgagaaaccacgacgccgaggccctgatcaccaagatcggcctgcagaccgagaaggtgagcagagagaagaccatcgccgacgccgaggagagaaaggtgaccgccatccagaccgaggtgttccagaagcagagagagtgcgaggccgacctgctgaaggccgagcccgccctggtggccgccaccgccgccctgaacaccctgaacagagtgaacctgagcgagctgaaggccttccccaacccccccatcgccgtgaccaacgtgaccgccgccgtgatggtgctgctggcccccagaggcagagtgcccaaggacagaagctggaaggccgccaaggtgttcatgggcaaggtggacgacttcctgcaggccctgatcaactacgacaaggagcacatccccgagaactgcctgaaggtggtgaacgagcactacctgaaggaccccgagttcaaccccaacctgatcagaaccaagagcttcgccgccgccggcctgtgcgcctgggtgatcaacatcatcaagttctacgaggtgtactgcgacgtggagcccaagagacaggccctggcccaggccaacctggagctggccgccgccaccgagaagctggaggccatcagaaagaagctggtggacctggacagaaacctgagcagactgaccgccagcttcgagaaggccaccgccgagaaggtgagatgccaggaggaggtgaaccagaccaacaagaccatcaagctggccaacagactggtgaaggagctggaggccaagaagatcagatggggccagagcatcaagagcttcgaggcccaggagaagaccctgtgcggcgacgtgctgctgaccgccgccttcgtgagctacgtgggccccttcaccagacagtacagacaggagctggtgcactgcaagtgggtgcccttcctgcagcagaaggtgagcatccccctgaccgagggcctggacctgatcagcatgctgaccgacgacgccaccatcgccgcctggaacaacgagggcctgcccagcgacagaatgagcaccgagaacgccgccatcctgacccactgcgagagatggcccctggtgatcgacccccagcagcagggcatcaagtggatcaagaacaagtacggcatggacctgaaggtgacccacctgggccagaagggcttcctgaacgccatcgagaccgccctggccttcggcgacgtgatcctgatcgagaacctggaggagaccatcgaccccgtgctggaccccctgctgggcagaaacaccatcaagaagggcaagtacatcagaatcggcgacaaggagtgcgagttcaacaagaacttcagactgatcctgcacaccaagctggccaacccccactacaagcccgagctgcaggcccagaccaccctgctgaacttcaccgtgaccgaggacggcctggaggcccagctgctggccgaggtggtgagcatcgagagacccgacctggagaagctgaagctggtgctgaccaagcaccagaacgacttcaagatcgagctgaagtacctggaggacgacctgctgctgagactgagcgccgccgagggcagcttcctggacgacaccaagctggtggagagactggaggccaccaagaccaccgtggccgagatcgagcacaaggtgatcgaggccaaggagaacgagagaaagatcaacgaggccagagagtgctacagacccgtggccgccagagccagcctgctgtacttcgtgatcaacgacctgcagaagatcaaccccctgtaccagttcagcctgaaggccttcaacgtgctgttccacagagccatcgagcaggccgacaaggtggaggacatgcagggcagaatcagcatcctgatggagagcatcacccacgccgtgttcctgtacaccagccaggccctgttcgagaaggacaagctgaccttcctgagccagatggccttccagatcctgctgagaaagaaggagatcgaccccctggagctggacttcctgctgagattcaccgtggagcacacccacctgagccccgtggacttcctgaccagccagagctggagcgccatcaaggccatcgccgtgatggaggagttcagaggcatcgacagagacgtggagggcagcgccaagcagtggagaaagtgggtggagagcgagtgccccgagaaggagaagctgccccaggagtggaagaagaagagcctgatccagaagctgatcctgctgagagccatgagacccgacagaatgacctacgccctgagaaacttcgtggaggagaagctgggcgccaagtacgtggagagaaccagactggacctggtgaaggccttcgaggagagcagccccgccacccccatcttcttcatcctgagccccggcgtggacgccctgaaggacctggagatcctgggcaagagactgggcttcaccatcgacagcggcaagttccacaacgtgagcctgggccagggccaggagaccgtggccgaggtggccctggagaaggccagcaagggcggccactgggtgatcctgcagaacgtgcacctggtggccaagtggctgggcaccctggagaagctgctggagagattcagccagggcagccacagagactacagagtgttcatgagcgccgagagcgcccccacccccgacgagcacatcatcccccagggcctgctggagaacagcatcaagatcaccaacgagccccccaccggcatgctggccaacctgcacgccgccctgtacaacttcgaccaggacaccctggagatctgcagcaaggagcaggagttcaagagcatcctgttcagcctgtgctacttccacgcctgcgtggccggcagactgagattcggcccccagggctggagcagaagctaccccttcaaccccggcgacctgaccatctgcgccagcgtgctgtacaactacctggaggccaacagcaaggtgccctgggaggacctgagatacctgttcggcgagatcatgtacggcggccacatcaccgacgactgggacagaaagctgtgcagagtgtacctggaggagttcatgaaccccagcctgaccgaggacgagctgatgctggcccccggcttcgccgcccccccctacctggactacgccggctaccaccagtacatcgaggagatgctgccccccgagagccccgccctgtacggcctgcaccccaacgccgagatcgagttcctgaccgtgaccagcaacaccctgttcagaaccctgctggagatgcagcccagaaacgccctgagcggcgacgagctgggccagagcaccgaggagaaggtgaagaacgtgctggacgacatcctggagaagctgcccgaggagttcaacatggccgagatcatgcagaagaacagcaacagaagcccctacgtgctggtgtgcttccaggagtgcgagagaatgaacatcctgatcagagagatcagaatcagcctggagcagctggacctgagcctgaagggcgagctggccctgagccccgccgtggaggcccagcagttcgccctgagctacgacaccgtgcccgacacctggagcaagctggcctaccccagcacctacggcctggcccagtggttcaacgacctgctgctgagatgcagagagctggacacctggacccaggacctgaccctgcccgccgtggtgtggctgagcggcttcttcaacccccagagcttcctgaccgccatcatgcagaccatggccagaaagaacgagtggcccctggacaagaccagactgaccgccgacgtgaccaagaagaccaaggaggactacggccacccccccagagagggcgcctacctgcacggcctgttcatggagggcgccagatgggacacccaggccggcaccatcgtggaggccagactgaaggagctggcctgccccatgcccgtgatcttcgccaaggccacccccgtggacagacaggagaccaagcagacctacgagtgccccgtgtacagaaccaagctgagaggccccagctacatctggaccttcagactgaagagcgaggagaagaccgccaagtgggtgctggccggcgtggccctgctgctggaggcctag

SEQ ID NO: 79830 - DNA, 1374 bp, synthetic construct
  misc_feature 1..1374: note = Description of Artificial Sequence: Synthetic coding sequence
  source 1..1374: mol_type = other DNA
atgagcgacgccaacaaggccgccatcgccgccgagaaggaggccctgaacctgaagctgccccccatcgtgcacctgcccgagaacatcggcgtggacacccccacccagagcaagctgctgaagtacagaagaagcaaggagcagcagcagaagatcaaccagctggtgatcgacggcgccaagagaaacctggacagaaccctgggcaagagaacccccctgctgcccccccccgactacccccagaccatgaccagcgagatgaagaagaagggcttcaactacatctacatgaagcagtgcgtggagagcagccccctggtgcccatccagcaggagtggctggaccacatgctgagactgatccccgagagcctgaaggagggcaaggagagagaggagctgctggagagcctgatcaacgaggtgagcagcgacttcgagaacagcatgaagagatacctggtgcagagcgtgctggtgaagccccccgtgaagagcctggaggacgagggcggccccctgcccgagagccccgtgggcctggactacagcaacccctggcacagcagctacgtgcaggccagaaaccagatcttcagcaacctgcacatcatccaccccaccatgaagatgctgctggacctgggctacaccaccttcgccgacaccgtgctgctggacttcaccggcatcagagccaagggccccatcgactgcgagagcctgaagaccgacctgagcatccagaccagaaacgccgaggagaagatcatgaacacctggtaccccaaggtgatcaacctgttcaccaagaaggaggccctggagggcgtgaagcccgagaagctggacgccttctacagctgcgtgagcaccctgatgagcaaccagctgaaggacctgctgagaagaaccgtggagggcttcgtgaagctgttcgaccccaaggaccagcagagactgcccatcttcaagatcgagctgaccttcgacgacgacaagatggagttctaccccaccttccaggacctggaggacaacgtgctgagcctggtggagagaatcgccgaggccctgcagaacgtgcagaccatccccagctggctgagcggcaccagcacccccgtgaacctggacaccgagctgcccgagcacgtgctgcactgggccgtggacaccctgaaggccgccgtgcacagaaacctggagggcgccagaaagcactacgagacctacgtggagaagtacaactggctgctggacggcaccgccgtggagaacatcgagaccttccagaccgaggaccacaccttcgacgagtacaccgaggagctggactgctgggtggtgtgggaggtgtacttctag

SEQ ID NO: 79831 - DNA, 2040 bp, synthetic construct
  misc_feature 1..2040: note = Description of Artificial Sequence: Synthetic coding sequence
  source 1..2040: mol_type = other DNA
atgttcctgctgaccggcggcgtgagcctgaagagcgccgagaagaaccccgaccccacctggctgcaggacaagagctgggaggagatctgcagagccagcgagttccccgccttcagaggcctgagacagcacttctgcgagcacatctacgagtggagagagatctacgacagcaaggagccccacaacgccaagttccccgcccccatggacaagaacctgaacgagctgcagaagatcatcatcctgagatgcctgagacccgacaagatcacccccgccatcaccaactacgtgaccgacaagctgggcaagaagttcgtggagcccccccccttcgacctgaccaagagctacctggacagcaactgcaccatccccctgatcttcgtgctgagccccggcgccgaccccatggccagcctgctgaagttcgccaacgacaagagcatgagcggcaacaagttccaggccatcagcctgggccagggccagggccccatcgccgccaagatgatcaaggccgccatcgaggagggcacctgggtgtgcctgcagaactgccacctggccgtgagctggatgcccatgctggagaagatctgcgaggacttcaccagcgagacctgcaacagcagcttcagactgtggctgaccagctaccccagcagcaagttccccgtgaccatcctgcagaacggcgtgaagatgaccaacgagccccccaccggcctgagactgaacctgctgcagagctacctgaccgaccccgtgagcgaccccgagttcttcaagggctgcagaggcaaggagctgctgttcatcaacgagtacgacaccatccccttcgaggccatcagctacctgaccggcgagtgcaactacggcggcagagtgaccgacgactgggacagaagactgctgctgaccatgctggccgacttctacaacctgtacatcgtggagaacccccactacaagttcagccccagcggcaactacttcgccccccccaagggcacctacgaggactacatcgagttcatcaagaagctgcccttcacccagcaccccgagatcttcggcctgcacgagaacgtggacatcagcaaggacctgcagcagaccaagaccctgttcgagagcctgctgctgacccagggcggcagcaagcagaccggcgccagcggcagcaccgaccagatcctgctggagatcaccaaggacatcctgaacaagctgcccagcgacttcgacatcgagatggccctgagaaagtaccccgtgagatacgaggagagcatgaacaccgtgctggtgcaggagatggagagattcaacaacctgatcatcaccatcagaaacaccctgagagacctggagaaggccatcaagggcgtggtggtgatggacagcgccctggaggccctgagcggcagcctgctggtgggcaaggtgcccgagatctgggccaagagaagctaccccagcctgaagcccctgggcagctacatcaccgacttcctggccagactgaacttcctgcaggactggtacaacagcggcaagccctgcgtgttctggctgagcggcttcttcttcacccaggccttcctgaccggcgccatgcagaactacgccagaaagtacaccacccccatcgacctgctgggctacgagttcgaggtgatccccagcgacaccagcgacaccagccccgaggacggcgtgtacatccacggcctgtacctggacggcgccagatgggacagagagagcggcctgctggccgagcagtaccccaagctgctgttcgacctgatgcccatcatctggatcaagcccacccagaagagcagaatcatcaagagcgacgcctacgtgtgccccctgtacaagaccagcgagagaaagggcaccctgagcaccaccggccacagcaccaacttcgtgatcgccatgctgctgaagaccgaccagcccaccagacactggatcaagagaggcgtggccctgctgtgccagctggacgactag

SEQ ID NO: 79832 - DNA, 9279 bp, synthetic construct
  misc_feature 1..9279: note = Description of Artificial Sequence: Synthetic coding sequence
  source 1..9279: mol_type = other DNA
atgagcgacgccaacaaggccgccatcgccgccgagaaggaggccctgaacctgaagctgccccccatcgtgcacctgcccgagaacatcggcgtggacacccccacccagagcaagctgctgaagtacagaagaagcaaggagcagcagcagaagatcaaccagctggtgatcgacggcgccaagagaaacctggacagaaccctgggcaagagaacccccctgctgcccccccccgactacccccagaccatgaccagcgagatgaagaagaagggcttcaactacatctacatgaagcagtgcgtggagagcagccccctggtgcccatccagcaggagtggctggaccacatgctgagactgatccccgagagcctgaaggagggcaaggagagagaggagctgctggagagcctgatcaacgaggtgagcagcgacttcgagaacagcatgaagagatacctggtgcagagcgtgctggtgaagccccccgtgaagagcctggaggacgagggcggccccctgcccgagagccccgtgggcctggactacagcaacccctggcacagcagctacgtgcaggccagaaaccagatcttcagcaacctgcacatcatccaccccaccatgaagatgctgctggacctgggctacaccaccttcgccgacaccgtgctgctggacttcaccggcatcagagccaagggccccatcgactgcgagagcctgaagaccgacctgagcatccagaccagaaacgccgaggagaagatcatgaacacctggtaccccaaggtgatcaacctgttcaccaagaaggaggccctggagggcgtgaagcccgagaagctggacgccttctacagctgcgtgagcaccctgatgagcaaccagctgaaggacctgctgagaagaaccgtggagggcttcgtgaagctgttcgaccccaaggaccagcagagactgcccatcttcaagatcgagctgaccttcgacgacgacaagatggagttctaccccaccttccaggacctggaggacaacgtgctgagcctggtggagagaatcgccgaggccctgcagaacgtgcagaccatccccagctggctgagcggcaccagcacccccgtgaacctggacaccgagctgcccgagcacgtgctgcactgggccgtggacaccctgaaggccgccgtgcacagaaacctggagggcgccagaaagcactacgagacctacgtggagaagtacaactggctgctggacggcaccgccgtggagaacatcgagaccttccagaccgaggaccacaccttcgacgagtacaccgagttcatcgagaagttcctgagcctggccagcgagatcatgctgctgccccagtggatccactacaccatggtgagactggactgcgaggacctgaagaccggcctgaccaacaaggccaaggccttcgccaacatcctgctgaacgacatcgccagcaagtacagaaaggagaacgagtgcatctgcagcgagttcgaggccatcaaggagcacgccctgaaggtgcccgagaccaccgaggagatgatggacctgatcagctacgtggagaaggccagaaccgtgggcatcgaggagctgatcctgagaatccaggagagcaagagacagatgagctacttcctggacgtgttcctgttcccccaggaggacctggccctgaacgccaccgtgctgatgtggcccagaaagatcaaccccatcttcgacgagaacgacgagctgatcgagaacgccaagcacaagaaggagaacgagctgatggccaagagagagaagctgatcctggagatcgagaaggagagcagaagaatggaggagttcaccgagttcgccgagctggagagaatgcagcagtacgtgaccgacgtgagacagctgcagaagagaatccaggagagcgaggaggccgtgcagttcatcaacaaggaggaggagctgttcaagtgggagctgaccaagtaccccgagctggacaagctgaaggtgaacatcgagccctaccagaagttcttcaacttcgtgctgaagtggcagagaagcgagaagagatggatggacggcggcttcctggacctgaacggcgagagcatggaggccgacgtggaggagttcagcagagagatcttcaagaccctgaagttcttccagaccaagctgaagaaggagctgcaggagaagagaaaggccgccagaaagagaagcctggaggaggagaagatcgaggaggagcccaaggacaacgccaccatcaccatgtgcagaatgagagccagacactggaagcagatcagcgagatcgtgggctacgacctgacccccgacagcggcaccaccctgagaaaggtgctgaagctgaacctgaccccctacctggagcagttcgaggtgatcagcgccggcgccagcaaggagttcagcctggagaaggccatgaacaccatgatcggcacctgggaggacatcgccttccacatcagcctgtacagagacaccggcgtgtgcatcctgagcagcgtggacgagatccaggccatcctggacgaccagatcatcaagacccagaccatgagaggcagccccttcatcaagcccttcgagcacgagatcaaggcctgggaggacagactgatcagaatccaggagaccatcgacgagtggctgaaggtgcaggcccagtggctgtacctggagcccatcttctgcagcgaggacatcatgcagcagatgcccgaggagggcagacagttccagaccgtggacagacactggagagacatcatgaagttctgcgccaaggaccccaaggtgctggccgccaccagcctgaccggcctgctggagaagctgcagaactgcaacgagctgctggagaagatcatgaagggcctgaacgcctacctggagaagaagagactgttcttccccagattcttcttcctgagcaacgacgagatgctggagatcctgagcgagaccaaggaccccctgagagtgcagccccacctgaagaagtgcttcgagggcatcgccaagctggagttcctgcccaacctggacatcaaggccatgtacagcagcgagggcgagagagtggagctgatcgccctgatcagcaccagcgccgccagaggcgccgtggagaagtggctgatccaggtggaggacctgatgctgagaagcgtgcacgacgtgatcgccgccgccagactggcctaccccgagagcgccagaagagactgggtgagagagtggcccggccaggtggtgctgtgcatcagccagatgttctggaccagcgagacccaggaggtgatcagcggcggcaccgagggcctgaagaagtactacaaggagctgcagaaccagctgaacgagatcgtggagctggtgagaggcaagctgagcaagcagaccagaaccaccctgggcgccctggtgaccatcgacgtgcacgccagagacgtggtgatggacatgatcaagatgggcgtgagccacgacaccgacttcctgtggctggcccagctgagatactactgggagaacgagaacgccagagtgagaatcatcaactgcaacgtgaagtacgcctacgagtacctgggcaacagccccagactggtgatcacccccctgaccgacagatgctacagaaccctgatcggcgccttctacctgaacctgggcggcgcccccgagggccccgccggcaccggcaagaccgagaccaccaaggacctggccaaggccctggccgtgcagtgcgtggtgttcaactgcagcgacggcctggactacctggccatgggcaagttcttcaagggcctggccagcagcggcgcctgggcctgcttcgacgagttcaacagaatcgagctggaggtgctgagcgtggtggcccagcagatcctgtgcatccagagagccatccagcagaagctggtggtgttcgtgttcgagggcaccgagctgaagctgaaccccaactgcttcgtggccatcaccatgaaccccggctacgccggcagaagcgagctgcccgacaacctgaaggtgctgttcagaaccgtggccatgatggtgcccaactacgccctgatcgccgagatcagcctgtacagctacggcttcctgaacgccagacccctgagcgtgaagatcgtgatgacctacagactgtgcagcgagcagctgagcagccagttccactacgactacggcatgagagccgtgaaggccgtgctggtggccgccggcaacctgaagctgaagtaccccaacgagaacgaggacatcctgctgctgagaagcatcaaggacgtgaacgagcccaagttcctgagccacgacatccccctgttcaacggcatcaccagcgacctgttccccggcatcaagctgcccgaggccgactaccacgagttcctggagtgcgcccacgaggcctgcaacgtgcacaacctgcagcccgtgaagttcttcctggagaagatcatccagacctacgagatgatgatcgtgagacacggcttcatgctggtgggcgagcccttcgccgccaagaccaaggtgctgcacgtgctggccgacaccctgaccctgatgaacgagcacggctacggcgaggaggagaaggtgatctacagaaccgtgaaccccaagagcatcaccatgggccagctgttcggccagttcgaccccgtgagccacgagtggaccgacggcatcgtggccaacaccttcagagagttcgccctgagcgagacccccgacagaaagtgggtggtgttcgacggccccatcgacaccctgtggatcgagagcatgaacaccgtgctggacgacaacaagaagctgtgcctgatgagcggcgagatcatccagatgagcccccagatgagcctgatcttcgagaccatggacctgagccaggccagccccgccaccgtgagcagatgcggcatgatctacctggagcccagccagctgggctgggagcccctggtgagcagctggctgaacagcctgaagggccccctgtgcgagcccgagtaccaggccctgctgagaggcctgttcgcctggctgatcccccccagcctgaaccagagagtggagctgttccagctgaactacctgtacaccaccatcgtgagcaagatcctgaagatcctgatcaccttcagaatcagcaactacttcaagtacgtgcccctgaagacccagtgcaccttcatcaagttcttcctgcaccagcaggcctgcttcatcttcagcctgatctggagcatcggcggcagctgcgacaccgacggcagaagagtgttcgacaccttcatcagactgatcatcctgggcaaggacgacgagaaccccgtgcccgacagcgtgggcaagtgggagtgccccttcgacgagaagggcctggtgtacgactacatgtacgagctgaagaacaagggcagatgggtgcactggaacgagctgatcaagaacaccaacctgggcgacaagcagatcaagatccaggacatcatcgtgcccaccatggacaccatcagatacaccttcctgatggacctgagcatcacctacgccaagcccctgctgttcgtgggccccaccggcaccggcaagagcgtgtacgtgaaggacaagctgatgaaccacctggagaaggaccagtacttccccttctacatcaacctgagcgccagaaccagcgccaaccaggtgcagaacatcatcatggccagactggacaagagaagaaagggcgtgttcggcccccccatgggcaagaagtgcatcatcttcatcgacgacatgaacatgcccgccctggagaagtacggcgcccagccccccatcgagctgctgagacagttcttcgactgcggccactggtacgacctgaaggacaccagcaagatcaccctggtggacatcgagctgatcgccgccatgggcccccccggcggcggcagaaaccccgtgacccccagatgcatcagacacttcaacatctgcagcatcaacagcttcagcgacgagaccatggtgagaatcttcagcagcatcgtggccttctacctgagaacccacgagttcccccccgagtacttcgtgatcggcaaccagatcgtgaacggcaccatggagatctacaagcagagcgtggagaacctgctgcccacccccaccaagagccactacaccttcaacctgagagacttcagcagagtgatcagaggctgcctgctgatcgagagagacgccgtggccaacaagcacaccatgatcagactgttcgtgcacgaggtgctgagagtgttctacgacagactgatcaacgacgacgacagaagatggctgttccagctgaccaagaccgtgatcaaggaccacttcaaggagagcttccacagcatcttcagccacctgagaaagcagaacgcccccgtgaccgaggaggacctgagaaacctgatgttcggcgactacatgaaccccgacctggagggcgacgacagagtgtacatcgagatccccaacatccaccacttcagcgacgtggtggaccagtgcctggacgagtacaaccagacccacaagaccagaatgaacctggtgatcttcagatacgtgctggagcacctgagcagaatctgcagagtgctgaagcagagcggcggcaacgccctgctggtgggcctgggcggcagcggcagacagagcctgaccagactggccaccagcatggccaagatgcacatcttccagcccgagatcagcaagagctacggcatgaacgagtggagagaggacatgaagagcttcatcgccgtgcccgtgaccaacagaatcgtggacaacaagagcaagatcctggagaagagactgagatacctgaacgaccacttcacctacaacctgtactgcaacatctgcagaagcctgttcgagaaggacaagctgctgttcagcttcctgctgtgcgccaacctgctgctggccagaaaggagatcgagtaccaggagctgatgttcctgctgaccggcggcgtgagcctgaagagcgccgagaagaaccccgaccccacctggctgcaggacaagagctgggaggagatctgcagagccagcgagttccccgccttcagaggcctgagacagcacttctgcgagcacatctacgagtggagagagatctacgacagcaaggagccccacaacgccaagttccccgcccccatggacaagaacctgaacgagctgcagaagatcatcatcctgagatgcctgagacccgacaagatcacccccgccatcaccaactacgtgaccgacaagctgggcaagaagttcgtggagcccccccccttcgacctgaccaagagctacctggacagcaactgcaccatccccctgatcttcgtgctgagccccggcgccgaccccatggccagcctgctgaagttcgccaacgacaagagcatgagcggcaacaagttccaggccatcagcctgggccagggccagggccccatcgccgccaagatgatcaaggccgccatcgaggagggcacctgggtgtgcctgcagaactgccacctggccgtgagctggatgcccatgctggagaagatctgcgaggacttcaccagcgagacctgcaacagcagcttcagactgtggctgaccagctaccccagcagcaagttccccgtgaccatcctgcagaacggcgtgaagatgaccaacgagccccccaccggcctgagactgaacctgctgcagagctacctgaccgaccccgtgagcgaccccgagttcttcaagggctgcagaggcaaggagctggcctgggagaagctgctgttcggcgtgtgcttcttccacgccctggtgcaggagagaaagaagttcggccccctgggctggaacatcccctacggcttcaacgagagcgacctgagaatcagcatcagacagctgcagctgttcatcaacgagtacgacaccatccccttcgaggccatcagctacctgaccggcgagtgcaactacggcggcagagtgaccgacgactgggacagaagactgctgctgaccatgctggccgacttctacaacctgtacatcgtggagaacccccactacaagttcagccccagcggcaactacttcgccccccccaagggcacctacgaggactacatcgagttcatcaagaagctgcccttcacccagcaccccgagatcttcggcctgcacgagaacgtggacatcagcaaggacctgcagcagaccaagaccctgttcgagagcctgctgctgacccagggcggcagcaagcagaccggcgccagcggcagcaccgaccagatcctgctggagatcaccaaggacatcctgaacaagctgcccagcgacttcgacatcgagatggccctgagaaagtaccccgtgagatacgaggagagcatgaacaccgtgctggtgcaggagatggagagattcaacaacctgatcatcaccatcagaaacaccctgagagacctggagaaggccatcaagggcgtggtggtgatggacagcgccctggaggccctgagcggcagcctgctggtgggcaaggtgcccgagatctgggccaagagaagctaccccagcctgaagcccctgggcagctacatcaccgacttcctggccagactgaacttcctgcaggactggtacaacagcggcaagccctgcgtgttctggctgagcggcttcttcttcacccaggccttcctgaccggcgccatgcagaactacgccagaaagtacaccacccccatcgacctgctgggctacgagttcgaggtgatccccagcgacaccagcgacaccagccccgaggacggcgtgtacatccacggcctgtacctggacggcgccagatgggacagagagagcggcctgctggccgagcagtaccccaagctgctgttcgacctgatgcccatcatctggatcaagcccacccagaagagcagaatcatcaagagcgacgcctacgtgtgccccctgtacaagaccagcgagagaaagggcaccctgagcaccaccggccacagcaccaacttcgtgatcgccatgctgctgaagaccgaccagcccaccagacactggatcaagagaggcgtggccctgctgtgccagctggacgactag

SEQ ID NO: 79833 - DNA, 2355 bp, synthetic construct
  misc_feature 1..2355: note = Description of Artificial Sequence: Synthetic coding sequence
  source 1..2355: mol_type = other DNA
atgagcgacgccaacaaggccgccatcgccgccgagaaggaggccctgaacctgaagctgccccccatcgtgcacctgcccgagaacatcggcgtggacacccccacccagagcaagctgctgaagtacagaagaagcaaggagcagcagcagaagatcaaccagctggtgatcgacggcgccaagagaaacctggacagaaccctgggcaagagaacccccctgctgcccccccccgactacccccagaccatgaccagcgagatgaagaagaagggcttcaactacatctacatgaagcagtgcgtggagagcagccccctggtgcccatccagcaggagtggctggaccacatgctgagactgatccccgagagcctgaaggagggcaaggagagagaggagctgctggagagcctgatcaacgaggtgagcagcgacttcgagaacagcatgaagagatacctggtgcagagcgtgctggtgaagccccccgtgaagagcctggaggacgagggcggccccctgcccgagagccccgtgggcctggactacagcaacccctggcacagcagctacgtgcaggccagaaaccagatcttcagcaacctgcacatcatccaccccaccatgaagatgctgctggacctgggctacaccaccttcgccgacaccgtgctgctggacttcaccggcatcagagccaagggccccatcgactgcgagagcctgaagaccgacctgagcatccagaccagaaacgccgaggagaagatcatgaacacctggtaccccaaggtgatcaacctgttcaccaagaaggaggccctggagggcgtgaagcccgagaagctggacgccttctacagctgcgtgagcaccctgatgagcaaccagctgaaggacctgctgagaagaaccgtggagggcttcgtgaagctgttcgaccccaaggaccagcagagactgcccatcttcaagatcgagctgaccttcgacgacgacaagatggagttctaccccaccttccaggacctggaggacaacgtgctgagcctggtggagagaatcgccgaggccctgcagaacgtgcagaccatccccagctggctgagcggcaccagcacccccgtgaacctggacaccgagctgcccgagcacgtgctgcactgggccgtggacaccctgaaggccgccgtgcacagaaacctggagggcgccagaaagcactacgagacctacgtggagaagtacaactggctgctggacggcaccgccgtggagaacatcgagaccttccagaccgaggaccacaccttcgacgagtacaccgagttcatcgagaagttcctgagcctggccagcgagatcatgctgctgccccagtggatccactacaccatggtgagactggactgcgaggacctgaagaccggcctgaccaacaaggccaaggccttcgccaacatcctgctgaacgacatcgccagcaagtacagaaaggagaacgagtgcatctgcagcgagttcgaggccatcaaggagcacgccctgaaggtgcccgagaccaccgaggagatgatggacctgatcagctacgtggagaaggccagaaccgtgggcatcgaggagctgatcctgagaatccaggagagcaagagacagatgagctacttcctggacgtgttcctgttcccccaggaggacctggccctgaacgccaccgtgctgatgtggcccagaaagatcaaccccatcttcgacgagaacgacgagctgatcgagaacgccaagcacaagaaggagaacgagctgatggccaagagagagaagctgatcctggagatcgagaaggagagcagaagaatggaggagttcaccgagttcgccgagctggagagaatgcagcagtacgtgaccgacgtgagacagctgcagaagagaatccaggagagcgaggaggccgtgcagttcatcaacaaggaggaggagctgttcaagtgggagctgaccaagtaccccgagctggacaagctgaaggtgaacatcgagccctaccagaagttcttcaacttcgtgctgaagtggcagagaagcgagaagagatggatggacggcggcttcctggacctgaacggcgagagcatggaggccgacgtggaggagttcagcagagagatcttcaagaccctgaagttcttccagaccaagctgaagaaggagctgcaggagaagagaaaggccgccagaaagagaagcctggaggaggagaagatcgaggaggagcccaaggacaacgccaccatcaccatgtgcagcaccgtgatggagcagatcaaggccttcaaggtgtag

SEQ ID NO: 79834 - DNA, 687 bp, synthetic construct
  misc_feature 1..687: note = Description of Artificial Sequence: Synthetic coding sequence
  source 1..687: mol_type = other DNA
atggagaccttcatccccatcgacctgaccaccgagaaccaggagatggacaaggaggagaccaagaccaagcccagactgctgagatacgaggagaagaagtacgaggacgtgaagcccctggagacccagcccgccgagatcgccgagaaggagaccctggagtacaagaccgtgagaaccttcagcgagagcctgaagagcgagaagaccgaggactacctgagagagagcatcatccagcagcacatggtgagccccgagcccgccagcctgaaggagaagggcaagagcagaagaaagaaggaccagacccacgcctgccccaacgtgagaaaggccagacccgtgagctacgacagaaccgagcccaaggacgacgacgtgatcagaaacatcatcagactgagagagaagctgggctggcagaccatcctgccccagcacagcctgaagtacggcagcagcaagatcgccatccagaagatcaccctgaagaagcccctggaggacgacggcgagttcgtgtactgcctgcccagaaagagccccaagagcctgtacaacccctacgacctgcaggtggtgagcgcccacaccgccaagcactgcaaggagttctgggtgatcaccgccagcttcatcagcaagagatacctggtgatctgcggcgccgtgtacatctag

SEQ ID NO: 79835 - DNA, 687 bp, synthetic construct; identical to SEQ ID NO: 79834
  misc_feature 1..687: note = Description of Artificial Sequence: Synthetic coding sequence
  source 1..687: mol_type = other DNA

SEQ ID NO: 79836 - DNA, 1362 bp, synthetic construct
  misc_feature 1..1362: note = Description of Artificial Sequence: Synthetic coding sequence
  source 1..1362: mol_type = other DNA
atggagaccttcatccccatcgacctgaccaccgagaaccaggagatggacaaggaggagaccaagaccaagcccagactgctgagatacgaggagaagaagtacgaggacgtgaagcccctggagacccagcccgccgagatcgccgagaaggagaccctggagtacaagaccgtgagaaccttcagcgagagcctgaagagcgagaagaccgaggactacctgagagagagcatcatccagcagcacatggtgagccccgagcccgccagcctgaaggagaagggcaagagcagaagaaagaaggaccagacccacgcctgccccaacgtgagaaaggccagacccgtgagctacgacagaaccgagcccaaggacgacgacgtgatcagaaacatcatcagactgagagagaagctgggctggcagaccatcctgccccagcacagcctgaagtacggcagcagcaagatcgccatccagaagatcaccctgaagaagcccctggaggacgacggcgagttcgtgtactgcctgcccagaaagagccccaagagcctgtacaacccctacgacctgcaggtggtgagcgcccacaccgccaagcactgcaaggagttctgggtgatcaccgccagcttcatcagcaaggtgatcaacatcgtgggcagcgtgaaggaggtggagctgatccccaccctggagtggctgagcgagagaagacactactacctgctgagacagttcaagatcttcagcgacttcagaatgaacaaggccttcgtgacctggaagctgaacgtgaagagaatcaagaccgagaagagcagaagcttcctgtaccaccacctgttcctggccgacgacctgttccagacctgcctggtgtacatcagaggcctgtgcgaggacgccatcaacctgaagaactacaacgaccacgagaacaacctgagcgccatctgcctggtgaagctggacagcagcagaacctacagcctggacgagttctgcgaggagcagctgcagcaggccacccaggccctgaagcagctggaggacatcagaaacaaggccatcagcgagatgaagagcaccttcctgaaggtggccgagaagaacgagatcaaggagtacttcgagagcaagctgagcgaggacgacaccacccacttcaagctgcccaagtacagaagactgctggagaccttcttcaagttcgtgatgctggtggactacatcttccaggagctgatcagacagctgatgaacaccgccgtgaccctgctgctggagctgttcaacggcagcgccggcatgcccttcagcgtggagaagaagaacgagaacctgatcagatag

SEQ ID NO: 79837 - DNA, 13548 bp, synthetic construct
  misc_feature 1..13548: note = Description of Artificial Sequence: Synthetic coding sequence
  source 1..13548: mol_type = other DNA
atggagaccttcatccccatcgacctgaccaccgagaaccaggagatggacaaggaggagaccaagaccaagcccagactgctgagatacgaggagaagaagtacgaggacgtgaagcccctggagacccagcccgccgagatcgccgagaaggagaccctggagtacaagaccgtgagaaccttcagcgagagcctgaagagcgagaagaccgaggactacctgagagagagcatcatccagcagcacatggtgagccccgagcccgccagcctgaaggagaagggcaagagcagaagaaagaaggaccagacccacgcctgccccaacgtgagaaaggccagacccgtgagctacgacagaaccgagcccaaggacgacgacgtgatcagaaacatcatcagactgagagagaagctgggctggcagaccatcctgccccagcacagcctgaagtacggcagcagcaagatcgccatccagaagatcaccctgaagaagcccctggaggacgacggcgagttcgtgtactgcctgcccagaaagagccccaagagcctgtacaacccctacgacctgcaggtggtgagcgcccacaccgccaagcactgcaaggagttctgggtgatcaccgccagcttcatcagcaaggtgatcaacatcgtgggcagcgtgaaggaggtggagctgatccccaccctggagtggctgagcgagagaagacactactacctgctgagacagttcaagatcttcagcgacttcagaatgaacaaggccttcgtgacctggaagctgaacgtgaagagaatcaagaccgagaagagcagaagcttcctgtaccaccacctgttcctggccgacgacctgttccagacctgcctggtgtacatcagaggcctgtgcgaggacgccatcaacctgaagaactacaacgaccacgagaacaacctgagcgccatctgcctggtgaagctggacagcagcagaacctacagcctggacgagttctgcgaggagcagctgcagcaggccacccaggccctgaagcagctggaggacatcagaaacaaggccatcagcgagatgaagagcaccttcctgaaggtggccgagaagaacgagatcaaggagtacttcgagagcaagctgagcgaggacgacaccacccacttcaagctgcccaagtacagaagactgctggagaccttcttcaagttcgtgatgctggtggactacatcttccaggagctgatcagacagctgatgaacaccgccgtgaccctgctgctggagctgttcaacggcagcgccggcatgcccttcagcgtggagaagaagaacgagaacctgatcagaaccttcaaggacaacagcttccccaccggcaagaccaccaacgactgcgaggagctggtggacaacagcaagctgcacgccatcagcgtgcagaagagcgaggtgaagaccgacaccgacatcaacgagatcctgaacagcgtggaggtgggcaaggacctgagaaagacctacgcccccatcttcgaggtgaacctgtgcctgagaatccccgccgagagcgacagcagcgagaacagcaaggagaacttccacgagagcgaccagtgccccgaggagtgcgtgatgttcgaggacgagatgagcgagaacaaggacaactgcgtgaagaagcacagcagcgaggagctgctgcccaaggccaagaagagcaaggagatcagctacaacctggaggacatcatcagcgacaccgagatcgagaccgagttcgagaacaagtacatgtactacgagttccccgagttccccaccaacctgttcatcgaccccaacagactggagttcagcgtgaagatccagaacatgctgaccaacatggagaagtgcatcaccaccatcacccccctgtgccaggacccccagctgagcatcttcatcgacctggtgagcatcatggacctgcccaacaagaccggcagcatcatccactacaaggagcagaccagatggcccgactgccacatcctgttcgagaccgaccccgcctaccagaacatcatcgtgaacctgctgaccatcatcggcaacagcatgggcctggtgaacgcctacagccacaagttcatcaagtactgcaccatgaccgagaaggccaagatcatgagcatgaagatcagcagcatgggcgagctgaccagcaaggagttcgaggccatcctgaacagattcagaaactacttcagacacatcgtgaacatggccatcgagaagagaatcggcatcttcaacgtggtgagcctggactaccagagcgagtgcctgctgtacatcgacaacgtgatccacatgagccacaccctgatccagagcgtgatcgagaagaagaacaagaacctgctggaggtggtggagagcagcctgcagcagctggagtgcgaccccaccgagatcgaggagttcctggagcacttcatcttcctgaacgccatcagcagcaagatcagcaagctggagaaggagttcctgaccatgagccagctgtacagcgtggccaagcaccaccagatccacatcagcgaggagcagatcgccatcttccaggtgctgctgctgaagttcagccagctgaagagcagcatgaagctgagcaagatcaacaaggacaccgccatcaccaagttcagagacaacctggaggcctgcatcagcggcctgcacgtggacgtgggcaacctgaaggccaagatcagaacccccctgctgctgtgcgccggcacccaggtgagcaccgccatggagatgatccagaccctgagcggcgaggccgccagcctgaccaacaaggccaaggcctacagccactaccaggactgcttcagcgacagccagagccacatgcacagcgtgaacgtggaggagatcacccagatcgtgctgagcgagatcagcgacatcgagggcgacctgaccctgagaaagaagctgtgggaggcccaggaggagtggaagagagccagctgggagtggagaaacagcagcctgcagagcatcgacgtggagagcgtgcagagaaacgtgagcaagctgatgcacatcatcagcgtgctggagaagggcctgcccaagagcgacatggtgacccacctgaagcaggtggtgaccgagttcaagcaggagctgcccatcatcatcgccctgggcaacccctgcctgaagcccagacactgggaggccctgcaggagatcatcggcaagagcgtgcccctggacaagaactgcaaggtggagaacctgctggccctgaagatgttccagtacgagaacgagatcaacgacatgagcaccagcgccaccaacgaggccgccctggagaagatgctgttcaagatcatcgacttctggaacaccacccccctgcccctgatcctgcaccacaccgagatctacagcatcttcatcatccccagcatcgacgacatcagcgcccagctggaggagagccaggtgatcctggccaccatcaagggcagcccccacatcggccccatcaaggacctggtgaacgagtgggaccagaacctgaccctgttcagctacaccctggaggagtggatgaactgccagagaaactggctgtacctggagcccgtgttccacagcagcgagatcagaagacagctgcccgccgagaccgagctgttcagccaggtgatcagcatgtggaagaagatcatgagcaagatccagaacaagcagaacgccctgcagatcaccaccagcgccggcgtgctggagatcctgcagaactgcaacatccacctggagcacatcaagaagagcctggaggactacctggaggtgaagagactgatcttccccagattctacttcctgagcaacgccgagctgctggacatcctggccgacagcagaaaccccgagagcgtgcagccccacctggtgaagtgcttcgagaacatcaagcagctgctgatctggaagcaggacatcggcccccccgccgtgaagatgctgatcagcgccgagggcgagggcctggtgctgcccaagaagatcagagtgagaagcgccgtggagcagtggctggtgaacgtggagaagagcatgttcgacgtgctgaagaaggagagatacatctacaacatcatcctgctgttccagagccagatcatgttctacaacgactgcgtgaagagcttcgtgagcagctacagcagagagaagctggagaaggtgcacgccggcctgatgtgccacctggaggaggtggccgacctggtggtgctggacaccagcaacagcagaaccaaggccatcctgggcgccctgctgatcctgtacgtgcactgcagagacatcgtgatcaacctgctgctgaagaacatcttcaacgccgaggacttcgagtggaccagacacctgcagtacaagtggaacgagaagcagaagctgtgctacgtgagccagggcaacgccagcttcacctacggctacgagtacctgggctgcaccagcagactggtgatcacccccctgaccgacagatgctggctgaccctgatggaggccctgcacctgaacctgggcggctgccccgccggccccgccggcaccggcaagaccgagaccgtgaaggacctggccaagagcctgggcaagcactgcgtggtgttcaactgcttcgaggacctggactacaagatcgtgagaaagttcttcttcggcctggtgcagagcggcgcctggagctgcttcgacgagttcaacctgatcgacctggaggtgctgagcgtgatcgccagccagatcctgaccatcaaggccgccaaggacaactacagcgccagattcgtgctggagggcaaggagatcagaatcaacatgagctgcgccgtgttcatcaccatgaaccccagatacggcggcggcgtggagctgcccgacaacctgaagagcctgttcagacccgtggccatgatggtgccccactaccagatgatcgccgagatcatcctgttcagcttcggcttcaagagcgccaacagcctgagcggcaagctgaccaacctgtacgagctggccagaaagcagctgagccagcaggaccactacaacttcggcctgagaagcctgaagatcgtgctgatcatggccggcaccaagaagagagagttcaagtgcctgagcgaggccgacgagaccctgatcgtgatcgaggccatcagagaggccagcctgcccaagtgcccccccgaggacgtgcccctgttcgagaacatcatcggcgacatcttccccgaggtgaccgtgctgaaggtgaaccagctggccctggagaaggtgatctacaccgccacccagcagctgggcctgcagaactggagcagccagaaggagaagatcatccagttctacaaccagctgcaggtgtgcgtgggcgtgatgctggtgggccccaccggcggcggcaagaccaccgtgagaagaatcctggagaaggccctgaccctgctgcccatcgccgacttcctgagcgtggccgagagaaagagcgccagcaagatcagcgagagaaagggcaaggtggacatctgcgtgctgaaccccaagtgcgtgaccctgagcgagctgtacggccagctggaccccaacaccatggagtggaccgacggcctgctgagcgccaccatcagaagctacgtgtacttcaacacccccaagaacaccaagaaggacatcgacctgagactgaagagcagaatcagcgacctgagcaacgtgttcaagctggacagcagcgacaccaccgagaccgacgacaacatcttcgaggagatcgagaaggtggtgaagatccccgagaaccacaacttcgactggcagtggatcatcctggacggccccgtggacaccttctgggtggagaacctgaacagcgtgctggacgacaccagaaccctgtgcctggccaacagcgagagaatcgccctgaccaacaagatcagagtgatcttcgaggtggacaacctgagccaggccagccccgccaccgtgagcagatgcgccatggtgtacatggaccccgtggacctgggctgggagccctacgtgaagagctggctgctgaagaccagcaagatcatcagccagagcggcgtggactgcctggagttcatgatcaagaacagcgtgaccgacggcctgcagttcatcagaaacagacagaagttccagccctaccccatggaggacatcaccgtggtgatcaccctgtgcagaatcctggacgccttcttcgacttcatgggcaagaacggcggcttcgagcagagcgacgacctgaacgacaccagcagcaaggaggccaacagccagagagagagcgtgaccttcaaggacatcgagaagagagacgagaacacctggtaccccgagaagaaccccgacaagctgaccaagatcatccagaagctgttcgtgttcgccttcacctgggccttcggcggcgccctgaacagagaggacgagcacagagagaacatccccttctgccccagcctggagcccgacagcctggccaaggtgacctacgacttcgacaagctggtgcacgagctgttcggcaacagcagccaggtgggctggaagcactggggccagagccagggcagaagaagaaagggcaactgcatcaacctgcccaccggcgagtgcagcatcttcggctacttcgtggacatcgagcagtgcgagttcatcccctggagcgacctggtgcccaacgaccagaccctgatccagagaggcaccagcctgctgaccaacctgcagagaagcggcggcaacttcctgaagatcaccgagtgcggcgagtgcatcaactacaccgccaccagagacaccacctgcctgagcttcctgatgagcctgctgctgaagaacagctgccccgtgctgctgaccggcgagagcggcgtgggcaagaccgccgccatcaaccagatgctggagaagctggagggccccggcgccttcgacatcaagcacggcagcatcctgggcgacaccctgctgtacagcgagatcaagaagagcagcagcctgaagcagaacatcaccatcctgatccccgagacccacaagaccgccaccggcagcagcgacaaccccaccaagaagcccgaggtgagaaccaacaagaagctgctgaagaacaacgaccacaagggcgtggtggtgagcaccatcaacttcagcaccaacgtgaccgccgccaagaccaaggagatgatcctgaagaagctgatcagaagaaccaaggacaccctgggcgcccccaagaacaacagaatcctgatcttcatcgacgacatgaacatgcccgtgagcgacatgtacggcgcccagccccccctggagctgatcagacagctgctggacctgggcggcgtgtacgacaccgagaagaacacctggaagaacatccaggacctgagcatcgtggccgcctgcgtgcccgtggtgaacgacatcagccccagactgctgaagcacttcagcatgctggtgctgccccaccccagccaggacatcctgtgcaccatcttccaggcccacctgggcatctacttcagcatcaacaacttcacccccgaggtgcagaagagcaaggaccagatcatcagctgcagcctggccatctaccaccaggtgagacagaacatgctgcccacccccaccaagtgccactacatgttcaacctgagagacatgttcaagctgctgctgggcctgctgcaggccgacagaaccgtggtgaacagcaaggagatggccgccctgctgttcgtgcacgaggccaccagagtgttccacgacagactgatcgacttcaccgacaagagcctgttctacagactgctgagcagagagctggagaactgcttccagatcggcatcgacggctgcggcaagaagacctgcgccaccctggcctgctacctgaccgacaacaagctgtacagagtgcccatcagccacaagtgcgcctacatcgagttcaaggaggtgttcaagaaggtgttcatccacgccggcctgaagggcaagcccaccgtgctgatggtgcccaacctgaacatcgagcaggacagcttcctggaggacctgaactacatcatcagcagcggcagaatccccgacctgttcgagaacgtggagctggacagcatcgccatgaagatcagatacctgaccgagcagagcggccacatggacaacagacagagcctgctgagcttcttccagaagagaatctacaagaacctgcacatcttcgtgatcatgagccccgagggccccagcttcagacagaactgcagagtgtaccccagcatgatcagcagctgcaccatcgactggtacgagagatggcccgaggaggccctgctgatcgtggccaacagcttcctgaaggagaaggtgaacttcgagaacagagagaacctgaaggagaagctggcccccacctgcgtgcagatccacaagagcatgaaggacctgaacagaaagtacttcgaggagaccggcagattctactacaccacccccaacagctacctgcagttcatggagaccttcgcccacatcctgagagccagagaggaggagatgcagaccaagagagacagattccacatgggcctgagcaccatcctggaggccaccaccctggtgaccgagatgcaggaggagctgctgatcctgggcccccaggtggagcagaagaccaaggagaccgagaccctgatggagaagctgagaaaggacagccaggtggtggagaaggtgcagatgctggtgaagcaggacgaggagatcgtggccgaggaggtgagaatcgtggaggactacgcccagaagaccgccaacgagctgaagagcgtgctgcccgccttcgacaaggccatcgtggccctgaacgccctggacaaggccgacgtggccgagctgagagtgtacaccagaccccccttcctggtgctgaccgtgatgaacgccgtgtgcatcctgctgcagaagaagcccaactgggccaccgccaagctgctgctgagcgagaccggcttcctgaagaagctgatcaacctggacaaggacagcatccccgacaaggtgttcgtgaagctgaagaagatcgtgaccctgcccgacttcaacccccacaagatcagcctggtgagcgtggcctgctgcagcctgtgccagtgggtgatcgccctgaacaactaccacgaggtgcagaaggtggtgggccccaagcagatccaggtggccgaggcccagaacgtgctgaagatcgccagacagagactggccgagaagcagagaggcctgcagctggtggaggagcacctgctgttcctgcaggccgcctacaaggacaccgtggccgagaagcagctgctggccaacagaaagaccatggccagcagaagattccagtgcgccagcgtgctgctgaccgtgctggaggacgagaagaccagatggcaggagaccatcaaccagatcgacaacaagctggagggcatcctgggcgacatcctgctgagcgccgcctgcatcgtgtacagcggcatcctgacccccgagttcagacagctgatcgtgaacaagtgggagaccttctgcatcgagaacggcatcagcctgagcagcaagttcagcctgatcaaggtgatggcccagaagtacgagatcagcagatggcacaaccagggcctgccccacggccagtacagcgtggagaacgccatcctgatcaagaacggccagcagtggcccctgctgatcgacccccacagacaggcccacaagtggatcagacagatggagggcagcagactgcagaagctgagcatcgaggacagcaactacaccaagaagatcgagaacgccatgaagaccggcggcagcgtgctgctgcagaacctgctggagaccctggcccccggcctgaaggccatcctgaagaaggacatctaccagaagaagggccactacttcatcagagtgggcgacgccgagttcgagtacaacagcaacttcagactgtacctgagcaccgagatcgacaacccccacttcctgcccagcgtgtacaacttcgtgaccatgatcaacttcaccgtgaccttccagggcctgcaggaccagctgctgagcaccgtggtgacccacgaggtgccccacctggaggaccagagaagcaagctgctggagagcatcagcctggacgccatcaccctggaggagctggaggagaagaccctgaacctgctgcagaaggccctgggcagcatcctggacgacgacaagatcgtggacaccctgagaaagagcaagatgaccagcaacgagatcagcaagagaatcgaggccaccaagaaggccgagagcgagatccaggccatcagaaagaactacctgcccatcgccaccagaggcgccctgctgtacttcctggtggccgacctgacccagatcaactacatgtaccagttcagcctggactggttccaccaggtgttcgtgagcagcgtggtgagcaagagcaaggagcaggagcacagcttcaagagagagaaggtgagccccaaggaggtgcacgagttcatcagcatcagcaaggagcccaacctggagaacgagaagaacctgctggacaagcacatcaagagcgccatcgacatgctgaccaagagcatcttcaaggtggtgagcagcgccctgttcaacgaggacaagctgtgcttcagcttcagactgtgcaccgtgatcatgcagaacaacgccaacggcaacctgatccaggacgacatcggcttcctgcccgaggaggagtggaacatcttcctgtacagcggcatcctgatcaacatcaagagcgccctgagccagagcagactgaccagcaccttcgagatcggcgagagccagcacctgcagtggctgagcgacagcagatggagacagtgccagtacgtgagcacccacctggagcccttcagcctgctgtgcaagagcctgctgagcaacgtgagccagtgggacaccttcaagaacagcaaggccgtgtacagcctgatcagcacccccttcagcagcgagaacgccagcctggaggagaacaccaagccccccgaggagaccgagctgctgaacgagaacaaggagacctgcaaccccatcaacttcccctgggagaagctgaccagcttccagagactgatcctggtgaaggtgctgagacccgagagcctgaacaacagcgtgagaaagttcatcaccgagaagatgggcaacaagtacctgcagagaaccggcgtgaacctgaaggacgcctacaagggcagcaacgccagaacccccctgatcctgatccagacccacggcatcgacctgaccaacatcctgctgagattcgcccaggagctgaagggcaccacccaccacgtgaccatcatcagcctgggcagagaccaggccgccaaggccgaggacctgatcctgaaggccctgaccaagacccagcagtgggtgttcctgcagaactgccacctggccaccagcttcatgcccagactgtgcaccatcgtggagagcttcaacagccccaacgtgaccatcgaccccgagttcagactgtggctgagcagcaagagctacagcagcttccccatccccgtgctgaagaagggcctgaagatcgccgtggagagcccccagggcctgaagagcaacctgctgcagaccttcggctgcaccggcagcggcgaggtgaccgaggagatcttcgagaaccccgactgcggccagtggtggaagaagctgctgttcagcctgtgcttcttcaacgccgtgatcaacgagagaaagaactacggcatcctgggctggaacatcgcctacaagttcaacagcagcgacctgggcgtggccatcaaggtgctggagaacagcctgagaggccagcccagcatcagctggcaggccctgagatacctgatcggcgaggtgatctacggcggcagagtgatcgacaactgggacaagagatgcctgaagaccctgctgtacaagttctgcaaccccgaggtgctgaaggacgacttcagcttcagcagaagcgccagcatcaaggactacatccacatcatccagagcctgcccgacgacgacctgcccgaggtgctgggcatccaccccgaggccatcagaagctgctgggagacccagggcgagaagttcatcgagaacctgatcgccatgcagcccaagaccaccaccgccaacctgatgatcagacccgagcagagcaaggacgagctggtgatggagatcctgagcgacctgctgaagagactgcccctgaccgtggagaaggaggagatcgccgtgggcacccccagcaccctgaagagcatgatgagcagcagcatctgggagagcctgagcaagaacctgaaggaccacgaccccctgatccactgcgtgctgctgaccttcctgaagcaggagatcaagagattcgacaagctgctgttcgtgatccacaagagcctgaaggacctgcagctggccatcaagggcgagatcatcctgacccaggagctggaggagatcttcaacagcttcctgaacatgagagtgcccaccctgtggcagaagcacgcctacagaagctgcaagcccctgagcagctggatcgacgacctgatccagagactgaacttcttcaacacctgggccaaggtggcctacaccgccatccagagaagatacatgagattcgtgaccgtgtggaagcagagcatccccagcaccagccagaagtgcaagcaccccgaggacagcgagaacaacttcttcgagggcttccccagcagatactggctgcccgccttcttcttcccccaggccttcctggccgccgtgctgcaggactacggcagaagcagaggcatcgccgtggacgccctgaccttcacccaccacgtgatcagcaacaccaccgacaaggacgagaagttcagcgtgttcatgcccaagaagctgaacatcgtgagaagagccttcaagggcagcgccagcagccacaccggcgtgtacatcttcggcctgttcatcgagggcgccagatggaacagagagcagaagatcctggaggacagcctgcccctggagatgtgctgcgacttccccgacatctacttcctgcccaccaagatcagcaccaagacccccaacgccagcaaccagaccgacagcgagctgtacgccttcgagtgccccgtgtaccagacccccgagagaagcagaatcctggccaccaccggcctgcccaccaacttcctgaccagcgtgtacctgagcaccaagaagccccccagccactggatcaccatgagagtggccctgctgtgcgagaagaacgagaagtag

SEQ ID NO: 79838 - DNA, 13548 bp, synthetic construct; identical to SEQ ID NO: 79837
  misc_feature 1..13548: note = Description of Artificial Sequence: Synthetic coding sequence
  source 1..13548: mol_type = other DNA

SEQ ID NO: 79839 - DNA, 10524 bp, synthetic construct
  misc_feature 1..10524: note = Description of Artificial Sequence: Synthetic coding sequence
  source 1..10524: mol_type = other DNA
atgggcagaagaagccagtggatctgggccatgagatgccagatgctggtgcccgtgctgagcctgcacatcggcctggccagagccctgggctgcggctgcatcgccagcaagatcgagtgcctgatcagatgcaacgcccccttccccctgctggacgccgtgggcagcgtggccagccaggagctgcagagcctgaccggcaccgtgggcgtgaccagcggcgccgccgcctaccccagatggaacctggccagagccagagcccccccccacctgcccggcacccaggaccccctgagaagagtgagagaccccacccccatcgtggccagcagccccggcagaagaagaggcagctggagcggcggctacggccaggaggccagcgagcccggcgtggtgggcctgtgctgcgccgtgctgcccatccaccccagcctggccctggccggcgtgggcggccccgacctgagaagattccaggagggcccccagagacccagcgaccacggcgccgccgagaagcacatggagaccttcatccccatcgacctgaccaccgagaaccaggagatggacaaggaggagaccaagaccaagcccagactgctgagatacgaggagaagaagtacgaggacgtgaagcccctggagacccagcccgccgagatcgccgagaaggagaccctggagtacaagaccgtgagaaccttcagcgagagcctgaagagcgagaagaccgaggagcccaaggacgacgacgtgatcagaaacatcatcagactgagagagaagctgggctggcagaccatcctgccccagcacagcctgaagtacggcagcagcaagatcgccatccagaagatcaccctgaagaagcccctggaggacgacggcgagttcgtgtactgcctgcccagaaagagccccaagagcctgtacaacccctacgacctgcaggtggtgagcgcccacaccgccaagcactgcaaggagttctgggtgatcaccgccagcttcatcagcaagctggacagcagcagaacctacagcctggacgagttctgcgaggagcagctgcagcaggccacccaggccctgaagcagctggaggacatcagaaacaaggccatcagcgagatgaagagcaccttcctgaaggtggccgagaagaacgagatcaaggagtacttcgagagcaagctgagcgaggacgacaccacccacttcaagctgcccaagtacagaagactgctggagaccttcttcaagttcgtgatgctggtggactacatcttccaggagctgatcagacagctgatgaacaccgccgtgaccctgctgctggagctgttcaacggcagcgccggcatgcccttcagcgtggagaagaagaacgagaacctgatcagaaccttcaaggacaacagcttccccaccggcaagaccaccaacgactgcgaggagctggtggacaacagcaagctgcacgccatcagcgtgcagaagagcgaggtgaagaccgacaccgacatcaacgagatcctgaacagcgtggaggtgggcaaggacctgagaaagacctacgcccccatcttcgaggtgaacctgtgcctgagaatccccgccgagagcgacagcagcgagaacagcaaggagaacttccacgagagcgaccagtgccccgaggagtgcgtgatgttcgaggacgagatgagcgagaacaaggacaactgcgtgaagaagcacagcagcgaggagctgctgcccaaggccaagaagagcaaggagatcagctacaacctggaggacatcatcagcgccaccatcacccccctgtgccaggacccccagctgagcatcttcatcgacctggtgagcatcatggacctgcccaacaagaccggcagcatcatccactacaaggagcagaccagatggcccgactgccacatcctgttcgagaccgaccccgcctaccagaacatcatcgtgaacctgctgaccatcatcggcaacagcatgggcctggtgaacgcctacagccacaagttcatcaagtactgcaccatgaccgagaaggccaagatcatgagcatgaagatcagcagcatgggcgagctgaccagcaaggagttcgaggccatcctgaacagattcagaaactacttcagacacatcgtgaacatggccatcgagaagagaatcggcatcttcaacgtggtggtggagagcagcctgcagcagctggagtgcgaccccaccgagatcgaggagttcctggagcacttcatcttcctgaacgccatcagcagcaagatcagcaagctggagaaggagttcctgaccatgagccagctgtacagcgtggccaagcaccaccagatccacatcagcgaggagcagatcgccatcttccaggtgctgctgctgaagttcagccagctgaagagcagcatgaagctgagcaagatcaacaaggacaccgccatcaccaagttcagagacaacctggaggcctgcatcagcggcctgcacgtggacgtgggcaacctgaaggccaagatcagaacccccctgctgctgtgcgccggcacccaggtgagcaccgccatggagatgatccagaccctgagcggcgaggccgccagcctgaccaacaaggccaaggcctacagccactaccaggactgcttcagcgacagccagagccacatgcacagcgtgaacgtggaggagatcacccagatcgtgctgagcgagatcagcgacatcgagggcgacctgaccctgagaaagaagctgtgggaggcccaggaggagtggaagagagccagctgggagtggagaaacagcagcctgcagagcatcgacgtggagagcgtgcagagaaacgtgagcaagctgatgcacatcatcagcgtgctggagaaggagatctacagcatcttcatcatccccagcatcgacgacatcagcgcccagctggaggagagccaggtgatcctggccaccatcaagggcagcccccacatcggccccatcaagagccagatcatgttctacaacgactgcgtgaagagcttcgtgagcagctacagcagagagaagctggagaaggtgcacgccggcctgatgtgccacctggaggaggtggccgacctggtggtgctggacaccagcaacagcagaaccaaggccatcctgggcgccctgctgatcctgtacgtgcactgcagagacatcgtgatcaacctgctgctgaagaacatcttcaacgccgaggacttcgagtggaccagacacctgcagtacaagtggaacgagaagcagaagctgtgctacgtgagccagggcaacgccagcttcacctacggctacgagtacctgggctgcaccagcagactggtgatcacccccctgaccgacagatgctggctgaccctgatggaggccctgcacctgaacctgggcggctgccccgccggccccgccggcaccggcaagaccgagaccgtgaaggacctggccaagtgcgccctgttcgccttcaagtgcaacaccgccctgatcaagctgcccaacagcctgatcgtgctgacctgcttcggcctggagaagaccgtgctggtgatgaacaccgtgatgagcttcagattcgtgctggagggcaaggagatcagaatcaacatgagctgcgccgtgttcatcaccatgaaccccagatacggcggcggcgtggagctgcccgacaacctgaagagcctgttcagacccgtggccatgatggtgccccactaccagatgatcgccgagatcatcctgttcagcttcggcttcaagagcgccaacagcctgagcggcaagctgaccaacctgtacgagctggccagaaagcagctgagccagcaggaccactacaacttcggcctgagaagcctgaagatcgtgctgatcatggccggcaccaagaagagagagttcaagtgcgacaccagcgacagcctgagcgaggccgacgagaccctgatcgtgatcgaggccatcagagaggccagcctgcccaagtgcccccccgaggacgtgcccctgttcgagaacatcatcggcgacatcttccccgaggtgaccgtgctgaaggtgaaccagctggccctggagaaggtgatctacaccgccacccagcagctgggcctgcagaactggagcagccagaaggagaagatcatccagttctacaaccagctgcaggtgtgcgtgggcgtgatgctggtgggccccaccggcggcggcaagaccaccgtgagaagaatcctggagaaggccctgaccctgctgcccatcgccgacttcctgagcgtggccgagagaaagagcgccagcaagatcagcgagagaaagggcaaggtggacatctgcgtgctgaaccccaagtgcgtgaccctgagcgagctgtacggccagctggaccccaacaccatggagtggaccgacggcctgctgagcgccaccatcagaagctacgtgtacttcaacacccccaagaacaccaagaaggacatcgacctgagactgaagagcagaatcagcgacctgagcaacgtgttcaagctggacagcagcgacaccaccgagaccgacgacaacatcttcgaggagatcgagaaggtggtgaagatccccgagaaccacaacttcgactggcagtggatcatcctggacggccccgtggacaccttctgggtggagaacctgaacagcgtgctggacgacaccagaaccctgtgcctggccaacagcgagagaatcgccctgaccaacaagatcagagtgatcttcgaggtggacaacctgagccaggccagccccgccaccgtgagcagatgcgccatggtgtacatggaccccgtggacctgggctgggagccctacgtgaagagctggctgctgaagaccagcaagatcatcagccagagcggcgtggactgcctggagttcatgatcaagaacagcgtgaccgacggcctgcagttcatcagaaacagacagaagttccagccctaccccatggaggacatcaccgtggtgatcaccctgtgcagaatcctggacgccttcttcgacttcatgggcaagaacggcggcttcgagcagagcgacgacctgaacgacaccagcagcaaggaggccaacagccagagagagagcgtgaccttcaaggacatcgagaagagagacgagaacacctggtaccccgagaagaaccccgacaagctgaccaagatcatccagaagctgttcgtgttcgccttcacctgggccttcggcggcgccctgaacagagaggacgagcacagagagaacatccccttctgccccagcctggagcccgacagcctggccaaggtgacctacgacttcgacaagctggtgcacgagctgttcggcaacagcagccaggtgggcatcaacctgcccaccggcgagtgcagcatcttcggctacttcgtggacatcgagcagtgcgagttcatcccctggagcgacctggtgcccaacgaccagaccctgatccagagagacaaccccaccaagaagcccgaggtgagaaccaacaagaagctgctgaagaacaacgaccacaagggcgtggtggtgagcaccatcaacttcagcaccaacgtgaccgccgccaagaccaaggagatgatcctgaagaagctgatcagaagaaccaaggacaccctgggcgcccccaagaacaacagaatcctgatcttcatcgacgacatgaacatgcccgtgagcgacatgtacggcgcccagccccccctggagctgatcagacagctgctggacctgggcggcgtgtacgacaccgagaagaacacctggaagaacatccaggacctgagcatcgtggccgcctgcgtgcccgtggtgaacgacatcagccccagactgctgaagcacttcagcatgctggtgctgccccaccccagccaggacatcctgtgcaccatcttccagatcggcatcgacggctgcggcaagaagacctgcgccaccctggcctgctacctgaccgacaacaagctgtacagagtgcccatcagccacaagtgcgcctacatcgagttcaaggaggtgttcaagaaggtgttcatccacgccggcctgaagggcaagcccaccgtgctgatggtgcccaacctgaacatcgagcaggacagcttcctggaggacctgaactacatcatcagcagcggcagaatccccgacctgttcgagaacgtggagctggacagcatcgccatgaagatcagatacctgaccgagcagagcggccacatggacaacagacagagcctgctgagcttcttccagaagagaatctacaagaacctgcacatcttcgtgatcatgagccccgagggccccagcttcagacagaactgcagagtgtaccccagcatgatcagcagctgcaccatcgactggtacgagagatggcccgaggaggccctgctgatcgtggccaacagcttcctgaaggagaaggtgaacttcgagaacagagagaacctgaaggagaagctggcccccacctgcgtgcagatccacaagagcatgaaggacctgaacagaaagtacttcgaggagaccggcagattctactacaccacccccaacagctacctgcagttcatggagaccttcgcccacatcctgagagccagagaggaggagatgcagaccaagagagacagattccacatgggcctgagcaccatcctggaggccaccaccctggtgaccgagatgcaggaggagctgctgatcctgggcccccaggtggagcagaagaccaaggagaccgagaccctgatggagaagctgagaaaggacagccaggtggtggagaaggtgcagatgctggtgaagcaggacgaggagatcgtggccgaggaggtgagaatcgtggaggactacgcccagaagaccgccaacgagctgaagagcgtgctgcccgccttcgacaaggccatcgtggccctgaacgccctggacaaggccgacgtggccgagctgagagtgtacaccagaccccccttcctggtgctgaccgtgatgaacgccgtgtgcatcctgctgcagaagaagcccaactgggccaccgccaagctgctgctgagcgagaccggcttcctgaagaagctgatcaacctggacaaggacagcatccccgacaaggtgttcgtgaagctgaagaagatcgtgaccctgcccgacttcaacccccacaagatcagcctggtgagcgtggcctgctgcagcctgtgccagtgggtgatcgccctgaacaactaccacgaggtgcagaaggtggtgggccccaagcagatccaggtggccgaggcccagaacgtgctgaagatcgccagacagagactggccgagaagcagagaggcctgcagctgatcagcagatggcacaaccagggcctgccccacggccagtacagcgtggagaacgccatcctgatcaagaacggccagcagtggcccctgctgatcgacccccacagacaggcccacaagtggatcagacagatggagggcagcagactgcagaagctgagcatcgaggacagcaactacaccaagaagatcgagaacgccatgaagaccggcggcagcgtgctgctgcagagctgccaggccagcacctggagaaagaagctgtacctgagcaccgagatcgacaacccccacttcctgcccagcgtgtacaacttcgtgaccatgatcaacttcaccgtgaccttccagggcctgcaggaccagctgctgagcaccgtggtgacccacgaggtgccccacctggaggaccagagaagcaagctgctggagagcatcagcctggacgccatcaccctggaggagctggaggagaagaccctgaacctgctgcagaaggccctgggcagcatcctggacgacgacaagatcgtggacaccctgagaaagagcaagatgaccagcaacgagatcagcaagagaatcgaggccaccaagaaggccgagagcgagatccaggccatcagaaagaactacctgcccatcgccaccagaggcgccctgctgtacttcctggtggccgacctgacccagatcaactacatgtaccagttcagcctggactggttccaccaggtgttcgtgagcagcgtggtgagcaagagcaaggagcaggagcacagcttcaagagagagaaggtgagccccaaggaggtgcacgagttcatcagcatcagcaaggagcccaacctggagaacgagaagaacctgctggacaagcacatcaagagcgccatcgacatgctgaccaagagcatcttcaaggtggtgagcagcgccctgttcaacgaggacaagctgtgcttcagcttcagactgtgcaccgtgatcatgcagaacaacgccaacggcaacctgatccaggacgacatcggcttcctgcccgaggaggagtggaacatcttcctgtacagcggcatcctgatcaacatcaagagcgccctgagccagagcagactgaccagcaccttcgagatcggcgagagccagcacctgcagtggctgagcgacagcagatggagacagtgccagtacgtgagcacccacctggagcccttcagcctgctgtgcaagagcctgctgagcaacgtgagccagtgggacaccttcaagaacagcaaggccgtgtacagcctgatcagcacccccttcagcagcgagaacgccagcctggaggagaacaccaagccccccgaggagaagcacaccttctgcctgctgctgagagccatcaaccacaccggcaccgacctgggccccgtgggcagaggccagtggctgaccagcaccgcctgcgacagacacaccgacgtgtgcagcttcagcttcgccctgaacgacggcgtgcccgacgtggagcacgtgcaggacatcttctacggccactgcgtggacaagtaccacgtgaaggtgctgagacccgagagcctgaacaacagcgtgagaaagttcatcaccgagaagatgggcaacaagtacctgcagagaaccggcgtgaacctgaaggacgcctacaagggcagcaacgccagaacccccctgatcctgatccagacccacggcagcgccagcatcaaggactacatccacatcatccagagcctgcccgacgacgacctgcccgaggtgctgggcatccaccccgaggccatcagaagctgctgggagacccagggcgagaagttcatcgagaacctgatcgccatgcagcccaagaccaccaccgccaacctgatgatcagacccgagcagagcaaggacgagctggtgatggagatcctgagcgacctgctgaagagactgcccctgaccgtggagaaggaggagatcgccgtgggcacccccagcaccctgaagagcatgatgagcagcagcatctgggagagcctgagcaagaacctgaaggaccacgaccccctgatccactgcgtgctgctgaccttcctgaagcaggagatcaagagattcgacaagctgctgttcgtgatccacaagagcctgaaggacctgcagctggccatcaagggcgagatcatcctgacccaggagctggaggagatcttcaacagcttcctgaacatgagagtgcccaccctgtggcagaagcacgcctacagaagctgcaagcccctgagcagctggatcgacgacctgatccagagactgaacttcttcaacacctgggccaaggtggcctacaccgccatccagagaagatacatgagattcgtgaccgtgtggaagcagagcatccccagcaccagccagaagtgcaagcaccccgaggacagcgagaacaacttcttcgagggcttccccagcagatactggctgcccgccttcttcttcccccaggccttcctggccgccgtgctgcaggactacggcagaagcagaggcatcgccgtggacgccctgaccttcacccaccacgtgatcagcaacaccaccgacaaggacgagaagttcagcgtgttcatgcccaagaagctgaacatcgtgagaagagccttcaagggcagcgccagcagccacaccggcgtgtacatcttcggcctgttcatcgagggcgccagatggaacagagagcagaagatcctggaggacagcctgcccctggagatgtgctgcgacttccccgacatctacttcctgcccaccaagatcagcaccaagacccccaacgccagcaaccagaccgacagcgagctgtacgccttcgagtgccccgtgtaccagacccccgagagaagcagaatcctggccaccaccggcctgcccaccaacttcctgaccagcgtgtacctgagcaccaagaagccccccagccactggatcaccatgagagtggccctgctgtgcgagaagaacgagaagtag

SEQ ID NO: 79840 - DNA, 2619 bp, synthetic construct
  misc_feature 1..2619: note = Description of Artificial Sequence: Synthetic coding sequence
  source 1..2619: mol_type = other DNA
atgagcagcaaggccgagaagaagcagagactgagcggcagaggcagcagccaggccagctggagcggcagagccaccagagccgccgtggccacccaggagcagggcaacgcccccgccgtgagcgagcccgagctgcaggccgagctgcccaaggaggagcccgagcccagactggagggcccccaggcccagagcgaggagagcgtggagcccgaggccgacgtgaagcccctgttcctgagcagagccgccctgaccggcctggccgacgccgtgtggacccaggagcacgacgccatcctggagcacttcgcccaggaccccaccgagagcatcctgaccatcttcatcgacccctgcttcggcctgaagctggagctgggcatgcccgtgcagacccagaaccagctggtgtacttcatcagacaggcccccgtgcccatcacctgggagaacttcgaggccaccgtgcagttcggcaccgtgagaggcccctacatccccgccctgctgagactgctgggcggcgtgttcgccccccagatcttcgccaacaccggctggcccgagagcatcagaaaccacttcgccagccacctgcacaagttcctggcctgcctgaccgacaccagatacaagctggagggccacaccgtgctgtacatccccgccgaggccatgaacatgaagcccgagatggtgatcaaggacaaggagctggtgcagagactggagaccagcatgatccactggaccagacagatcaaggagatgctgagcgcccaggagaccgtggagaccggcgagaacctgggccccctggaggagatcgagttctggagaaacagatgcatggacctgagcggcatcagcaagcagctggtgaagaagggcgtgaagcacgtggagagcatcctgcacctggccaagagcagctacctggcccccttcatgaagctggcccagcagatccaggacggcagcagacaggcccagagcaacctgaccttcctgagcatcctgaaggagccctaccaggagctggccttcatgaagcccaaggacatcagcagcaagctgcccaagctgatcagcctgatcagaatcatctgggtgaacagcccccactacaacaccagagagagactgaccagcctgttcagaaagatgagcaacgagatcatcagactgtgctgccacgccatcagcctggacagaatcttcgagggctacgtgagcagcagcaaggaggacctgcagggctgcatcctgtgctgccacgcctggaaggaccactacgtgcaggccgtgcagatgcacatccagttcagcagcagaggctgggtgctggaccagaccagcatcttcgcccaggtggacgccttcgtgcagagatgcaaggacctgatcgaggtgtgcgactgccagtaccacttcgccagatgggaggacggcaagcagggccccctgccctgcttcttcggcgcccagggcccccagatcaccagaaacctgctggagatcgaggacatcttccacaagaacctgcacaccctgagagccgtgagaggcggcatcctggacgtgaagaacacctgctggcacgaggactacaacaagttcagagccggcatcaaggacctggaggtgatgacccagaacctgatcaccagcgccttcgagctggtgagagacgtgccccacggcgtgctgctgctggacaccttccacagactggccagcagagaggccatcaagagaacctacgacaagaaggccgtggacctgtacatgctgttcaacagcgagctggccctggtgaacagagagagaaacaagaagtggcccgacctggagccctacgtggcccagtacagcggcaaggccagatgggtgcacatcctgagaagaagaatcgacagagtgatgacctgcctggccggcgcccacttcctgcccagaatcggcaccggcaaggagagcgtgcacacctaccagcagatggtgcaggccatcgacgagctggtgagaaagaccttccaggagtggaccagcagcctggacaaggactgcatcagaagactggacacccccctgctgagaatcagccaggagaaggccggcatgctggacgtgaacttcgacaagtacagaagccacctggcccccttcccctacacccccctgctgcagctgagccaggagttccacagccacctgctgacccccctgttcatcatcctgagcctgagccacaccatctgcctgctgagcagcttctacttcttcttcagcagcttcatcttcgtgagcccccacctgcccccctgctaccagcacttcaacttcaccacctacctgaagacccagcagaacaagaccatgatcggccaggccagatggctgacccccgtgatccccgccctgtgggaggccgaggtgggcgccagcctggagcccagaagcctgagaaccgcctgggccacctggcagaaccccgtgagcgccaagaacaccaagatcagctgggcctggtggcacaagcccgtggtgagcgccacctgggagggcgaggtgggcggcagccccgagcccggcagacagagactgcagtag

SEQ ID NO: 79841 - DNA, 12591 bp, synthetic construct
  misc_feature 1..12591: note = Description of Artificial Sequence: Synthetic coding sequence
  source 1..12591: mol_type = other DNA
atgagcagcaaggccgagaagaagcagagactgagcggcagaggcagcagccaggccagctggagcggcagagccaccagagccgccgtggccacccaggagcagggcaacgcccccgccgtgagcgagcccgagctgcaggccgagctgcccaaggaggagcccgagcccagactggagggcccccaggcccagagcgaggagagcgtggagcccgaggccgacgtgaagcccctgttcctgagcagagccgccctgaccggcctggccgacgccgtgtggacccaggagcacgacgccatcctggagcacttcgcccaggaccccaccgagagcatcctgaccatcttcatcgacccctgcttcggcctgaagctggagctgggcatgcccgtgcagacccagaaccagctggtgtacttcatcagacaggcccccgtgcccatcacctgggagaacttcgaggccaccgtgcagttcggcaccgtgagaggcccctacatccccgccctgctgagactgctgggcggcgtgttcgccccccagatcttcgccaacaccggctggcccgagagcatcagaaaccacttcgccagccacctgcacaagttcctggcctgcctgaccgacaccagatacaagctggagggccacaccgtgctgtacatccccgccgaggccatgaacatgaagcccgagatggtgatcaaggacaaggagctggtgcagagactggagaccagcatgatccactggaccagacagatcaaggagatgctgagcgcccaggagaccgtggagaccggcgagaacctgggccccctggaggagatcgagttctggagaaacagatgcatggacctgagcggcatcagcaagcagctggtgaagaagggcgtgaagcacgtggagagcatcctgcacctggccaagagcagctacctggcccccttcatgaagctggcccagcagatccaggacggcagcagacaggcccagagcaacctgaccttcctgagcatcctgaaggagccctaccaggagctggccttcatgaagcccaaggacatcagcagcaagctgcccaagctgatcagcctgatcagaatcatctgggtgaacagcccccactacaacaccagagagagactgaccagcctgttcagaaaggtgtgcgactgccagtaccacttcgccagatgggaggacggcaagcagggccccctgccctgcttcttcggcgcccagggcccccagatcaccagaaacctgctggagatcgaggacatcttccacaagaacctgcacaccctgagagccgtgagaggcggcatcctggacgtgaagaacacctgctggcacgaggactacaacaagttcagagccggcatcaaggacctggaggtgatgacccagaacctgatcaccagcgccttcgagctggtgagagacgtgccccacggcgtgctgctgctggacaccttccacagactggccagcagagaggccatcaagagaacctacgacaagaaggccgtggacctgtacatgctgttcaacagcgagctggccctggtgaacagagagagaaacaagaagtggcccgacctggagccctacgtggcccagtacagcggcaaggccagatgggtgcacatcctgagaagaagaatcgacagagtgatgacctgcctggccggcgcccacttcctgcccagaatcggcaccggcaaggagagcgtgcacacctaccagcagatggtgcaggccatcgacgagctggtgagaaagaccttccaggagtggaccagcagcctggacaaggactgcatcagaagactggacacccccctgctgagaatcagccaggagaaggccggcatgctggacgtgaacttcgacaagagcctgctgatcctgttcgccgagatcgactactgggagagactgctgttcgagaccccccactacgtggtgaacgtggccgagagagccgaggacctgagaatcctgagagagaacctgctgctggtggccagagactacaacagaatcatcgccatgctgagccccgacgagcaggccctgttcaaggagagaatcagactgctggacaagaagatccaccccggcctgaagaagctgcactgggccctgaagggcgccagcgccttcttcatcaccgagtgcagaatccacgccagcaaggtgcagatgatcgtgaacgagttcaaggccagcaccctgaccatcggctggagagcccaggagatgagcgagaagctgctggtgagaatcagcggcaagagagtgtacagagacctggagttcgaggaggaccagagagagcacagagccgccgtgcagcagaagctgatgaacctgcaccaggacgtggtgaccatcatgaccaacagctacgaggtgttcaagaacgacggccccgagatccagcagcagtggatgctgtacatgatcagactggacagaatgatggaggacgccctgagactgaacgtgaagtggagcctgctggagctgagcaaggccatcaacggcgacggcaagaccagccccaaccccctgttccaggtgctggtgatcctgaagaacgacctgcagggcagcgtggcccaggtggagttcagccccaccctgcagaccctggccggcgtggtgaacgacatcggcaaccacctgttcagcaccatcagcgtgttctgccacctgcccgacatcctgaccaagagaaagctgcacagagagcccatccagaccgtggtggagcaggacgaggacatcaagaagatccagacccagatcagcagcggcatgaccaacaacgccagcctgctgcagaactacctgaagacctgggacatgtacagagagatctgggagatcaacaaggacagcttcatccacagataccagagactgaacccccccgtgagcagcttcgtggccgacatcgccagatacaccgaggtggccaacaacgtgcagaaggaggagaccgtgaccaacatccagttcgtgctgctggactgcagccacctgaagttcagcctggtgcagcactgcaacgagtggcagaacaagttcgccaccctgctgagagagatggccgccggcagactgctggagctgcacacctacctgaaggagaacgccgagaagatcagcagacccccccagaccctggaggagctgggcgtgagcctgcagctggtggacgccctgaagcacgacctggccaacgtggagacccagatcccccccatccacgagcagttcgccatcctggagaagtacgaggtgcccgtggaggacagcgtgctggagatgctggacagcctgaacggcgagtgggtggtgttccagcagaccctgctggacagcaagcagatgctgaagaagcacaaggagaagttcaagaccggcctgatccacagcgccgacgacttcaagaagaaggcccacaccctgctggaggacttcgagttcaagggccacttcaccagcaacgtgggctacatgagcgccctggaccagatcacccaggtgagagccatgctgatggccatgagagaggaggagaacagcctgagagccaacctgggcatcttcaagatcgagcagccccccagcaaggacctgcagaacctggagaaggagctggacgccctgcagcagatctgggagatcgccagagactgggaggagaactggaacgagtggaagaccggcagattcctgatcctgcagaccgagaccatggagaccaccgcccacggcctgttcagaagactgaccaagctggccaaggagtacaaggacagaaactgggagatcatcgagaccaccagaagcaagatcgagcagttcaagagaaccatgcccctgatcagcgacctgagaaaccccgccctgagagagagacactgggaccaggtgagagacgagatccagagagagttcgaccaggagagcgagagcttcaccctggagcagatcgtggagctgggcatggaccagcacgtggagaagatcggcgagatcagcgccagcgccaccaaggagctggccatcgaggtggccctgcagaacatcgccaagacctgggacgtgacccagctggacatcgtgccctacaaggacaagggccaccacagactgagaggcaccgaggaggtgttccaggccctggaggacaaccaggtggccctgagcaccatgaaggccagcagattcgtgaaggccttcgagaaggacgtggaccactgggagagatgcctgagcctgatcctggaggtgatcgagatgatcctgaccgtgcagagacagtggatgtacctggagaacatcttcctgggcgaggacatcagaaagcagctgcccaacgagagcaccctgttcgaccaggtgaacagcaactggaaggccatcatggacagaatgaacaaggacaacaacgccctgagaagcacccaccaccccggcctgctggacaccctgatcgagatgaacaccatcctggaggacatccagaagagcctggacatgtacctggagaccaagagacacatcttccccagattctacttcctgagcaacgacgacctgctggagatcctgggccagagcagaaaccccgaggccgtgcagccccacctgaagaagtgcttcgacaacatcaagctgctgagaatccagaaggtgggcggccccagcagcaagtgggaggccgtgggcatgttcagcggcgacggcgagtacatcgacttcctgcacagcgtgttcctggagggccccgtggagagctggctgggcgacgtggagcagaccatgagagtgaccctgagagacctgctgagaaactgccacctggccctgagaaagttcctgaacaagagagacaagtgggtgaaggagtgggccggccaggtggtgatcaccgccagccagatccagtggaccgccgacgtgaccaagtgcctgctgaccgccaaggagagagccgacaagaagatcctgaaggtgatgaagaagaaccaggtgagcatcctgaacaagtacagcgaggccatcagaggcaacctgaccaagatcatgagactgaagatcgtggccctggtgaccatcgagatccacgccagagacgtgctggagaagctgtacaagagcggcctgatggacgtgaacagcttcgactggctgagccagctgagattctactgggagaaggacctggacgactgcgtgatcagacagaccaacacccagttccagtacaactacgagtacctgggcaacagcggcagactggtgatcacccccctgaccgacagatgctacatgaccctgaccaccgccctgcacctgcacagaggcggcagccccaagggccccgccggcaccggcaagaccgagaccgtgaaggacctgggcaaggccctgggcatctacgtgatcgtggtgaactgcagcgagggcctggactacaagagcatgggcagaatgtacagcggcctggcccagaccggcgcctggggctgcttcgacgagttcaacagaatcaacatcgaggtgctgagcgtggtggcccaccagatcctgtgcatcctgagcgccctggccgccggcctgacccacttccacttcgacggcttcgagatcaacctggtgtggagctgcggcatcttcatcaccatgaaccccggctacgccggcagaaccgagctgcccgagaacctgaagagcatgttcagacccatcgccatggtggtgcccgacagcaccctgatcgccgagatcatcctgttcggcgagggcttcggcaactgcaagatcctggccaagaaggtgtacaccctgtacagcctggccgtgcagcagctgagcagacaggaccactacgacttcggcctgagagccctgaccagcctgctgagatacgccggcaagaagagaagactgcagcccgacctgaccgacgaggaggtgctgctgctgagcatgagagacatgaacatcgccaagctgaccagcgtggacgcccccctgttcaacgccatcgtgcaggacctgttccccaacatcgagctgcccgtgatcgactacggcaagctgagagagaccgtggagcaggagatcagagacatgggcctgcagagcacccccttcaccctgaccaaggtgttccagctgtacgagaccaagaacagcagacacagcaccatgatcgtgggctgcaccggcagcggcaagaccgccagctggagaatcctgcaggccagcctgagcagcctgtgcagagccggcgaccccaacttcaacatcgtgagagagttccccctgaaccccaaggccctgagcctgggcgagctgtacggcgagtacgacctgagcaccaacgagtggaccgacggcatcctgagcagcgtgatgagaaccgcctgcgccgacgagaagcccgacgagaagtggatcctgttcgacggccccgtggacaccctgtggatcgagaacatgaacagcgtgatggacgacaacaaggtgctgaccctgatcaacggcgagagaatcgccatgcccgagcaggtgagcctgctgttcgaggtggaggacctggccatggccagccccgccaccgtgagcagatgcggcatggtgtacaccgactacgccgacctgggctggaagccctacgtgcagagctggctggagaagagacccaaggccgaggtggagcccctgcagagaatgttcgagaagctgatcaacaagatgctggccttcaagaaggacaactgcaaggagctggtgcccctgcccgagtacagcggcatcaccagcctgtgcaagctgtacagcgccctggccacccccgagaacggcgtgaaccccgccgacggcgagaactacgtgaccatggtggagatgaccttcgtgttcagcatgatctggagcgtgtgcgccagcgtggacgaggagggcagaaagagaatcgacagctacctgagagagatcgagggcagcttccccaacaaggacaccgtgtacgagtacttcgtggaccccaagatcagaagctggaccagcttcgaggacaagctgcccaagagctggagatacccccccaacgcccccttctacaagatcatggtgcccaccgtggacaccgtgagatacaactacctggtgagcagcctggtggccaaccagaaccccatcctgctggtgggccccgtgggcaccggcaagaccagcatcgcccagagcgtgctgcagagcctgcccagcagccagtggagcgtgctggtggtgaacatgagcgcccagaccaccagcaacaacgtgcagagcatcatcgagagcagagtggagaagagaaccaagggcgtgtacgtgcccttcggcggcaagagcatgatcaccttcatggacgacctgaacatgcccgccaaggacatgttcggcagccagccccccctggagctgatcagactgtggatcgactacggcttctggtacgacagaaccaagcagaccatcaagtacatcagagagatgttcctgatggccgccatgggcccccccggcggcggcagaaccgtgatcagccccagactgagaagcagattcaacatcatcaacatgaccttccccaccaagagccagatcatcagaatcttcggcaccatgatcaaccagaagctgcaggacttcgaggaggaggtgaagcccatcggcaacgtggtgaccgaggccaccctggacatgtacaacaccgtggtgcagagattcctgcccacccccaccaagatgcactacctgttcaacctgagagacatcagcaaggtgttccagggcatgctgagagccaacaaggacttccacgacaccaagagcagcatcaccagactgtggatccacgagtgcttcagagtgttcagcgacagactggtggacgccgccgacaccgaggccttcatgggcatcatcagcgacaagctgggcagcttcttcgacctgaccttccaccacctgtgccccagcaagagaccccccatcttcggcgacttcctgaaggagcccaaggtgtacgaggacctgaccgacctgaccgtgctgaagaccgtgatggagaccgccctgaacgagtacaacctgagccccagcgtggtgcccatgcagctggtgctgttcagagaggccatcgagcacatcaccagaatcgtgagagtgatcggccagcccagaggcaacatgctgctggtgggcatcggcggcagcggcagacagagcctggccagactggccagcagcatctgcgactacaccaccttccagatcgaggtgaccaagcactacagaaagcaggagttcagagacgacatcaagagactgtacagacaggccggcgtggagctgaagaccaccagcttcatcttcgtggacacccagatcgccgacgagagcttcctggaggacatcaacaacatcctgagcagcggcgaggtgcccaacctgtacaagcccgacgagttcgaggagatccagagccacatcatcgaccaggccagagtggagcaggtgcccgagagcagcgacagcctgttcgcctacctgatcgagagagtgcagaacaacctgcacatcgtgctgtgcctgagccccatgggcgaccccttcagaaactggatcagacagtaccccgccctggtgaactgcaccaccatcaactggttcagcgagtggccccaggaggccctgctggaggtggccgagaagtgcctgatcggcgtggacctgggcacccaggagaacatccacagaaaggtggcccagatcttcgtgaccatgcactggagcgtggcccagtacagccagaagatgctgctggagctgagaagacacaactacgtgacccccaccaagtacctggagctgctgagcggctacaagaagctgctgggcgagaagagacaggagctgctggcccaggccaacaagctgagaaccggcctgttcaagatcgacgagaccagagagaaggtgcaggtgatgagcctggagctggaggacgccaagaagaaggtggccgagttccagaagcagtgcgaggagtacctggtgatcatcgtgcagcagaagagagaggccgacgagcagcagaaggccctggagagcctgaacaagaaggacatcggcgagatcaagagctacggcagaccccccgcccaggtggagatcgtgatgcaggccgtgatgatcctgagaggcaacgagcccacctgggccgaggccaagagacagctgggcgagcagaacttcatcaagagcctgatcaacttcgacaaggacaacatcagcgacaaggtgctgaagaagatcggcgcctactgcgcccagcccgacttccagcccgacatcatcggcagagtgagcctggccgccaagagcctgtgcatgtgggtgagagccatggagctgtacggcagactgtacagagtggtggagcccaagagaatcagaatgaacgccgccctggcccagctgagagagaagcaggccgccctggccgaggcccaggagaagctgagagaggtggccgagaagctggagatgctgaagaagcagtacgacgagaagctggcccagaaggaggagctgagaaagaagagcgaggagatggagctgaagctggagagagccggcatgctggtgagcggcctggccggcgagaaggccagatgggaggagaccgtgcagggcctggaggaggacctgggctacctggtgggcgactgcctgctggccgccgccttcctgagctacatgggccccttcctgaccaactacagagacgagatcgtgaaccagatctggatcggcaagatctgggagctgcaggtgccctgcagccccagcttcgccatcgacaacttcctgtgcaaccccaccaaggtgagagactggaacatccagggcctgcccagcgacgccttcagcaccgagaacggcatcatcgtgaccagaggcaacagatgggccctgatgatcgacccccaggcccaggccctgaagtggatcaagaacatggagggcggccagggcctgaagatcatcgacctgcagatgagcgactacctgagaatcctggagcacgccatccacttcggctaccccgtgctgctgcagaacgtgcaggagtacctggaccccaccctgaaccccatgctgaacaagagcgtggccagaatcggcggcagactgctgatgagaatcggcgacaaggaggtggagtacaacaccaacttcagattctacatcaccaccaagctgagcaacccccactacagccccgagaccagcgccaagaccaccatcgtgaacttcgccgtgaaggagcagggcctggaggcccagctgctgggcatcgtggtgagaaaggagagacccgagctggaggagcagaaggacagcctggtgatcaacatcgccgccggcaagagaaagctgaaggagctggaggacgagatcctgagactgctgaacgaggccaccggcagcctgctggacgacgtgcagctggtgaacaccctgcacaccagcaagatcaccgccaccgaggtgaccgagcagctggagaccagcgagaccaccgagatcaacaccgacctggccagagaggcctacagaccctgcgcccagagagccagcatcctgttcttcgtgctgaacgacatgggctgcatcgaccccatgtaccagttcagcctggacgcctacatcagcctgttcatcctgagcatcgacaagagccacagaagcaacaagctggaggacagaatcgactacctgaacgactaccacacctacgccgtgtacagatacacctgcagaaccctgttcgagagacacaagctgctgttcagcttccacatgtgcgccaagatcctggagaccagcggcaagctgaacatggacgagtacaacttcttcctgagaggcggcgtggtgctggacagagagggccagatggacaacccctgcagcagctggctggccgacgcctactgggacaacatcaccgagctggacaagctgaccaacttccacggcctgatgaacagcttcgagcagtaccccagagactggcacctgtggtacaccaacgccgcccccgagaaggccatgctgcccggcgagtgggagaacgcctgcaacgagatgcagagaatgctgatcgtgagaagcctgagacaggacagagtggccttctgcgtgaccagcttcatcatcaccaacctgggcagcagattcatcgagccccccgtgctgaacatgaagagcgtgctggaggacagcacccccagaagccccctggtgttcatcctgagccccggcgtggaccccaccagcgccctgctgcagctggccgagcacatgggcatggcccagagattccacgccctgagcctgggccagggccaggcccccatcgccgccagactgctgagagagggcgtgacccagggccactgggtgttcctggccaactgccacctgagcctgagctggatgcccaacctggacaagctggtggagcagctgcaggtggaggacccccaccccagcttcagactgtggctgagcagcatcccccaccccgacttccccatcagcatcctgcaggtgagcatcaagatgaccaccgagccccccaagggcctgaaggccaacatgaccagactgtaccagctgatgagcgagccccagttcagcagatgcagcaagcccgccaagtacaagaagctgctgttcagcctgtgcttcttccacagcgtgctgctggagagaaagaagttcctgcagctgggctggaacatcatctacggcttcaacgacagcgacttcgaggtgagcgagaacctgctgagcctgtacctggacgagtacgaggagaccccctgggacgccctgaagtacctgatcgccggcatcaactacggcggccacgtgaccgacgactgggacagaagactgctgaccacctacatcaacgactacttctgcgaccagagcctgagcacccccttccacagactgagcgccctggagacctacttcatccccaaggacggcagcctggccagctacaaggagtacatcagcctgctgcccggcatggacccccccgaggccttcggccagcaccccaacgccgacgtggccagccagatcaccgaggcccagaccctgttcgacaccctgctgagcctgcagccccagatcacccccaccagagccggcggccagaccagagaggagaaggtgctggagctggccgccgacgtgaagcagaagatccccgagatgatcgactacgagggcacccagaagctgctggccctggaccccagccccctgaacgtggtgctgctgcaggagatccagagatacaacaccctgatgcagaccatcctgttcagcctgaccgacctggagatccccagctgcgtgagccacaagagcgagagagtggtgctggagctgagcgccgtgaagcaccccagacagtag

SEQ ID NO: 79842 - DNA, 13284 bp, synthetic construct; identical to SEQ ID NO: 79824
  misc_feature 1..13284: note = Description of Artificial Sequence: Synthetic coding sequence
  source 1..13284: mol_type = other DNA

SEQ ID NO: 79843 - DNA, 12351 bp, synthetic construct
  misc_feature 1..12351: note = Description of Artificial Sequence: Synthetic coding sequence
  source 1..12351: mol_type = other DNA
atgggcgccaccggcagactggagctgaccctggccgcccccccccaccccggccccgccttccagagaagcaaggccagagagacccagggcgaggaggagggcagcgagatgcagatcgccaagagcgacagcatccaccacatgagccacagccagggccagcccgagctgccccccctgcccgccagcgccaacgaggagcccagcggcctgtaccagaccgtgatgagccacagcttctacccccccctgatgcagagaaccagctggaccctggccgcccccttcaaggagcagcaccaccacagaggccccagcgacagcatcgccaacaactacagcctgatggcccaggacctgaagctgaaggacctgctgaaggtgtaccagcccgccaccatcagcgtgcccagagacagaaccggccagggcctgcccagcagcggcaacagaagcagcagcgagcccatgagaaagaagaccaagttcagcagcagaaacaaggaggacagcaccagaatcaagctggccttcaagaccagcatcttcagccccatgaagaaggaggtgaagaccagcctgaccttccccggcagcagacccatgagccccgagcagcagctggacgtgatgctgcagcaggagatggagatggagagcaaggagaagaagcccagcgagagcgacctggagagatactactactacctgaccaacggcatcagaaaggacatgatcgcccccgaggagggcgaggtgatggtgagaatcagcaagctgatcagcaacaccctgctgaccagccccttcctggagcccctgatggtggtgctggtgcaggagaaggagaacgactactactgcagcctgatgaagagcatcgtggactacatcctgatggaccccatggagagaaagagactgttcatcgagagcatccccagactgttcccccagagagtgatcagagcccccgtgccctggcacagcgtgtacagaagcgccaagaagtggaacgaggagcacctgcacaccgtgaaccccatgatgctgagactgaaggagctgtggttcgccgagttcagagacctgagattcgtgagaaccgccgagatcctggccggcaagctgcccctgcagccccaggagttctgggacgtgatccagaagcactgcctggaggcccaccagaccctgctgaacaagtggatccccacctgcgcccagctgttcaccagcagaaaggagcactggatccacttcgcccccaagagcaactacgacagcagcagaaacatcgaggagtacttcgccagcgtggccagcttcatgagcctgcagctgagagagctggtgatcaagagcctggaggacctggtgagcctgttcatgatccacaaggacggcaacgacttcaaggagccctaccaggagatgaagttcttcatcccccagctgatcatgatcaagctggaggtgagcgagcccatcatcgtgttcaaccccagcttcgacggctgctgggagctgatcagagacagcttcctggagatcatcaagaacagcaacggcatccccaagctgaagtacatccccctgaagttcagcttcaccgccgccgccgccgacagacagtgcgtgaaggccgccgagcccggcgagcccagcatgcacgccgccgccaccgccatggccgagctgaagggctacaacctgctgctgggcaccgtgaacgccgaggagaagctggtgagcgacttcctgatccagaccttcaaggtgttccagaagaaccaggtgggcccctgcaagtacctgaacgtgtacaagaagtacgtggacctgctggacaacaccgccgagcagaacatcgccgccttcctgaaggagaaccacgacatcgacgacttcgtgaccaagatcaacgccatcaagaagagaagaaacgagatcgccagcatgaacatcaccgtgcccctggccatgttctgcctggacgccaccgccctgaaccacgacctgtgcgagagagcccagaacctgaaggaccacctgatccagttccaggtggacgtgaacagagacaccaacaccagcatctgcaaccagtacagccacatcgccgacaaggtgagcgaggtgcccgccaacaccaaggagctggtgagcctgatcgagttcctgaagaagagcagcgccgtgaccgtgttcaagctgagaagacagctgagagacgccagcgagagactggagttcctgatggactacgccgacctgccctaccagatcgaggacatcttcgacaacagcagaaacctgctgctgcacaagagagaccaggccgagatggacctgatcaagagatgcagcgagttcgagctgagactggagggctaccacagagagctggagagcttcagaaagagagaggtgatgaccaccgaggagatgaagcacaacgtggagaagctgaacgagctgagcaagaacctgaacagagccttcgccgagttcgagctgatcaacaaggaggaggagctgctggagaaggagaagagcacctaccccctgctgcaggccatgctgaagaacaaggtgccctacgagcagctgtggagcaccgcctacgagttcagcatcaagagcgaggagtggatgaacggccccctgttcctgctgaacgccgagcagatcgccgaggagatcggcaacatgtggagaaccacctacaagctgatcaagaccctgagcgacgtgcccgcccccagaagactggccgagaacgtgaagatcaagatcgacaagttcaagcagtacatccccatcctgagcatcagctgcaaccccggcatgaaggacagacactggcagcagatcagcgagatcgtgggctacgagatcaagcccaccgagaccacctgcctgagcaacatgctggagttcggcttcggcaagttcgtggagaagctggagcccatcggcgccgccgccagcaaggagtacagcctggagaagaacctggacagaatgaagctggactgggtgaacgtgaccttcagcttcgtgaagtacagagacaccgacaccaacatcctgtgcgccatcgacgacatccagatgctgctggacgaccacgtgatcaagacccagaccatgtgcggcagccccttcatcaagcccatcgaggccgagtgcagaaagtgggaggagaagctgatcagaatccaggacaacctggacgcctggctgaagtgccaggccacctggctgtacctggagcccatcttcagcagcgaggacatcatcgcccagatgcccgaggagggcagaaagttcggcatcgtggacagctactggaagagcctgatgagccaggccgtgaaggacaacagaatcctggtggccgccgaccagcccagaatggccgagaagctgcaggaggccaacttcctgctggaggacatccagaagggcctgaacgactacctggagaagaagagactgttcttccccagattcttcttcctgagcaacgacgagctgctggagatcctgagcgagaccaaggaccccctgagagtgcagccccacctgaagaagtgcttcgagggcatcgccaagctggagttcaccgacaacctggagatcgtgggcatgatcagcagcgagaaggagaccgtgcccttcatccagaagatctaccccgccaacgccaagggcatggtggagaagtggctgcagcaggtggagcagatgatgctggccagcatgagagaggtgatcggcctgggcatcgaggcctacgtgaaggtgcccagaaaccactgggtgctgcagtggcccggccaggtggtgatctgcgtgagcagcatcttctggacccaggaggtgagccaggccctggccgagaacaccctgctggacttcctgaagaagagcaacgaccagatcgcccagatcgtgcagctggtgagaggcaagctgagcagcggcgccagactgaccctgggcgccctgaccgtgatcgacgtgcacgccagagacgtggtggccaagctgagcgaggacagagtgagcgacctgaacgacttccagtggatcagccagctgagatactactgggtggccaaggacgtgcaggtgcagatcatcaccaccgaggccctgtacggctacgagtacctgggcaacagccccagactggtgatcacccccctgaccgacagatgctacagaaccctgatgggcgccctgaagctgaacctgggcggcgcccccgagggccccgccggcaccggcaagaccgagaccaccaaggacctggccaaggccctggccaagcagtgcgtggtgttcaactgcagcgacggcctggactacaaggccatgggcaagttcttcaagggcctggcccaggccggcgcctgggcctgcttcgacgagttcaacagaatcgaggtggaggtgctgagcgtggtggcccagcagatcctgagcatccagcaggccatcatcagaaagctgaagaccttcatcttcgagggcaccgagctgagcctgaaccccacctgcgccgtgttcatcaccatgaaccccggctacgccggcagagccgagctgcccgacaacctgaaggccctgttcagaaccgtggccatgatggtgcccgactacgccctgatcggcgagatcagcctgtacagcatgggcttcctggacagcagaagcctggcccagaagatcgtggccacctacagactgtgcagcgagcagctgagcagccagcaccactacgactacggcatgagagccgtgaagagcgtgctgaccgccgccggcaacctgaagctgaagtaccccgaggagaacgagagcgtgctgctgctgagagccctgctggacgtgaacctggccaagttcctggcccaggacgtgcccctgttccagggcatcatcagcgacctgttccccggcgtggtgctgcccaagcccgactacgaggtgttcctgaaggtgctgaacgacaacatcaagaagatgaagctgcagcccgtgccctggttcatcggcaagatcatccagatctacgagatgatgctggtgagacacggctacatgatcgtgggcgaccccatgggcggcaagaccagcgcctacaaggtgctggccgccgccctgggcgacctgcacgccgccaaccagatggaggagttcgccgtggagtacaagatcatcaaccccaaggccatcaccatgggccagctgtacggctgcttcgaccaggtgagccacgagtggatggacggcgtgctggccaacgccttcagagagcaggccagcagcctgagcgacgacagaaagtggatcatcttcgacggccccgtggacgccatctggatcgagaacatgaacaccgtgctggacgacaacaagaagctgtgcctgatgagcggcgagatcatccagatgaacagcaagatgagcctgatcttcgagcccgccgacctggagcaggccagccccgccaccgtgagcagatgcggcatgatctacatggagccccaccagctgggctggaagcccctgaaggacagctacatggacaccctgcccagcagcctgaccaaggagcacaaggagctggtgaacgacatgttcatgtggctggtgcagccctgcctggagttcggcagactgcactgcaagttcgtggtgcagaccagccccatccacctggccttcagcatgatgagactgtacagcagcctgctggacgagatcagagccgtggaggaggaggagatggagctgggcgagggcctgagcagccagcagatcttcctgtggctgcagggcctgttcctgttcagcctggtgtggaccgtggccggcaccatcaacgccgacagcagaaagaagttcgacgtgttcttcagaaacctgatcatgggcatggacgacaaccaccccagacccaagagcgtgaagctgaccaagaacaacatcttccccgagagaggcagcatctacgacttctacttcatcaagcaggccagcggccactgggagacctggacccagtacatcaccaaggaggaggagaaggtgcccgccggcgccaaggtgagcgagctgatcatccccaccatggagaccgccagacagagcttcttcctgaagacctacctggaccacgagatccccatgctgttcgtgggccccaccggcaccggcaagagcgccatcaccaacaacttcctgctgcacctgcccaagaacacctacctgcccaactgcatcaacttcagcgccagaaccagcgccaaccagacccaggacatcatcatgagcaagctggacagaagaagaaagggcctgttcggcccccccatcggcaagaaggccgtggtgttcgtggacgacctgaacatgcccgccaaggaggtgtacggcgcccagccccccatcgagctgctgagacagtggatcgaccacggctactggttcgacaagaaggacaccaccagactggacatcgtggacatgctgctggtgaccgccatgggcccccccggcggcggcagaaacgacatcaccggcagattcaccagacacctgaacatcatcagcatcaacgccttcgaggacgacatcctgaccaagatcttcagcagcatcgtggactggcacttcggcaagggcttcgacgtgatgttcctgagatacggcaagatgctggtgcaggccaccaagaccatctacagagacgccgtggagaacttcctgcccacccccagcaagagccactacgtgttcaacctgagagacttcagcagagtgatccagggcgtgctgctgtgcccccacacccacctgcaggacgtggagaagtgcatcagactgtggatccacgaggtgtacagagtgttctacgacagactgatcgacaaggaggacagacaggtgttcttcaacatggtgaaggagaccaccagcaactgcttcaagcagaccatcgagaaggtgctgatccacctgagccccaccggcaagatcgtggacgacaacatcagaagcctgttcttcggcgactacttcaagcccgagagcgaccagaagatctacgacgagatcaccgacctgaagcagctgaccgtggtgatggagcactacctggaggagttcaacaacatcagcaaggcccccatgagcctggtgatgttcagattcgccatcgagcacatcagcagaatctgcagagtgctgaagcaggacaagggccacctgctgctggtgggcatcggcggcagcggcagacagagcgccgccaagctgagcaccttcatgaacgcctacgagctgtaccagatcgagatcaccaagaactacgccggcaacgactggagagaggacctgaagaagatcatcctgcaggtgggcgtggccaccaagagcaccgtgttcctgttcgccgacaaccagatcaaggacgagagcttcgtggaggacatcaacatgctgctgaacaccggcgacgtgcccaacatcttccccgccgacgagaaggccgacatcgtggagaagatgcagaccgccgccagaacccagggcgagaaggtggaggtgacccccctgagcatgtacaacttcttcatcgagagagtgatcaacaagatcagcttcagcctggccatgagccccatcggcgacgccttcagaaacagactgagaatgttccccagcctgatcaactgctgcaccatcgactggttccagagctggcccaccgacgccctggagctggtggccaacaagttcctggaggacgtggagctggacgacaacatcagagtggaggtggtgagcatgtgcaagtacttccaggagagcgtgaagaagctgagcctggactactacaacaagctgagaagacacaactacgtgacccccaccagctacctggagctgatcctgaccttcaagaccctgctgaacagcaagagacaggaggtggccatgatgagaaacagatacctgaccggcctgcagaagctggacttcgccgccagccaggtggccgtgatgcagagagagctgaccgccctgcagccccagctgatcctgaccagcgaggagaccgccaagatgatggtgaagatcgaggccgagaccagagaggccgacggcaagaagctgctggtgcaggccgacgagaaggaggccaacgtggccgccgccatcgcccagggcatcaagaacgagtgcgagggcgacctggccgaggccatgcccgccctggaggccgccctggccgccctggacaccctgaaccccgccgacatcagcctggtgaagagcatgcagaacccccccggccccgtgaagctggtgatggagagcatctgcatcatgaagggcatgaagcccgagagaaagcccgaccccagcggcagcggcaagatgatcgaggactactggggcgtgagcaagaagatcctgggcgacctgaagttcctggagagcctgaagacctacgacaaggacaacatcccccccctgaccatgaagagaatcagagagagattcatcaaccaccccgagttccagcccgccgtgatcaagaacgtgagcagcgcctgcgagggcctgtgcaagtgggtgagagccatggaggtgtacgacagagtggccaaggtggtggcccccaagagagagagactgagagaggccgagggcaagctggccgcccagatgcagaagctgaaccagaagagagccgagctgaagctggtggtggacagactgcaggccctgaacgacgacttcgaggagatgaacaccaagaagaaggacctggaggagaacatcgagatctgcagccagaagctggtgagagccgagaagctgatcagcggcctgggcggcgagaaggacagatggaccgaggccgccagacagctgggcatcagatacaccaacctgaccggcgacgtgctgctgagcagcggcaccgtggcctacctgggcgccttcaccgtggactacagagtgcagtgccagaaccagtggctggccgagtgcaaggacaaggtgatccccggcttcagcgacttcagcctgagccacaccctgggcgaccccatcaagatcagagcctggcagatcgccggcctgcccgtggacagcttcagcatcgacaacggcatcatcgtgagcaacagcagaagatgggccctgatgatcgacccccacggccaggccaacaagtggatcaagaacatggagaaggccaacaagctggccgtgatcaagttcagcgacagcaactacatgagaatgctggagaacgccctgcagctgggcacccccgtgctgatcgagaacatcggcgaggagctggacgccagcatcgagcccatcctgctgaaggccaccttcaagcagcagggcgtggagtacatgagactgggcgagaacatcatcgagtacagcagagacttcaagctgtacatcaccaccagactgagaaacccccactacctgcccgaggtggccgtgaaggtgtgcctgctgaacttcatgatcacccccctgggcctgcaggaccagctgctgggcatcgtggccgccaaggagaagcccgagctggaggagaagaagaaccagctgatcgtggagagcgccaagaacaagaagcacctgaaggagatcgaggacaagatcctggaggtgctgagcatgagcaagggcaacatcctggaggacgagaccgccatcaaggtgctgagcagcagcaaggtgctgagcgaggagatcagcgagaagcagaaggtggccagcatgaccgagacccagatcgacgagaccagaatgggctacaagcccgtggccgtgcacagcgccaccatcttcttctgcatcagcgacctggccaacatcgagcccatgtaccagtacagcctgacctggttcatcaacctgtacatgcacagcctgacccacagcaccaagagcgaggagctgaacctgagaatcaagtacatcatcgaccacttcaccctgagcatctacaacaacgtgtgcagaagcctgttcgagaaggacaagctgctgttcagcctgctgctgaccatcggcatcatgaagcagaagaaggagatcaccgaggaggtgtggtacttcctgctgaccggcggcatcgccctggacaacccctaccccaaccccgccccccagtggctgagcgagaaggcctgggccgagatcgtgagagccagcgccctgcccaagctgcacggcctgatggagcacctggagcagaacctgggcgagtggaagctgatctacgacagcgcctggccccacgaggagcagctgcccggcagctggaagttcagccagggcctggagaagatggtgatcctgagatgcctgagacccgacaagatggtgcccgccgtgagagagttcatcgccgagcacatgggcaagctgtacatcgaggcccccaccttcgacctgcagggcagctacaacgacagcagctgctgcgcccccctgatcttcgtgctgagccccagcgccgaccccatggccggcctgctgaagttcgccgacgacctgggcatgggcggcaccagaacccagaccatcagcctgggccagggccagggccccatcgccgccaagatgatcaacaacgccatcaaggacggcacctgggtggtgctgcagaactgccacctggccgccagctggatgcccaccctggagaagatctgcgaggaggtgatcgtgcccgagagcaccaacgccagattcagactgtggctgaccagctaccccagcgagaagttccccgtgagcatcctgcagaacggcatcaagatgaccaacgagccccccaagggcctgagagccaacctgctgagaagctacctgaacgaccccatcagcgaccccgtgttcttccagagctgcgccaaggccgtgatgtggcagaagatgctgttcggcctgtgcttcttccacgccgtggtgcaggagagaagaaacttcggccccctgggctggaacatcccctacgagttcaacgagagcgacctgagaatcagcatgtggcagatccagatgttcctgaacgactacaaggaggtgcccttcgacgccctgacctacctgaccggcgagtgcaactacggcggcagagtgaccgacgacaaggacagaagactgctgctgagcctgctgagcatgttctactgcaaggagatcgaggaggactactacagcctggcccccggcgacacctactacatccccccccacggcagctaccagagctacatcgactacctgagaaacctgcccatcaccgcccaccccgaggtgttcggcctgcacgagaacgccgacatcaccaaggacaaccaggagaccaaccagctgttcgagggcgtgctgctgaccctgcccagacagagcggcggcagcggcaagagcccccaggaggtggtggaggagctggcccaggacatcctgagcaagctgcccagagacttcgacctggaggaggtgatgaagctgtaccccgtggtgtacgaggagagcatgaacaccgtgctgagacaggagctgatcagattcaacagactgaccaaggtggtgagaagaagcctgatcaacctgggcagagccatcaagggccaggtgctgatgagcagcgagctggaggaggtgttcaacagcatgctggtgggcaaggtgcccgccatgtgggccgccaagagctaccccagcctgaagcccctgggcggctacgtggccgacctgctggccagactgaccttcttccaggagtggatcgacaagggcccccccgtggtgttctggatcagcggcttctacttcacccagagcttcctgaccggcgtgagccagaactacgccagaaagtacaccatccccatcgaccacatcggcttcgagttcgaggtgaccccccaggagaccgtgatggagaacaaccccgaggacggcgcctacatcaagggcctgttcctggagggcgccagatgggacagaaagaccatgcagatcggcgagagcctgcccaagatcctgtacgaccccctgcccatcatctggctgaagcccggcgagagcgccatgttcctgcaccaggacatctacgtgtgccccgtgtacaagaccagcgccagaagaggcaccctgagcaccaccggccacagcaccaactacgtgctgagcatcgagctgcccaccgacatgccccagaagcactggatcaacagaggcgtggccagcctgtgccagctggacaactag

SEQ ID NO: 79844 - DNA, 2262 bp, synthetic construct
  misc_feature 1..2262: note = Description of Artificial Sequence: Synthetic coding sequence
  source 1..2262: mol_type = other DNA
atgggcgacatggactgcagcagccagaagatcgccaagagcgacagcatccaccacatgagccacagccagggccagcccgagctgccccccctgcccgccagcgccaacgaggagcccagcggcctgtaccagaccgtgatgagccacagcttctacccccccctgatgcagagaaccagctggaccctggccgcccccttcaaggagcagcaccaccacagaggccccagcgacagcatcgccaacaactacagcctgatggcccaggacctgaagctgaaggacctgctgaaggtgtaccagcccgccaccatcagcgtgcccagagacagaaccggccagggcctgcccagcagcggcaacagaagcagcagcgagcccatgagaaagaagaccaagttcagcagcagaaacaaggaggacagcaccagaatcaagctggccttcaagaccagcatcttcagccccatgaagaaggaggtgaagaccagcctgaccttccccggcagcagacccatgagccccgagcagcagctggacgtgatgctgcagcaggagatggagatggagagcaaggagaagaagcccagcgagagcgacctggagagatactactactacctgaccaacggcatcagaaaggacatgatcgcccccgaggagggcgaggtgatggtgagaatcagcaagctgatcagcaacaccctgctgaccagccccttcctggagcccctgatggtggtgctggtgcaggagaaggagaacgactactactgcagcctgatgaagagcatcgtggactacatcctgatggaccccatggagagaaagagactgttcatcgagagcatccccagactgttcccccagagagtgatcagagcccccgtgccctggcacagcgtgtacagaagcgccaagaagtggaacgaggagcacctgcacaccgtgaaccccatgatgctgagactgaaggagctgtggttcgccgagttcagagacctgagattcgtgagaaccgccgagatcctggccggcaagctgcccctgcagccccaggagttctgggacgtgatccagaagcactgcctggaggcccaccagaccctgctgaacaagtggatccccacctgcgcccagctgttcaccagcagaaaggagcactggatccacttcgcccccaagagcaactacgacagcagcagaaacatcgaggagtacttcgccagcgtggccagcttcatgagcctgcagctgagagagctggtgatcaagagcctggaggacctggtgagcctgttcatgatccacaaggacggcaacgacttcaaggagccctaccaggagatgaagttcttcatcccccagctgatcatgatcaagctggaggtgagcgagcccatcatcgtgttcaaccccagcttcgacggctgctgggagctgatcagagacagcttcctggagatcatcaagaacagcaacggcatccccaaggtggagagcgtgctgttccccgagctgaagggctacaacctgctgctgggcaccgtgaacgccgaggagaagctggtgagcgacttcctgatccagaccttcaaggtgttccagaagaaccaggtgggcccctgcaagtacctgaacgtgtacaagaagtacgtggacctgctggacaacaccgccgagcagaacatcgccgccttcctgaaggagaaccacgacatcgacgacttcgtgaccaagatcaacgccatcaagaagagaagaaacgagatcgccagcatgaacatcaccgtgcccctggccatgttctgcctggacgccaccgccctgaaccacgacctgtgcgagagagcccagaacctgaaggaccacctgatccagttccaggtggacgtgaacagagacaccaacaccagcatctgcaaccagtacagccacatcgccgacaaggtgagcgaggtgcccgccaacaccaaggagctggtgagcctgatcgagttcctgaagaagagcagcgccgtgaccgtgttcaagctgagaagacagctgagagacgccagcgagagactggagttcctgatggactacgccgacctgccctacgaggacatcaagctgaacagcaccctgttcctgtggcccgaccagatcgaggacatcttcgacaacagcagaaacctgctgctgcacaagagagaccaggccgagatggacctgatcaagagatacagagagagcctgggcctgagctggaagtag

SEQ ID NO: 79845 - DNA, 5664 bp, synthetic construct
  misc_feature 1..5664: note = Description of Artificial Sequence: Synthetic coding sequence
  source 1..5664: mol_type = other DNA
atgggcgccaccggcagactggagctgaccctggccgcccccccccaccccggccccgccttccagagaagcaaggccagagagacccagggcgaggaggagggcagcgagatgcagatcgccaagagcgacagcatccaccacatgagccacagccagggccagcccgagctgccccccctgcccgccagcgccaacgaggagcccagcggcctgtaccagaccgtgatgagccacagcttctacccccccctgatgcagagaaccagctggaccctggccgcccccttcaaggagcagcaccaccacagaggccccagcgacagcatcgccaacaactacagcctgatggcccaggacctgaagctgaaggacctgctgaaggtgtaccagcccgccaccatcagcgtgcccagagacagaaccggccagggcctgcccagcagcggcaacagaagcagcagcgagcccatgagaaagaagaccaagttcagcagcagaaacaaggaggacagcaccagaatcaagctggccttcaagaccagcatcttcagccccatgaagaaggaggtgaagaccagcctgaccttccccggcagcagacccatgagccccgagcagcagctggacgtgatgctgcagcaggagatggagatggagagcaaggagaagaagcccagcgagagcgacctggagagatactactactacctgaccaacggcatcagaaaggacatgatcgcccccgaggagggcgaggtgatggtgagaatcagcaagctgatcagcaacaccctgctgaccagccccttcctggagcccctgatggtggtgctggtgcaggagaaggagaacgactactactgcagcctgatgaagagcatcgtggactacatcctgatggaccccatggagagaaagagactgttcatcgagagcatccccagactgttcccccagagagtgatcagagcccccgtgccctggcacagcgtgtacagaagcgccaagaagtggaacgaggagcacctgcacaccgtgaaccccatgatgctgagactgaaggagctgtggttcgccgagttcagagacctgagattcgtgagaaccgccgagatcctggccggcaagctgcccctgcagccccaggagttctgggacgtgatccagaagcactgcctggaggcccaccagaccctgctgaacaagtggatccccacctgcgcccagctgttcaccagcagaaaggagcactggatccacttcgcccccaagagcaactacgacagcagcagaaacatcgaggagtacttcgccagcgtggccagcttcatgagcctgcagctgagagagctggtgatcaagagcctggaggacctggtgagcctgttcatgatccacaaggacggcaacgacttcaaggagccctaccaggagatgaagttcttcatcccccagctgatcatgatcaagctggaggtgagcgagcccatcatcgtgttcaaccccagcttcgacggctgctgggagctgatcagagacagcttcctggagatcatcaagaacagcaacggcatccccaagctgaagtacatccccctgaagttcagcttcaccgccgccgccgccgacagacagtgcgtgaaggccgccgagcccggcgagcccagcatgcacgccgccgccaccgccatggccgagctgaagggctacaacctgctgctgggcaccgtgaacgccgaggagaagctggtgagcgacttcctgatccagaccttcaaggtgttccagaagaaccaggtgggcccctgcaagtacctgaacgtgtacaagaagtacgtggacctgctggacaacaccgccgagcagaacatcgccgccttcctgaaggagaaccacgacatcgacgacttcgtgaccaagatcaacgccatcaagaagagaagaaacgagatcgccagcatgaacatcaccgtgcccctggccatgttctgcctggacgccaccgccctgaaccacgacctgtgcgagagagcccagaacctgaaggaccacctgatccagttccaggtggacgtgaacagagacaccaacaccagcatctgcaaccagtacagccacatcgccgacaaggtgagcgaggtgcccgccaacaccaaggagctggtgagcctgatcgagttcctgaagaagagcagcgccgtgaccgtgttcaagctgagaagacagctgagagacgccagcgagagactggagttcctgatggactacgccgacctgccctaccagatcgaggacatcttcgacaacagcagaaacctgctgctgcacaagagagaccaggccgagatggacctgatcaagagatgcagcgagttcgagctgagactggagggctaccacagagagctggagagcttcagaaagagagaggtgatgaccaccgaggagatgaagcacaacgtggagaagctgaacgagctgagcaagaacctgaacagagccttcgccgagttcgagctgatcaacaaggaggaggagctgctggagaaggagaagagcacctaccccctgctgcaggccatgctgaagaacaaggtgccctacgagcagctgtggagcaccgcctacgagttcagcatcaagagcgaggagtggatgaacggccccctgttcctgctgaacgccgagcagatcgccgaggagatcggcaacatgtggagaaccacctacaagctgatcaagaccctgagcgacgtgcccgcccccagaagactggccgagaacgtgaagatcaagatcgacaagttcaagcagtacatccccatcctgagcatcagctgcaaccccggcatgaaggacagacactggcagcagatcagcgagatcgtgggctacgagatcaagcccaccgagaccacctgcctgagcaacatgctggagttcggcttcggcaagttcgtggagaagctggagcccatcggcgccgccgccagcaaggagtacagcctggagaagaacctggacagaatgaagctggactgggtgaacgtgaccttcagcttcgtgaagtacagagacaccgacaccaacatcctgtgcgccatcgacgacatccagatgctgctggacgaccacgtgatcaagacccagaccatgtgcggcagccccttcatcaagcccatcgaggccgagtgcagaaagtgggaggagaagctgatcagaatccaggacaacctggacgcctggctgaagtgccaggccacctggctgtacctggagcccatcttcagcagcgaggacatcatcgcccagatgcccgaggagggcagaaagttcggcatcgtggacagctactggaagagcctgatgagccaggccgtgaaggacaacagaatcctggtggccgccgaccagcccagaatggccgagaagctgcaggaggccaacttcctgctggaggacatccagaagggcctgaacgactacctggagaagaagagactgttcttccccagattcttcttcctgagcaacgacgagctgctggagatcctgagcgagaccaaggaccccctgagagtgcagccccacctgaagaagtgcttcgagggcatcgccaagctggagttcaccgacaacctggagatcgtgggcatgatcagcagcgagaaggagaccgtgcccttcatccagaagatctaccccgccaacgccaagggcatggtggagaagtggctgcagcaggtggagcagatgatgctggccagcatgagagaggtgatcggcctgggcatcgaggcctacgtgaaggtgcccagaaaccactgggtgctgcagtggcccggccaggtggtgatctgcgtgagcagcatcttctggacccaggaggtgagccaggccctggccgagaacaccctgctggacttcctgaagaagagcaacgaccagatcgcccagatcgtgcagctggtgagaggcaagctgagcagcggcgccagactgaccctgggcgccctgaccgtgatcgacgtgcacgccagagacgtggtggccaagctgagcgaggacagagtgagcgacctgaacgacttccagtggatcagccagctgagatactactgggtggccaaggacgtgcaggtgcagatcatcaccaccgaggccctgtacggctacgagtacctgggcaacagccccagactggtgatcacccccctgaccgacagatgctacagaaccctgatgggcgccctgaagctgaacctgggcggcgcccccgagggccccgccggcaccggcaagaccgagaccaccaaggacctggccaaggccctggccaagcagtgcgtggtgttcaactgcagcgacggcctggactacaaggccatgggcaagttcttcaagggcctggcccaggccggcgcctgggcctgcttcgacgagttcaacagaatcgaggtggaggtgctgagcgtggtggcccagcagatcctgagcatccagcaggccatcatcagaaagctgaagaccttcatcttcgagggcaccgagctgagcctgaaccccacctgcgccgtgttcatcaccatgaaccccggctacgccggcagagccgagctgcccgacaacctgaaggccctgttcagaaccgtggccatgatggtgcccgactacgccctgatcggcgagatcagcctgtacagcatgggcttcctggacagcagaagcctggcccagaagatcgtggccacctacagactgtgcagcgagcagctgagcagccagcaccactacgactacggcatgagagccgtgaagagcgtgctgaccgccgccggcaacctgaagctgaagtaccccgaggagaacgagagcgtgctgctgctgagagccctgctggacgtgaacctggccaagttcctggcccaggacgtgcccctgttccagggcatcatcagcgacctgttccccggcgtggtgctgcccaagcccgactacgaggtgttcctgaaggtgctgaacgacaacatcaagaagatgaagctgcagcccgtgccctggttcatcggcaagatcatccagatctacgagatgatgctggtgagacacggctacatgatcgtgggcgaccccatgggcggcaagaccagcgcctacaaggtgctggccgccgccctgggcgacctgcacgccgccaaccagatggaggagttcgccgtggagtacaagatcatcaaccccaaggccatcaccatgggccagctgtacggctgcttcgaccaggtgagccacgagtggatggacggcgtgctggccaacgccttcagagagcaggccagcagcctgagcgacgacagaaagtggatcatcttcgacggccccgtggacgccatctggatcgagaacatgaacaccgtgctggacgacaacaagaagctgtgcctgatgagcggcgagatcatccagatgaacagcaagatgagcctgatcttcgagcccgccgacctggagcaggccagccccgccaccgtgagcagatgcggcatgatctacatggagccccaccagctgggctggaagcccctgaaggacagctacatggacaccctgcccagcagcctgaccaaggagcacaaggagctgatgaagagcggccagtag

SEQ ID NO: 79846 - DNA, 462 bp, synthetic construct
  misc_feature 1..462: note = Description of Artificial Sequence: Synthetic coding sequence
  source 1..462: mol_type = other DNA
atgctgcacatgggcctggcccacgtgaagagaatgcccagaagcagcagactgcagtgcaaggaggcccaggccttcttcagcctgcagagcggcacctacagagtgctgagcacccccctgaagctgggcgtgtgggaggagaagaagcactgggccgccctgctgcagcccgtgagcctgggcagaaagtggaagaagagaccctgcaacctggacgactacgtgtggggccagctgaagtacatccccctgaagttcagcttcaccgccgccgccgccgacagacagtgcgtgaaggccgccgagcccggcgagcccagcatgcacgccgccgccaccgccatggccggcaccagagccggcaccaccttcgacgagctgcagtgccaggaggacatggtgtgcaccagattcgagaacaaggcctacgtgaacaccaacgacttcaccagacagtag

SEQ ID NO: 79847 - DNA, 13875 bp, synthetic construct
  misc_feature 1..13875: note = Description of Artificial Sequence: Synthetic coding sequence
  source 1..13875: mol_type = other DNA
atgttcagaatcggcagaagacagctgtggaagcacagcgtgaccagagtgctgacccagagactgaagggcgagaaggaggccaagagagccctgctggacgccagacacaactacctgttcgccatcgtggccagctgcctggacctgaacaagaccgaggtggaggacgccatcctggagggcaaccagatcgagagaatcgaccagctgttcgccgtgggcggcctgagacacctgatgttctactaccaggacgtggaggaggccgagaccggccagctgggcagcctgggcggcgtgaacctggtgagcggcaagatcaagaagcccaaggtgttcgtgaccgagggcaacgacgtggccctgaccggcgtgtgcgtgttcttcatcagaaccgaccccagcaaggccatcacccccgacaacatccaccaggaggtgagcttcaacatgctggacgccgccgacggcggcctgctgaacagcgtgagaagactgctgagcgacatcttcatccccgccctgagagccaccagccacggctggggcgagctggagggcctgcaggacgccgccaacatcagacaggagttcctgagcagcctggagggcttcgtgaacgtgctgagcggcgcccaggagagcctgaaggagaaggtgaacctgagaaagtgcgacatcctggagctgaagaccctgaaggagcccaccgactacctgaccctggccaacaaccccgagaccctgggcaagatcgaggactgcatgaaggtgtggatcaagcagaccgagcaggtgctggccgagaacaaccagctgctgaaggaggccgacgacgtgggccccagagccgagctggagcactggaagaagagactgagcaagttcaactacctgctggagcagctgaagagccccgacgtgaaggccgtgctggccgtgctggccgccgccaagagcaagctgctgaagacctggagagagatggacatcagaatcaccgacgccaccaacgaggccaaggacaacgtgaagtacctgtacaccctggagaagtgctgcgaccccctgtacagcagcgaccccctgagcatgatggacgccatccccaccctgatcaacgccatcaagatgatctacagcatcagccactactacaacaccagcgagaagatcaccagcctgttcgtgaaggtgaccaaccagatcatcagcgcctgcaaggcctacatcaccaacaacggcaccgccagcatctggaaccagccccaggacgtggtggaggagaagatcctgagcgccatcaagctgaagcaggagtaccagctgtgcttccacaagaccaagcagaagctgaagcagaaccccaacgccaagcagttcgacttcagcgagatgtacatcttcggcaagttcgagaccttccacagaagactggccaagatcatcgacatcttcaccaccctgaagacctacagcgtgctgcaggacagcaccatcgagggcctggaggacatggccaccaagtaccagggcatcgtggccaccatcaagaagaaggagtacaacttcctggaccagagaaagatggacttcgaccaggactacgaggagttctgcaagcagaccaacgacctgcacaacgagctgagaaagttcatggacgtgaccttcgccaagatccagaacaccaaccaggccctgagaatgctgaagaagttcgagagactgaacatccccaacctgggcatcgacgacaagtaccagctgatcctggagaactacggcgccgacatcgacatgatcagcaagctgtacaccaagcagaagtacgacccccccctggccagaaaccagccccccatcgccggcaagatcctgtgggccagacagctgttccacagaatccagcagcccatgcagctgttccagcagcaccccgccgtgctgagcaccgccgaggccaagcccatcatcagaagctacaacagaatggccaaggtgctgctggagttcgaggtgctgttccacagagcctggctgagacagatcgaggagatccacgtgggcctggaggccagcctgctggtgaaggcccccggcaccggcgagctgttcgtgaacttcgacccccagatcctgatcctgttcagagagaccgagtgcatggcccagatgggcctggaggtgagccccctggccaccagcctgttccagaagagagacagatacaagagaaacttcagcaacatgaagatgatgctggccgagtaccagagagtgaagagcaagatccccgccgccatcgagcagctgatcgtgccccacctggccaaggtggacgaggccctgcagcccggcctggccgccctgacctggaccagcctgaacatcgaggcctacctggagaacaccttcgccaagatcaaggacctggagctgctgctggacagagtgaacgacctgatcgagttcagaatcgacgccatcctggaggagatgagcagcacccccctgtgccagctgccccaggaggagcccctgacctgcgaggagttcctgcagatgaccaaggacctgtgcgtgaacggcgcccagatcctgcacttcaagagcagcctggtggaggaggccgtgaacgagctggtgaacatgctgctggacgtggaggtgctgagcgaggaggagagcgagaagatcagcaacgagaacagcgtgaactacaagaacgagagcagcgccaagagagaggagggcaacttcgacaccctgaccagcagcatcaacgccagagccaacgccctgctgctgaccaccgtgaccagaaagaagaaggagaccgagatgctgggcgaggaggccagagagctgctgagccacttcaaccaccagaacatggacgccctgctgaaggtgaccagaaacaccctggaggccatcagaaagagaatccacagcagccacaccatcaacttcagagacagcaacagcgccagcaacatgaagcagaacagcctgcccatcttcagagccagcgtgaccctggccatccccaacatcgtgatggcccccgccctggaggacgtgcagcagaccctgaacaaggccgtggagtgcatcatcagcgtgcccaagggcgtgagacagtggagcagcgagctgctgagcaagaagaagatccaggagagaaagatggccgccctgcagagcaacgaggacagcgacagcgacgtggagatgggcgagaacgagctgcaggacaccctggagatcgccagcgtgaacctgcccatccccgtgcagaccaagaactactacaagaacgtgagcgagaacaaggagatcgtgaagctggtgagcgtgctgagcaccatcatcaacagcaccaagaaggaggtgatcaccagcatggactgcttcaagagatacaaccacatctggcagaagggcaaggaggaggccatcaagaccttcatcacccagagccccctgctgagcgagttcgagagccagatcctgtacttccagaacctggagcaggagatcaacgccgagcccgagtacgtgtgcgtgggcagcatcgccctgtacaccgccgacctgaagttcgccctgaccgccgagaccaaggcctggatggtggtgatcggcagacactgcaacaagaagtacagaagcgagatggagaacatcttcatgctgatcgaggagttcaacaagaagctgaacagacccatcaaggacctggacgacatcagaatcgccatggccgccctgaaggagatcagagaggagcagatcagcatcgacttccaggtgggccccatcgaggagagctacgccctgctgaacagatacggcctgctgatcgccagagaggagatcgacaaggtggacaccctgcactacgcctgggagaagctgctggccagagccggcgaggtgcagaacaagctggtgagcctgcagcccagcttcaagaaggagctgatcagcgccgtggaggtgttcctgcaggactgccaccagttctacctggactacgacctgaacggccccatggccagcggcctgaagccccaggaggccagcgacagactgatcatgttccagaaccagttcgacaacatctacagaaagtacatcacctacaccggcggcgaggagctgttcggcctgcccgccacccagtacccccagctgctggagatcaagaagcagctgaacctgctgcagaagatctacaccctgtacaacagcgtgatcgagaccgtgaacagctactacgacatcctgtggagcgaggtgaacatcgagaagatcaacaacgagctgctggagttccagaacagatgcagaaagctgcccagagccctgaaggactggcaggccttcctggacctgaagaagatcatcgacgacttcagcgagtgctgccccctgctggagtacatggccagcaaggccatgatggagagacactgggagagaatcaccaccctgaccggccacagcctggacgtgggcaacgagagcttcaagctgagaaacatcatggaggcccccctgctgaagtacaaggaggagatcgaggacatctgcatcagcgccgtgaaggagagagacatcgagcagaagctgaagcaggtgatcaacgagtgggacaacaagaccttcaccttcggcagcttcaagaccagaggcgagctgctgctgagaggcgacagcaccagcgagatcatcgccaacatggaggacagcctgatgctgctgggcagcctgctgagcaacagatacaacatgcccttcaaggcccagatccagaagtgggtgcagtacctgagcaacagcaccgacatcatcgagagctggatgaccgtgcagaacctgtggatctacctggaggccgtgttcgtgggcggcgacatcgccaagcagctgcccaaggaggccaagagattcagcaacatcgacaagagctgggtgaagatcatgaccagagcccacgaggtgcccagcgtggtgcagtgctgcgtgggcgacgagaccctgggccagctgctgccccacctgctggaccagctggagatctgccagaagagcctgaccggctacctggagaagaagagactgtgcttccccagattcttcttcgtgagcgaccccgccctgctggagatcctgggccaggccagcgacagccacaccatccaggcccacctgctgaacgtgttcgacaacatcaagagcgtgaagttccacgagaagatctacgacagaatcctgagcatcagcagccaggagggcgagaccatcgagctggacaagcccgtgatggccgagggcaacgtggaggtgtggctgaacagcctgctggaggagagccagagcagcctgcacctggtgatcagacaggccgccgccaacatccaggagaccggcttccagctgaccgagttcctgagcagcttccccgcccaggtgggcctgctgggcatccagatgatctggaccagagacagcgaggaggccctgagaaacgccaagttcgacaagaagatcatgcagaagaccaaccaggccttcctggagctgctgaacaccctgatcgacgtgaccaccagagacctgagcagcaccgagagagtgaagtacgagaccctgatcaccatccacgtgcaccagagagacatcttcgacgacctgtgccacatgcacatcaagagccccatggacttcgagtggctgaagcagtgcagattctacttcaacgaggacagcgacaagatgatgatccacatcaccgacgtggccttcatctaccagaacgagttcctgggctgcaccgacagactggtgatcacccccctgaccgacagatgctacatcaccctggcccaggccctgggcatgagcatgggcggcgcccccgccggccccgccggcaccggcaagaccgagaccaccaaggacatgggcagatgcctgggcaagtacgtggtggtgttcaactgcagcgaccagatggacttcagaggcctgggcagaatcttcaagggcctggcccagagcggcagctggggctgcttcgacgagttcaacagaatcgacctgcccgtgctgagcgtggccgcccagcagatcagcatcatcctgacctgcaagaaggagcacaagaagagcttcatcttcaccgacggcgacaacgtgaccatgaaccccgagttcggcctgttcctgaccatgaaccccggctacgccggcagacaggagctgcccgagaacctgaagatcaacttcagaagcgtggccatgatggtgcccgacagacagatcatcatcagagtgaagctggccagctgcggcttcatcgacaacgtggtgctggccagaaagttcttcaccctgtacaagctgtgcgaggagcagctgagcaagcaggtgcactacgacttcggcctgagaaacatcctgagcgtgctgagaaccctgggcgccgccaagagagccaaccccatggacaccgagagcaccatcgtgatgagagtgctgagagacatgaacctgagcaagctgatcgacgaggacgagcccctgttcctgagcctgatcgaggacctgttccccaacatcctgctggacaaggccggctaccccgagctggaggccgccatcagcagacaggtggaggaggccggcctgatcaaccaccccccctggaagctgaaggtgatccagctgttcgagacccagagagtgagacacggcatgatgaccctgggccccagcggcgccggcaagaccacctgcatccacaccctgatgagagccatgaccgactgcggcaagccccacagagagatgagaatgaaccccaaggccatcaccgccccccagatgttcggcagactggacgtggccaccaacgactggaccgacggcatcttcagcaccctgtggagaaagaccctgagagccaagaagggcgagcacatctggatcatcctggacggccccgtggacgccatctggatcgagaacctgaacagcgtgctggacgacaacaagaccctgaccctggccaacggcgacagaatccccatggcccccaactgcaagatcatcttcgagccccacaacatcgacaacgccagccccgccaccgtgagcagaaacggcatggtgttcatgagcagcagcatcctggactggagccccatcctggagggcttcctgaagaagagaagcccccaggaggccgagatcctgagacagctgtacaccgagagcttccccgacctgtacagattctgcatccagaacctggagtacaagatggaggtgctggaggccttcgtgatcacccagagcatcaacatgctgcagggcctgatccccctgaaggagcagggcggcgaggtgagccaggcccacctgggcagactgttcgtgttcgccctgctgtggagcgccggcgccgccctggagctggacggcagaagaagactggagctgtggctgagaagcagacccaccggcaccctggagctgcccccccccgccggccccggcgacaccgccttcgactactacgtggcccccgacggcacctggacccactggaacaccagaacccaggagtacctgtaccccagcgacaccacccccgagtacggcagcatcctggtgcccaacgtggacaacgtgagaaccgacttcctgatccagaccatcgccaagcagggcaaggccgtgctgctgatcggcgagcagggcaccgccaagaccgtgatcatcaagggcttcatgagcaagtacgaccccgagtgccacatgatcaagagcctgaacttcagcagcgccaccacccccctgatgttccagagaaccatcgagagctacgtggacaagagaatgggcaccacctacggcccccccgccggcaagaagatgaccgtgttcatcgacgacgtgaacatgcccatcatcaacgagtggggcgaccaggtgaccaacgagatcgtgagacagctgatggagcagaacggcttctacaacctggagaagcccggcgagttcaccagcatcgtggacatccagttcctggccgccatgatccaccccggcggcggcagaaacgacatcccccagagactgaagagacagttcagcatcttcaactgcaccctgcccagcgaggccagcgtggacaagatcttcggcgtgatcggcgtgggccactactgcacccagagaggcttcagcgaggaggtgagagacagcgtgaccaagctggtgcccctgaccagaagactgtggcagatgaccaagatcaagatgctgcccacccccgccaagttccactacgtgttcaacctgagagacctgagcagagtgtggcagggcatgctgaacaccaccagcgaggtgatcaaggagcccaacgacctgctgaagctgtggaagcacgagtgcaagagagtgatcgccgacagattcaccgtgagcagcgacgtgacctggttcgacaaggccctggtgagcctggtggaggaggagttcggcgaggagaagaagctgctggtggactgcggcatcgacacctacttcgtggacttcctgagagacgcccccgaggccgccggcgagaccagcgaggaggccgacgccgagacccccaagatctacgagcccatcgagagcttcagccacctgaaggagagactgaacatgttcctgcagctgtacaacgagagcatcagaggcgccggcatggacatggtgttcttcgccgacgccatggtgcacctggtgaagatcagcagagtgatcagaaccccccagggcaacgccctgctggtgggcgtgggcggcagcggcaagcagagcctgaccagactggccagcttcatcgccggctacgtgagcttccagatcaccctgaccagaagctacaacaccagcaacctgatggaggacctgaaggtgctgtacagaaccgccggccagcagggcaagggcatcaccttcatcttcaccgacaacgagatcaaggacgagagcttcctggagtacatgaacaacgtgctgagcagcggcgaggtgagcaacctgttcgccagagacgagatcgacgagatcaacagcgacctggccagcgtgatgaagaaggagttccccagatgcctgcccaccaacgagaacctgcacgactacttcatgagcagagtgagacagaacctgcacatcgtgctgtgcttcagccccgtgggcgagaagttcagaaacagagccctgaagttccccgccctgatcagcggctgcaccatcgactggttcagcagatggcccaaggacgccctggtggccgtgagcgagcacttcctgaccagctacgacatcgactgcagcctggagatcaagaaggaggtggtgcagtgcatgggcagcttccaggacggcgtggccgagaagtgcgtggactacttccagagattcagaagaagcacccacgtgacccccaagagctacctgagcttcatccagggctacaagttcatctacggcgagaagcacgtggaggtgagaaccctggccaacagaatgaacaccggcctggagaagctgaaggaggccagcgagagcgtggccgccctgagcaaggagctggaggccaaggagaaggagctgcaggtggccaacgacaaggccgacatggtgctgaaggaggtgaccatgaaggcccaggccgccgagaaggtgaaggccgaggtgcagaaggtgaaggacagagcccaggccatcgtggacagcatcagcaaggacaaggccatcgccgaggagaagctggaggccgccaagcccgccctggaggaggccgaggccgccctgcagaccatcagacccagcgacatcgccaccgtgagaaccctgggcagacccccccacctgatcatgagaatcatggactgcgtgctgctgctgttccagagaaaggtgagcgccgtgaagatcgacctggagaagagctgcaccatgcccagctggcaggagagcctgaagctgatgaccgccggcaacttcctgcagaacctgcagcagttccccaaggacaccatcaacgaggaggtgatcgagttcctgagcccctacttcgagatgcccgactacaacatcgagaccgccaagagagtgtgcggcaacgtggccggcctgtgcagctggaccaaggccatggccagcttcttcagcatcaacaaggaggtgctgcccctgaaggccaacctggtggtgcaggagaacagacacctgctggccatgcaggacctgcagaaggcccaggccgagctggacgacaagcaggccgagctggacgtggtgcaggccgagtacgagcaggccatgaccgagaagcagaccctgctggaggacgccgagagatgcagacacaagatgcagaccgccagcaccctgatcagcggcctggccggcgagaaggagagatggaccgagcagagccaggagttcgccgcccagaccaagagactggtgggcgacgtgctgctggccaccgccttcctgagctacagcggccccttcaaccaggagttcagagacctgctgctgaacgactggagaaaggagatgaaggccagaaagatccccttcggcaagaacctgaacctgagcgagatgctgatcgacgcccccaccatcagcgagtggaacctgcagggcctgcccaacgacgacctgagcatccagaacggcatcatcgtgaccaaggccagcagataccccctgctgatcgacccccagacccagggcaagatctggatcaagaacaaggagagcagaaacgagctgcagatcaccagcctgaaccacaagtacttcagaaaccacctggaggacagcctgagcctgggcagacccctgctgatcgaggacgtgggcgaggagctggaccccgccctggacaacgtgctggagagaaacttcatcaagaccggcagcaccttcaaggtgaaggtgggcgacaaggaggtggacgtgctggacggcttcagactgtacatcaccaccaagctgcccaaccccgcctacacccccgagatcagcgccagaaccagcatcatcgacttcaccgtgaccatgaagggcctggaggaccagctgctgggcagagtgatcctgaccgagaagcaggagctggagaaggagagaacccacctgatggaggacgtgaccgccaacaagagaagaatgaaggagctggaggacaacctgctgtacagactgaccagcacccagggcagcctggtggaggacgagagcctgatcgtggtgctgagcaacaccaagagaaccgccgaggaggtgacccagaagctggagatcagcgccgagaccgaggtgcagatcaacagcgccagagaggagtacagacccgtggccaccagaggcagcatcctgtacttcctgatcaccgagatgagactggtgaacgagatgtaccagaccagcctgagacagttcctgggcctgttcgacctgagcctggccagaagcgtgaagagccccatcaccagcaagagaatcgccaacatcatcgagcacatgacctacgaggtgtacaagtacgccgccagaggcctgtacgaggagcacaagttcctgttcaccctgctgctgaccctgaagatcgacatccagagaaacagagtgaagcacgaggagttcctgaccctgatcaagggcggcgccagcctggacctgaaggcctgcccccccaagcccagcaagtggatcctggacatcacctggctgaacctggtggagctgagcaagctgagacagttcagcgacgtgctggaccagatcagcagaaacgagaagatgtggaagatctggttcgacaaggagaaccccgaggaggagcccctgcccaacgcctacgacaagagcctggactgcttcagaagactgctgctgatcagaagctggtgccccgacagaaccatcgcccaggccagaaagtacatcgtggacagcatgggcgagaagtacgccgagggcgtgatcctggacctggagaagacctgggaggagagcgaccccagaacccccctgatctgcctgctgagcatgggcagcgaccccaccgacagcatcatcgccctgggcaagagactgaagatcgagaccagatacgtgagcatgggccagggccaggaggtgcacgccagaaagctgctgcagcagaccatggccaacggcggctgggccctgctgcagaactgccacctgggcctggacttcatggacgagctgatggacatcatcatcgagaccgagctggtgcacgacgccttcagactgtggatgaccaccgaggcccacaagcagttccccatcaccctgctgcagatgagcatcaagttcgccaacgaccccccccagggcctgagagccggcctgaagagaacctacagcggcgtgagccaggacctgctggacgtgagcagcggcagccagtggaagcccatgctgtacgccgtggccttcctgcacagcaccgtgcaggagagaagaaagttcggcgccctgggctggaacatcccctacgagttcaaccaggccgacttcaacgccaccgtgcagttcatccagaaccacctggacgacatggacgtgaagaagggcgtgagctggaccaccatcagatacatgatcggcgagatccagtacggcggcagagtgaccgacgactacgacaagagactgctgaacaccttcgccaaggtgtggttcagcgagaacatgttcggccccgacttcagcttctaccagggctacaacatccccaagtgcagcaccgtggacaactacctgcagtacatccagagcctgcccgcctacgacagccccgaggtgttcggcctgcaccccaacgccgacatcacctaccagagcaagctggccaaggacgtgctggacaccatcctgggcatccagcccaaggacaccagcggcggcggcgacgagaccagagaggccgtggtggccagactggccgacgacatgctggagaagctgccccccgactacgtgcccttcgaggtgaaggagagactgcagaagatgggccccttccagcccatgaacatcttcctgagacaggagatcgacagaatgcagagagtgctgagcctggtgagaagcaccctgaccgagctgaagctggccatcgacggcaccatcatcatgagcgagaacctgagagacgccctggactgcatgttcgacgccagaatccccgcctggtggaagaaggccagctggatcagcagcaccctgggcttctggttcaccgagctgatcgagagaaacagccagttcaccagctgggtgttcaacggcagaccccactgcttctggatgaccggcttcttcaacccccagggcttcctgaccgccatgagacaggagatcaccagagccaacaagggctgggccctggacaacatggtgctgtgcaacgaggtgaccaagtggatgaaggacgacatcagcgccccccccaccgagggcgtgtacgtgtacggcctgtacctggagggcgccggctgggacaagagaaacatgaagctgatcgagagcaagcccaaggtgctgttcgagctgatgcccgtgatcagaatctacgccgagaacaacaccctgagagaccccagattctacagctgccccatctacaagaagcccgtgagaaccgacctgaactacatcgccgccgtggacctgagaaccgcccagacccccgagcactgggtgctgagaggcgtggccctgctgtgcgacgtgaagtag

SEQ ID NO: 79848 - DNA, 12477 bp, synthetic construct
  misc_feature 1..12477: note = Description of Artificial Sequence: Synthetic coding sequence
  source 1..12477: mol_type = other DNA
atgaccttcagagccaccgacagcgagttcgacctgaccaacatcgaggagtacgccgagaacagcgccctgagcagactgaacaacatcaaggccaagcagagagtgagctacgtgaccagcaccgagaacgagagcgacacccagatcctgaccttcagacacatcaccaaggcccaggagaagaccagaaagagacagcagcccatcaagctggagcccctgcccgtgctgaaggtgtaccaggaccacaagcagcccgagtacatccacgagcagaacagattccagctgatgaccgccggcatcatcaagagacccgtgagcatcgccaagaagagcttcgccaccagcagcacccagttcctggagcaccaggacgccgtgaagaagatgcagatccacagaccctacgtggaggtgttcagccccagcccccccaagctgccccacaccggcatcggcaagagaggcctgttcggcaccagaagcagcgcctaccccaagtacaccttccacgacagagaggaggtggtgaaggccaacatcagagaccccctgcagatcatcaagatcatcagagagaacgagcacctgggcttcctgtacatgatccccgccgtgcccagaagcagcatcgagtacgacacctacaacctgaaggtggtgagctacgagaacatcaacaagaacgactactacaccatcagccagagagccgtgacccacatctacaacgaggacatcgagttcatcgagatcgacagatgggagcaggagtacctgtaccacagagagctgaccaagatccccatcttcagcctgttcagaaagtggaaggccttcagcgtgtggagaaagaacgtgagaagcaagaagatcaccggctgccagaagagcctgcagaagaacctgttcatcgtgaacccccacctgagacccgccctgctgaagatcaacgagctgtgctaccacctgagcttcatgggcctgtgctacatcgagaagtgccacacctacaccctgcaggagttcaaggccgcccaggtgatcagactggccgaggtgaccgagagactgggcgagttcagaaacgaggccaagtacgtggtgagaagagcctgcagattcgccctgagagccgccggcttcgtgcccgacgactgcgccttcggccccttcgaggactaccacaaggtgcagagcagcggcagcttcatcaacaccccccacgagctgcccacctacggcgacagcgagaagatgacctacaccgagcaggccagcaagagacactactgcatgagactgacctgcttcatcagactgaacgactacctgatcgagaacaccatgcacatcctgaccgtgaacgccgtgaacagcctgctgaaccacctgaccgacaagctgaagagaacccccagcgccgacgtgatccagaagtggatcaccgaggagaagcccgaggtgcccgacaagaagggcaccctgatggtggagaagcaggaggaggacgagagcctgatccccatgttcctgaccgagctgatgctgaccgtgcagagcctgctgttcgagcccagcctggaggacttcctggacggcatcctgggcgccgtgaaccactgccagaacaccgtgctgagcgtgcccaacctggtgcccgacagctacttcgacgccttcaccagcccctacatcaacaacaagctggagggcaagacctgcggcaccggccccagcctggccgccgtgttcgaggacgacaagaacttccacaccatcatcagccagatcaaggagaccatccaggccgccttcgagagcgccagaatctacgccgccaccttcgagaagttccagatcttcttcaaggagaacgagagcctggacctgcaggccctgaagctgcaggagcccgacatcaacttcttcagcgagcagctggagaagtaccacaagcagcacaaggacgccgtggccctgagacccaccagaaacgtgggcctgctgctgatcgacaccagactgctgagagagaagctgatccccagccccctgagatgcctggaggtgctgaacttcatgctgcccagacagagcaagaagaaggtggacgccatcatcttcgaggcccaggacgccgagtacaagctggagttcgtgcccaccaccaccaccgagtacgtgcacagcctgctgttcctggacgagatccaggagagaatcgagagcctggaggacgagggcaacatcgtgacccagatgtacaagctgatggagcagtaccaggtgcccaccccccccgaggacttcgccgtgttcgccaccatgaagcccagcatcgtggccgtgagaaacgccatcgacaagagcgtgggcgacagagagagcagcatcaagcagttctgcgtgcacctgggcagcgacctggaggagctgaacaacgaggtgaacgaggtgaagctgcaggcccaggacccccagatcctggacatcagcgccgaccaggacaagatcagactgatcctgaacaacctgcagagcgtgctggccgacctgcagaagagagccttccagtacaagagctaccagaagaacttcaaggtggaggtgagcaagttcgaggccctggaggaggtgagcgccgagctgaagctgaagcagctgctgtgggacagcttcagcgagtgggacaagctgcagcaggagtggctgaagagcaagttcgactgcctggaccccgaggtgctgaacggccaggtgagcaagtacgccaagttcgtgacccagctggagaagggcctgccccccaacagcgtggtgccccagctgaagtacaaggtggagaagatgaaggagaagctgcccgtgatcatcgacctgagaaaccccaccctgaaggccagacactgggccgccatcgagcagaccgtggacgccaccctggtggacgccgagatccccctgaccctggagagactgagccagctgcacgtgttcgacttcggccaggagatccaggacatcagcggccaggccagcggcgaggccgccctggaggccatcctgaagaaggtggaggacagctggaagaccaccgagttcgtgatcctgccccacagagacagcaaggacgtgttcatcctgggcggcaccgacgacatccaggtgctgctggacgacagcaccatcaacgtggccaccctggccagcagcagatacctgggccccctgaagaccagagtggacgagtggcagaagcagctggccctgttcaaccagaccctggaggagtggctgacctgccagagaaactggctgtacctggagagcatcttcaacgcccccgacatccagagacagctgcccgccgaggccaagatgttcctgcaggtggacaagagctggaaggagatcatgagaaaggtgaacagactgcccaacgccctgagagccgccacccagcccggcctgctggagaccttccagaacaacaacgccctgctggaccagatccagaagtgcctggaggcctacctggagagcaagagagtgatcttccccagattctacttcctgagcaacgacgagctgctggagatcctggcccagaccagaaacccccaggccgtgcagccccacctgagaaagtgcttcgacagcatcagcaagctggagttcgccctgatgccccccgccgagggcaagatccccggcatcgacggcgagcccgagaaggtgtacaccaacgacatcctggccatgctgagccccgagggcgagagagtgagcctgggcaagggcctgaaggccagaggcaacgtggaggagtggctgggcaaggtggaggaggccatgttcaccagcctgagaagactgtgcaaggccgccatcgccgactaccagggcaagctgagaaccgactgggtggtggccggccaccccagccaggtgatcctgaccgtgagccagatcatgtggtgcagagacctgaccgagtgcctggagaccgagcacagcaaccacatccaggccctgaagaacttcgagaaggtgaacttcgagagactgaacgccctggccgccatcgtgcagggcagcctgcccaagctgcacagaaacatcctgaccgccctgatcaccatcgacgtgcacgccagagacatcgtgaccgagctggtgcagagcaaggtggagaccgtggagagcttcgactggcagagacagctgagatactactgggacatcgacctggacaactgcgtggccagaatggccctgagccagtacacctacggctacgagtacctgggcgcctgccccagactggtgatcacccccctgaccgacagatgctacctgtgcctgatgggcgccctgcagctggacctgggcggcgcccccgccggccccgccggcaccggcaagaccgagaccaccaaggacctggccaaggccctggccatccagtgcgtggtgttcaactgcagcgacggcctggactacaagatgatgggcagattcttcagcggcctggcccagagcggcgcctggtgctgcttcgacgagttcaacagaatcgacatcgaggtgctgagcgtgatcgcccagcagctgatcaccatcagaaacgccaaggccgccaagctgagcagattcatgttcgagggcagagagatcaagctggtgatgacctgcgccgccttcatcaccatgaaccccggctacgccggcagaaccgagctgcccgacaacctgaaggccctgttcagacccttcgccatgatggtgcccaactacgccctgatcgccgaggtgatcctgtacagcgagggcttcgagagcagcaagatcctggccagaaagatgacccagatgtacaagctgtgcagcgagcagctgagccagcaggaccactacgacttcggcatgagagccgtgaagagcgtgctggtgatggccggcagcctgaagagagagaaccccgacctgaacgaggacgtggtgctgatcagagccctgcaggacagcaacctgcccaagttcctgaccgacgacgccctgctgttcagcggcatcatcagcgacctgttccccggcgtgcagatccccgagcacgactacggcatcctgcagagcaccatcgtggacgtgatgaacagacagaacctgcagcccgagatgtgcatggtgagaaaggtgatccagttctacgagaccatgctggtgagacacggcgtgatgctggtgggccccaccggcggcggcaagaccaccgtgtacagaatcctggccgagaccctgggcaacctgcagaagctgggcatcgagaacagcttctaccaggccgtgaagacctacgtgctgaaccccaagagcatcaccatgggcgagctgtacggcgaggtgaacaacctgaccctggagtggaaggacggcctgatggccctgagcgtgagagccgccgtgaacgacaccagcgaggaccacaagtggatcatcagcgacggccccgtggacgccctgtggatcgagaacatgaacaccgtgctggacgacaacaagatgctgtgcctggccaacagcgagagaatcaagctgaccccccagatccacatgctgttcgaggtgcaggacctgagagtggccagccccgccaccgtgagcagatgcggcatggtgttcgtggaccccgaggagctgaagtggatgccctacgtgaagacctggatgaagggcatcagcaagaagctgaccgaggagacccaggagtacatcctgaacctgttccagagatacgtggacgagggcctgcacttcatcaacaagaagtgcagccaggccatcccccaggtggacatcagcaaggtgaccaccctgtgctgcctgctggagagcctgatcctgggcaaggacggcgtgaacctggccatggagcagaccaagctgaacaccatcctgtgccagaccttcgtgttctgctacctgtggagcctgggcggcaacctgaccgagaactactacgacagcttcgacaccttcatcagaacccagttcgacgacaaccccgacgccagactgcccaacagcggcgacctgtggagcatccacatggacttcgacaccaagagactggacccctgggagagaatcatccccaccttcaagtacaacagagacgtgcccttcttcgagatgctggtgcccaccaccgacaccgtgagatacggctacctgatggagaagctgctggccgtgaagcacagcgtgctgttcaccggcatcaccggcgtgggcaagagcgtgatcgccaagggcctgctgaacaagatccaggagagcgccggctacgtgcccgtgtacctgaacttcagcgcccagaccagcagcgccagaacccaggagatcatcgagagcaagctggagagaaagagaaagaacatcctgggcgcccccggcaacaagagaatcgtgatcttcgtggacgacctgaacatgcccagactggacagatacggcagccagccccccatcgagctgctgagacagtaccaggacttcggcggcttctacgacagaaacaagctgttctggaaggagatccaggacgtgaccatcatcagcgcctgcgccccccccggcggcggcagaaaccccgtgacccccagattcatcagacacttcagcatgctgtgcctgcccatgcccagcgagcacagcctgaagcagatcttccaggccatcctgaacggcttcctgagcgacttcccccccgccgtgaagcagaccgccagcagcatcgtggaggccagcgtggagatctacaacaagatgagcgtggacctgctgcccacccccgccaagagccactacgtgttcaacctgagagacctgagcaagtgcgtgcagggcatcctgcagtgcgaccccggcaccatcagagaggagatccagatcttcagactgttctgccacgagtgccagagagtgttccacgacagactgatcaacaacgaggacaagcactacttccacgtgatcctgaccgagatggccaacaagcacttcggcatcgccatcgacctggagtacttcctgaacaagcccatcatcttcggcgacttcatcaagttcggcgccgacaaggccgacagaatctacgacgacatgcccgacatcgagaagaccgccaacgtgctgcaggactacctggacgactacaacctgaccaaccccaaggaggtgaagctggtgttcttccaggacgccatcgagcacgtgagcagaatcgccagaatgatcagacaggagagaggcaacgccctgctggtgggcgtgggcggcaccggcaagcagagcctgaccagactggccgcccacatctgcggctacaagtgcctgcagatcgagctgagcagaggctacaactacgacagcttccacgaggacctgagaaagctgtacaagatggccggcgtggaggacaagaacatggtgttcctgttcaccgacacccagatcgtggtggaggagttcctggaggacatcaacaacatcctgaacagcggcgaggtgcccaacctgttcgagaaggacgagctggagcaggtgctggccgccaccagacccagagccaaggaggtgggcatcagcgagggcaacagagacgaggtgttccagtacttcatcagcaaggtgagacagaagctgcacatcgtgctgtgcatgagccccgtgggcgaggccttcagaagcagatgcagaatgttccccagcctggtgaactgctgcaccatcgactggttcgtgcagtggcccagagaggccctgctgagcgtgagcaagaccttcttcagccaggtggacgccggcaacgaggagctgaaggagaagctgcccctgatgtgcgtgaacgtgcacctgagcgtgagcagcatggccgagagatactacaacgagctgagaagaagatactacaccacccccaccagctacctggagctgatcaacctgtacctgagcatgctgagcgagaagagaaagcagatcatcagcgccagagacagagtgaagaacggcctgaccaagctgctggagaccaacatcctggtggacaagatgaagctggacctgagcgccctggagcccgtgctgctggccaagagcgaggacgtggaggccctgatggagaagctggccgtggaccaggagagcgccgaccaggtgagaaacaccgtgcaggaggacgaggccaccgccaaggtgaaggccgaggagacccaggccatcgccgacgacgcccagagagacctggacgaggccctgcccgccctggacgccgccaacaaggccctggacagcctggacaaggccgacatcagcgagatcagagtgttcaccaagccccccgacctggtgatgaccgtgatggaggccatcagcatcctgctgaacgccaagcccgactggcccagcgccaagcagctgctgggcgacagcaacttcctgaagagactgctggagtacgacaaggagaacatcaagccccagatcctggccaagctgcagaagtacatcaacaaccccgacttcgtgcccgagaaggtggagaaggtgagcaaggcctgcaagagcatgtgcatgtgggtgagagccatggacctgtacagcagagtggtgaaggtggtggagcccaagagacagaagctgagagccgcccaggccgagctggacatcaccatggccaccctgagagagaagcaggccctgctgagacaggtggaggaccagatccaggccctgcaggacgagtacgacaagggcgtgaacgagaaggagagcctggccaagaccatggccctgaccaaggccagactggtgagagccggcaagctgaccgccgccctggaggacgagcaggtgagatgggaggagagcatccagaagttcgaggaggagatcagcaacatcaccggcaacgtgttcatcgccgccgcctgcgtggcctactacggcgccttcaccgcccagtacagacagagcctgatcgagtgctggatccaggactgccagagcctggagatccccatcgaccccagcttcagcctgatcaacatcctgggcgacccctacgagatcagacagtggaacaccgacggcctgcccagagacctgatcagcaccgagaacggcatcctggtgacccagggcagaagatggcccctgatgatcgacccccaggaccaggccaacagatggatcagaaacaaggagagcaagagcggcctgaagatcatcaagctgaccgacagcaacttcctgagaatcctggagaacagcatcagactgggcctgcccgtgctgctggaggagctgaaggagaccctggaccccgccctggagcccatcctgctgaagcagatcttcatcagcggcggcagactgctgatcagactgggcgacagcgacatcgactacgacaagaacttcagattctacatgaccaccaagatgcccaacccccactacctgcccgaggtgtgcatcaaggtgaccatcatcaacttcaccgtgaccaagagcggcctggaggaccagctgctgagcgacgtggtgagactggagaagcccagactggaggagcagagaatcaagctgatcgtgagaatcaacaccgacaagaaccagctgaagaccatcgaggagaagatcctgagaatgctgttcaccagcgagggcaacatcctggacaacgaggagctgatcgacaccctgcaggacagcaagatcaccagcggcgccatcaagaccagactggaggaggccgagagcaccgagcagatgatcaacgtggccagagagaagtacagacccgtggccacccagggcagcgtgatgtacttcgtgatcgccagcctgagcgagatcgaccccatgtaccagtacagcctgaagtacttcaagcagctgttcaacaccaccatcgagaccagcgtgaagaccgagaacctgcagcagagactggacgtgctgctggagcagaccctgctgaccgcctacgtgaacgtgagcagaggcctgttcgagcagcacaagctgatctacagcttcatgctgtgcgtggagatgatgagacagcagggcaccctgagcgacgccgagtggaacttcttcctgagaggcagcgccggcctggagaaggagagaccccccaagcccgaggccccctggctgcccaccgccacctggttcgcctgctgcgacctggaggagagcttccccgtgttccacggcctgacccagaacatcctgagccaccccatcagcatcagactgggcagcttcgagacctacatcaacccccagaagtgggagggctacagcaagatgaagcacgaggacaagcacatgagacaggagaaggaggccgcccaccaggacccctggagcgccggcctgagcagcttccacaagctgatcctgatcaagtgctgcaaggaggagaaggtggtgttcgccctgaccgacttcgtgatcgagaacctgggcaagcagttcatcgagaccccccccgtggacctgcccaccctgtaccaggacatgagctgcaacacccccctggtgttcatcctgagcaccggcagcgaccccatgggcgccttccagagattcgccagagagagcggctacagcgagagagtgcagagcatcagcctgggccagggccagggccccatcgccgagaagatggtgaaggacgccatgaagagcggcaactgggtgttcctgcagaactgccacctggccgtgagctggatgctggccatggaggagctgatcaagaccttcaccgaccccgacagcgccatcaaggacaccttcagactgttcctgagcagcatgcccagcaacaccttccccgtgaccgtgctgcagaacagcgtgaaggtgaccaacgagccccccaagggcctgagagccaacatcagaagagccttcaccgagatgacccccagcttcttcgaggagaacatcctgggcaagaagtggagacagatcatcttcggcatctgcttcttccacgccatcatccaggagagaaagaagttcggccccctgggctggaacatctgctacgagttcaacgacagcgacagagagtgcgccctgctgaacctgaagctgtactgcaaggagggcaagatcccctgggacgccctgatctacatcaccggcgagatcacctacggcggcagagtgaccgacagctgggaccagagatgcctgagaaccatcctgaagagattcttcagccccgagaccctggaggaggactacaagtacagcgagagcggcatctacttcgcccccatggccgacagcctgcaggagttcaaggactacatcgagaacctgcccctgatcgacgaccccgagatcttcggcatgcacgagaacgccaacctggtgttccagtacaaggagaccagcaccctgatcaacaccatcctggaggtgcagcccagaagcagcaccggcggcgagggcaagagcaacgacgagatcgtgcaggagctggtggccagcgtgcagaccagagtgcccgagaagctggagatggagggcgccagcgagagcctgttcgtgaaggacctgcagggcagactgaacagcctgaccaccgtgctgggccaggaggtggacagattcaacaacctgctgaagctgatccacaccagcctggagaccctgaacaaggccatcgccggcttcgtggtgatgagcgaggagatggagaaggtgtacaacagcttcctgaacaaccaggtgcccgccctgtggagcaacaccgcctaccccagcctgaagcccctgggcagctgggtgaaggacctgatcctgagaaccagcttcgtggacctgtggctgaagagaggccagcccaagagctactggatcagcggcttcttcttcccccagggcttcctgaccggcaccctgcagaaccacgccagaaagtacaacctgcccatcgacgagctgagcttcaagtacagcgtgatccccacctacagagaccaggccgccgtgatcgaggccgccaagaccgtgcagttcggccaggagctgcccatggacatggagctgcccagccccgaggacggcgtgctggtgcacggcatgttcatggacgccagcagatgggacgacaaggagatggtgatcgaggacgccctgcccggccagatgaaccccgtgctgcccgtggtgcacttcgagccccagcagaactacaagcccagccccaccctgtaccactgccccctgtacaagaccggcgccagagccggcaccctgagcaccaccggccacagcaccaacttcgtggtgaccgtgctgctgcccagcaagagaagcaaggactactggatcgccaagggcagcgccctgctgtgccagctgagcgagtag

SEQ ID NO: 79849 - DNA, 12477 bp, synthetic construct; identical to SEQ ID NO: 79848
  misc_feature 1..12477: note = Description of Artificial Sequence: Synthetic coding sequence
  source 1..12477: mol_type = other DNA

SEQ ID NO: 79850 - DNA, 7593 bp, synthetic construct
  misc_feature 1..7593: note = Description of Artificial Sequence: Synthetic coding sequence
  source 1..7593: mol_type = other DNA
atgaccttcagagccaccgacagcgagttcgacctgaccaacatcgaggagtacgccgagaacagcgccctgagcagactgaacaacatcaaggccaagcagagagtgagctacgtgaccagcaccgagaacgagagcgacacccagatcctgaccttcagacacatcaccaaggcccaggagaagaccagaaagagacagcagcccatcaagctggagcccctgcccgtgctgaaggtgtaccaggaccacaagcagcccgagtacatccacgagcagaacagattccagctgatgaccgccggcatcatcaagagacccgtgagcatcgccaagaagagcttcgccaccagcagcacccagttcctggagcaccaggacgccgtgaagaagatgcagatccacagaccctacgtggaggtgttcagccccagcccccccaagctgccccacaccggcatcggcaagagaggcctgttcggcaccagaagcagcgcctaccccaagtacaccttccacgacagagaggaggtggtgaaggccaacatcagagaccccctgcagatcatcaagatcatcagagagaacgagcacctgggcttcctgtacatgatccccgccgtgcccagaagcagcatcgagtacgacacctacaacctgaaggtggtgagctacgagaacatcaacaagaacgactactacaccatcagccagagagccgtgacccacatctacaacgaggacatcgagttcatcgagatcgacagatgggagcaggagtacctgtaccacagagagctgaccaagatccccatcttcagcctgttcagaaagtggaaggccttcagcgtgtggagaaagaacgtgagaagcaagaagatcaccggctgccagaagagcctgcagaagaacctgttcatcgtgaacccccacctgagacccgccctgctgaagatcaacgagctgtgctaccacctgagcttcatgggcctgtgctacatcgagaagtgccacacctacaccctgcaggagttcaaggccgcccaggtgatcagactggccgaggtgaccgagagactgggcgagttcagaaacgaggccaagtacgtggtgagaagagcctgcagattcgccctgagagccgccggcttcgtgcccgacgactgcgccttcggccccttcgaggactaccacaaggtgcagagcagcggcagcttcatcaacaccccccacgagctgcccacctacggcgacagcgagaagatgacctacaccgagcaggccagcaagagacactactgcatgagactgacctgcttcatcagactgaacgactacctgatcgagaacaccatgcacatcctgaccgtgaacgccgtgaacagcctgctgaaccacctgaccgacaagctgaagagaacccccagcgccgacgtgatccagaagtggatcaccgaggagaagcccgaggtgcccgacaagaagggcaccctgatggtggagaagcaggaggaggacgagagcctgatccccatgttcctgaccgagctgatgctgaccgtgcagagcctgctgttcgagcccagcctggaggacttcctggacggcatcctgggcgccgtgaaccactgccagaacaccgtgctgagcgtgcccaacctggtgcccgacagctacttcgacgccttcaccagcccctacatcaacaacaagctggagggcaagacctgcggcaccggccccagcctggccgccgtgttcgaggacgacaagaacttccacaccatcatcagccagatcaaggagaccatccaggccgccttcgagagcgccagaatctacgccgccaccttcgagaagttccagatcttcttcaaggagaacgagagcctggacctgcaggccctgaagctgcaggagcccgacatcaacttcttcagcgagcagctggagaagtaccacaagcagcacaaggacgccgtggccctgagacccaccagaaacgtgggcctgctgctgatcgacaccagactgctgagagagaagctgatccccagccccctgagatgcctggaggtgctgaacttcatgctgcccagacagagcaagaagaaggtggacgccatcatcttcgaggcccaggacgccgagtacaagctggagttcgtgcccaccaccaccaccgagtacgtgcacagcctgctgttcctggacgagatccaggagagaatcgagagcctggaggacgagggcaacatcgtgacccagatgtacaagctgatggagcagtaccaggtgcccaccccccccgaggacttcgccgtgttcgccaccatgaagcccagcatcgtggccgtgagaaacgccatcgacaagagcgtgggcgacagagagagcagcatcaagcagttctgcgtgcacctgggcagcgacctggaggagctgaacaacgaggtgaacgaggtgaagctgcaggcccaggacccccagatcctggacatcagcgccgaccaggacaagatcagactgatcctgaacaacctgcagagcgtgctggccgacctgcagaagagagccttccagtacaagagctaccagaagaacttcaaggtggaggtgagcaagttcgaggccctggaggaggtgagcgccgagctgaagctgaagcagctgctgtgggacagcttcagcgagtgggacaagctgcagcaggagtggctgaagagcaagttcgactgcctggaccccgaggtgctgaacggccaggtgagcaagtacgccaagttcgtgacccagctggagaagggcctgccccccaacagcgtggtgccccagctgaagtacaaggtggagaagatgaaggagaagctgcccgtgatcatcgacctgagaaaccccaccctgaaggccagacactgggccgccatcgagcagaccgtggacgccaccctggtggacgccgagatccccctgaccctggagagactgagccagctgcacgtgttcgacttcggccaggagatccaggacatcagcggccaggccagcggcgaggccgccctggaggccatcctgaagaaggtggaggacagctggaagaccaccgagttcgtgatcctgccccacagagacagcaaggacgtgttcatcctgggcggcaccgacgacatccaggtgctgctggacgacagcaccatcaacgtggccaccctggccagcagcagatacctgggccccctgaagaccagagtggacgagtggcagaagcagctggccctgttcaaccagaccctggaggagtggctgacctgccagagaaactggctgtacctggagagcatcttcaacgcccccgacatccagagacagctgcccgccgaggccaagatgttcctgcaggtggacaagagctggaaggagatcatgagaaaggtgaacagactgcccaacgccctgagagccgccacccagcccggcctgctggagaccttccagaacaacaacgccctgctggaccagatccagaagtgcctggaggcctacctggagagcaagagagtgatcttccccagattctacttcctgagcaacgacgagctgctggagatcctggcccagaccagaaacccccaggccgtgcagccccacctgagaaagtgcttcgacagcatcagcaagctggagttcgccctgatgccccccgccgagggcaagatccccggcatcgacggcgagcccgagaaggtgtacaccaacgacatcctggccatgctgagccccgagggcgagagagtgagcctgggcaagggcctgaaggccagaggcaacgtggaggagtggctgggcaaggtggaggaggccatgttcaccagcctgagaagactgtgcaaggccgccatcgccgactaccagggcaagctgagaaccgactgggtggtggccggccaccccagccaggtgatcctgaccgtgagccagatcatgtggtgcagagacctgaccgagtgcctggagaccgagcacagcaaccacatccaggccctgaagaacttcgagaaggtgaacttcgagagactgaacgccctggccgccatcgtgcagggcagcctgcccaagctgcacagaaacatcctgaccgccctgatcaccatcgacgtgcacgccagagacatcgtgaccgagctggtgcagagcaaggtggagaccgtggagagcttcgactggcagagacagctgagatactactgggacatcgacctggacaactgcgtggccagaatggccctgagccagtacacctacggctacgagtacctgggcgcctgccccagactggtgatcacccccctgaccgacagatgctacctgtgcctgatgggcgccctgcagctggacctgggcggcgcccccgccggccccgccggcaccggcaagaccgagaccaccaaggacctggccaaggccctggccatccagtgcgtggtgttcaactgcagcgacggcctggactacaagatgatgggcagattcttcagcggcctggcccagagcggcgcctggtgctgcttcgacgagttcaacagaatcgacatcgaggtgctgagcgtgatcgcccagcagctgatcaccatcagaaacgccaaggccgccaagctgagcagattcatgttcgagggcagagagatcaagctggtgatgacctgcgccgccttcatcaccatgaaccccggctacgccggcagaaccgagctgcccgacaacctgaaggccctgttcagacccttcgccatgatggtgcccaactacgccctgatcgccgaggtgatcctgtacagcgagggcttcgagagcagcaagatcctggccagaaagatgacccagatgtacaagctgtgcagcgagcagctgagccagcaggaccactacgacttcggcatgagagccgtgaagagcgtgctggtgatggccggcagcctgaagagagagaaccccgacctgaacgaggacgtggtgctgatcagagccctgcaggacagcaacctgcccaagttcctgaccgacgacgccctgctgttcagcggcatcatcagcgacctgttccccggcgtgcagatccccgagcacgactacggcatcctgcagagcaccatcgtggacgtgatgaacagacagaacctgcagcccgagatgtgcatggtgagaaaggtgatccagttctacgagaccatgctggtgagacacggcgtgatgctggtgggccccaccggcggcggcaagaccaccgtgtacagaatcctggccgagaccctgggcaacctgcagaagctgggcatcgagaacagcttctaccaggccgtgaagacctacgtgctgaaccccaagagcatcaccatgggcgagctgtacggcgaggtgaacaacctgaccctggagtggaaggacggcctgatggccctgagcgtgagagccgccgtgaacgacaccagcgaggaccacaagtggatcatcagcgacggccccgtggacgccctgtggatcgagaacatgaacaccgtgctggacgacaacaagatgctgtgcctggccaacagcgagagaatcaagctgaccccccagatccacatgctgttcgaggtgcaggacctgagagtggccagccccgccaccgtgagcagatgcggcatggtgttcgtggaccccgaggagctgaagtggatgccctacgtgaagacctggatgaagggcatcagcaagaagctgaccgaggagacccaggagtacatcctgaacctgttccagagatacgtggacgagggcctgcacttcatcaacaagaagtgcagccaggccatcccccaggtggacatcagcaaggtgaccaccctgtgctgcctgctggagagcctgatcctgggcaaggacggcgtgaacctggccatggagcagaccaagctgaacaccatcctgtgccagaccttcgtgttctgctacctgtggagcctgggcggcaacctgaccgagaactactacgacagcttcgacaccttcatcagaacccagttcgacgacaaccccgacgccagactgcccaacagcggcgacctgtggagcatccacatggacttcgacaccaagagactggacccctgggagagaatcatccccaccttcaagtacaacagagacgtgcccttcttcgagatgctggtgcccaccaccgacaccgtgagatacggctacctgatggagaagctgctggccgtgaagcacagcgtgctgttcaccggcatcaccggcgtgggcaagagcgtgatcgccaagggcctgctgaacaagatccaggagagcgccggctacgtgcccgtgtacctgaacttcagcgcccagaccagcagcgccagaacccaggagatcatcgagagcaagctggagagaaagagaaagaacatcctgggcgcccccggcaacaagagaatcgtgatcttcgtggacgacctgaacatgcccagactggacagatacggcagccagccccccatcgagctgctgagacagtaccaggacttcggcggcttctacgacagaaacaagctgttctggaaggagatccaggacgtgaccatcatcagcgcctgcgccccccccggcggcggcagaaaccccgtgacccccagattcatcagacacttcagcatgctgtgcctgcccatgcccagcgagcacagcctgaagcagatcttccaggccatcctgaacggcttcctgagcgacttcccccccgccgtgaagcagaccgccagcagcatcgtggaggccagcgtggagatctacaacaagatgagcgtggacctgctgcccacccccgccaagagccactacgtgttcaacctgagagacctgagcaagtgcgtgcaggacaagcacttcggcatcgccatcgacctggagtacttcctgaacaagcccatcatcttcggcgacttcatcaagttcggcgccgacaaggccgacagaatctacgacgacatgcccgacatcgagaagaccgccaacgtgctgcaggactacctggacgactacaacctgaccaaccccaaggaggtgaagctggtgttcttccaggacgccatcgagcacgtgagcagaatcgccagaatgatcagacaggagagaggcaacgccctgctggtgggcgtgggcggcaccggcaagcagagcctgaccagactggccgcccacatctgcggctacaagtgcctgcagatcgagctgagcagaggctacaactacgacagcttccacgaggacctgagaaagctgtacaagatggccggcgtggaggacaagaacatggtgttcctgttcaccgacacccagatcgtggtggaggagttcctggaggacatcaacaacatcctgaacagcggcgaggtgcccaacctgttcgagaaggacgagctggagcaggtgctggccgccaccagacccagagccaaggaggtgggcatcagcgagggcaacagagacgaggtgggctgcgccagagtggtgatgtggctgtaccacaagaacgtgagcagccccttcatctag

SEQ ID NO: 79851 - DNA, 14088 bp, synthetic construct
  misc_feature 1..14088: note = Description of Artificial Sequence: Synthetic coding sequence
  source 1..14088: mol_type = other DNA
ggcgccgaggccccccccagcaccgaggaggccgccccccccagaagcgaggaggaggaggcccccagaccccccaccgtggaggcccccgccgaggacggcttcagccccagcgccgaggacgccgtgagcagcgtggtggactacagagacctgatccccagcgaggagggcatcgtgctgcccgacgaccacgaggccgacctgaacagagtgagacagagactggcccccagacccgtgcagagcgtgatcagcgaggtgctgagcctgcccagcagcagaagaagcagcagatacagaagaagcatgagcggcctgcccaacctgcaggagaccctgaaggagagacaggccagattcagagaggccagagagagcagaagactgaagatcgaccccagctacaagtacatcttcgagatcctggccgagaacctgggcctggacatcgtgaccgtggaggagctgatcctggactgccccagcctggaggccttcaccaacttcttcgccaaggacggctgcaagaccctgaagttcctgtaccaggagggcgacgtgcccggcatcgagtgcggcagaaccatcgccggcgccaccaagggcgccaagatgatgaagctgtacatcgacaacgccgcccccgacaagctgaagggcctgtgcatcttcttcgtgagatgcagaaacgacgtggccatcaacgtgaagaccatccaggaggaggccctgttcaccgtgctggacgccagcaagggcctgctgaacggcatcagagacatgctggccaacatcttcctgcccgccgtgctggccaccaacaactggggcgccctgaaccagagcaagcagggcgagagcgagaagcacatcttcaccgagaccatcaacagatacctgagcttcctggacggcgccagaatcagcatcgagggcaccgtgaagctgaagaccatcgacaacgtgaacttcagcaagctgcacaccttcgaggaggtgaccgccgccgccagcaacagcgagaccgtgcaccagctggaggaggtgctgatggtgtggtacaagcagatcgagcaggtgctgatcgagagcgagcagatgagaaaggaggccggcgacagcggccccctgaccgagctggagcactggaagagaatgagcgccaagttcaactacatcatcgagcagatcaagggccccagctgcaaggccgtgatcaacgtgctgaacgtggcccacagcaagctgctgaagaactggagagacctggacgccagaatcaccgacaccgccaacgagagcaaggacaacgtgagatacctgtacaccctggagaaggtgtgccagcccctgtacaaccacgacctggtgagcatggcccacggcatccagaacctgatcaacgccatcagaatgatccacggcgtgagcagatactacaacaccagcgagagaatgaccagcctgttcatcaaggtgaccaaccagatggtgaccgcctgcaaggcctacatcaccgacggcggcctgaaccacgtgtgggaccaggagacccccgtggtgctgaagaagatccaggactgcatcttcctgttcaaggagtaccaggccagcttccacaagaccagaaagctgatcagcgagagcagcggcgagaagagcttcgaggtgagcgagatgtacatcttcggcaagttcgaggccttctgcaagagactggagaagatcaccgagatgatcaccgtggtgcagacctacagcaccctgagcaacagcaccatcgagggcatcgacatcatggccatcaagttcagaaacatctaccagggcgtgaagaagaagcagtacgacatcctggaccccagaagaaccgagttcgacaccgacttcctggacttcatgaccaagatcaacggcctggaggtgcagatccaggccttcatgaacagcagcttcggcaagatcctgagcagccagcaggccctgcagctgctgcagagattccagaagctgaacatcccctgcctgggcctggagatcaaccacaccatcgagagaatcctgcagtactacgtggccgagctggacgccaccaagaagctgtaccacagccagaaggacgacccccccctggccagaaacatgccccccatcgccggcaagatcctgtgggtgagacagctgtacagaagaatcagcgagcccatcaactacttcttcaagaacagcgacatcctgagcagccccgacggcaaggccgtgatcagacagtacaacaagatcagctacgtgctggtggagttcgaggtggtgtaccacaccgcctggatcagagagatcagccagctgcactacgccctgcaggccaccctgttcgtgagacaccccgagaccggcaagctgctggtgaacttcgaccccaagatcctggaggtggtgagagagaccaagtgcatgatcaagatgaagctggacgtgcccgagcaggccaagagactgctgaagctggagagcaagctgaaggccgacaagctgtacctgcagggcctgctgcagtactacgacgagctgtgccaggaggtgcccagcgtgttcgtgaacctgatgacccccaagatgaagaaggtggagagcgtgctgagacagggcctgaccgtgctgacctggagcagcctgaccctggagagcttcttccaggaggtggagctggtgctggacatgttcaaccagctgctgaagaagatcagcgacctgtgcgagatgcacatcgacaccgtgctgaaggagatcgccaagaccgtgctgatcagcctgcccgagagcggcgccaccaaggtggaggacatgctgaccctgaacgagacctacaccaaggagtgggccgacatcctgaaccacaagagcaagcacgtggaggaggccgtgagagagctgatcagcatcttcgagcagatctacgaggtgaagtacaccggcaaggtgggcaagcagagcgagcagagaaagcacgtggtgttcggcagcgagaccggcgagggcgagaacaacgactacgaggccaacatcgtgaacgagttcgacacccacgacaaggaggacgagttcaagaaggagtgcaaggaggtgttcgccttcttcagccaccagctgctggacagcctgcagaaggccaccagactgagcctggacaccatgaagagaagaatcttcgtggccagcctgtacggcagaaagcagagcgaggacatcatcagcttcatcaagagcgaggtgcacctggccatccccaacgtggtgatgatccccagcctggacgacatccagcaggccatcaacagaatgatccagctgaccctggaggtgagcagaggcgtggcccactggggccagcagcagatcagacccatcaagagcgtgatccccagccccaccaccaccgacgtgacccaccagaacaccggcaagctgctgaagaaggaggagagaagcttcgaggaggccatccccgccagaaagctgaagaacttctaccccggcgtggccgagcacaaggacatcagcaagctggtgctgctgctgagcagcagcgtgaacagcctgagaaaggccgcccacgaggccctgcaggacttccagaagtacaagaccctgtggaccgaggacagagacgtgaaggtgaaggagttcctggccaacaaccccagcctgaccgagatcagaagcgagatcctgcactacgccaccttcgagcaggagatcgacgagctgaagcccatcatcgtggtgggcgccctggagctgcacaccgagcccatgaagctggccctgagcatcgaggccaaggcctggaagatgctgctgtgcagatacctgaacgaggagtacaagaagaagatgagctacatgatcgccttcatcaacgagtacctgaagaagctgagcagacccatcagagacctggacgacgtgagattcgccatggaggccctgagctgcatcagagacaacgagatccagatggacatgaccctgggccccatcgaggaggcctacgccatcctgaacagattcgaggtggaggtgaccaaggaggagagcgaggccgtggacaccctgagatacagcttcaacaagctgcagagcaaggccgtgagcgtgcaggaggacctggtgcaggtgcagcccaagttcaagagcaacctgctggagagcgtggaggtgttcagagaggacgtgatcaacttcgccgaggcctacgagctggagggccccatggtgcccaacatccccccccaggaggccagcaacagactgcagatcttccaggccagcttcgacgacctgtggagaaagttcgtgacctacagcagcggcgagcagctgttcggcctgcccgtgaccgactacgaggtgctgcacaagaccagaaaggagctgaacctgctgcagaagctgtacggcctgtacgacaccgtgatgagcagcatcagcggctactacgagatcctgtggggcgacgtggacatcgagaagatcaacgccgagctgctggagttccagaacagatgcagaaagctgcccaagggcctgaaggactggcaggccttcctggacctgaagaagagaatcgacgacttcagcgagagctgccccctgctggagatgatgaccaacaaggccatgaagcagagacactgggacagaatcagcgagctgaccggcacccccttcgacgtggagagcgacagcttctgcctgagaaacatcatggaggcccccctgctgaagcacaaggacgacatcgaggacatctgcatcagcgccatcaaggagaaggacatcgaggccaagctgacccaggtgatcgagaactggaccaaccagaacctgagcttcgccgccttcaagggcaagggcgagctgctgctgaagggcaccgagagcggcgagatcatcaccctgatggaggacagcctgatggtgctgggcagcctgctgagcaacagatacaacgcccccttcaagaagaacatccagaactgggtgtacaagctgagcaccagcagcgacatcatcgaggagtggctggtggtgcagaacctgtgggtgtacctggaggccgtgttcgtgggcggcgacatcgccaagcagctgccccaggaggccaagagattccagaacatcgacaagagctggatcaagatcatgcagagagcccacgagaaccccaacgtgatcaactgctgcgtgggcgacgagaccatgggccagctgctgccccacctgcacgagcagctggaggtgtgccagaagagcctgaccggctacctggagaagaagagactgctgttccccagattcttcttcgtgagcgaccccgtgctgctggagatcctgggccaggccagcgacagccacaccatccagccccacctgcccgccgtgagcgacaacatcaacgaggtgaccttccacgccaaggactacgacagaatcatggccgtgatcagcagagagggcgagaagatcgtgctggacaacagcgtgatggccaagggccccgtggagatctggctgctggacctgctgaagatgcagatgagcagcctgcacaacatcatcagaagcgccttctaccagatcagcgacagcggcttccagctgctgcccttcctgagccacttccccgcccaggtgggcctgctgggcatccagatgctgtggacccacgacagcgaggaggccctgagaaacgccaaggacgacagaaagatcatgcaggtgaccaaccagaagttcctggacatcctgaacaccctgatcagccagaccacccacgacctgagcaagttcgacagagtgaagttcgagaccctgatcaccatccacgtgcaccagagagacatcttcgacgacctggtgaagatgcacatcaagagccccaccgacttcgagtggctgaagcagagcagattctacttcaaggaggacctggaccagaccgtggtgagcatcaccgacgtggacttcatctaccagaacgagttcctgggctgcaccgacagactggtgatcacccccctgaccgacagatgctacatcaccctggcccaggccctgggcatgaacatgggcggcgcccccgccggccccgccggcaccggcaagaccgagaccaccaaggacatgggcagatgcctgggcaagtacgtggtggtgttcaactgcagcgaccagatggacttcagaggcctgggcagaatcttcaagggcctggcccagagcggcagctggggctgcttcgacgagttcaacagaatcgagctgcccgtgctgagcgtggccgcccagcagatctacatcgtgctgaccgccagaaaggagagaaagaagcagttcatcttcagcgacggcgactgcgtggacctgaaccccgagttcggcatcttcctgaccatgaaccccggctacgccggcagacaggagctgcccgagaacctgaagatccagttcagaaccgtggccatgatggtgcccgacagacagatcatcatgagagtgaagctggccagctgcggcttcctggagaacgtgatcctggcccagaagttctacgtgctgtacaagctgtgcgaggagcagctgaccaagcaggtgcactacgacttcggcctgagaaacatcctgagcgtgctgagaaccctgggcagccagaagagagccagacccgaggacagcgagctgagcatcgtgatgagaggcctgagagacatgaacctgagcaagctggtggacgaggacgagcccctgttcctgagcctgatcaacgacctgttccccggcctgcagctggacagcaacacctacgccgagctgcagaacgccgtggcccaccaggtgcagatcgagggcctgatcaaccaccccccctggaacctgaagctggtgcagctgtacgagaccagcctggtgagacacggcctgatgaccctgggccccagcggcagcggcaagaccaccgtgatcaccatcctgatgaaggcccagaccgagtgcggcagaccccacagagagatgagaatgaaccccaaggccatcaccgccccccagatgttcggcagactggacaccgccaccaacgactggaccgacggcatcttcagcaccctgtggagaaagaccctgaaggccaagaagggcgagaacatcttcctgatcctggacggccccgtggacgccatctggatcgagaacctgaacagcgtgctggacgacaacaagaccctgaccctggccaacggcgacagaatccccatggcccccagctgcaagctgctgttcgaggtgcacaacatcgagaacgccagccccgccaccgtgagcagaatgggcatggtgtacatcagcagcagcgccctgagctggagacccatcctgcaggcctggctgaagaagagaaccgcccaggaggccgccgtgttcctgaccctgtacgagaaggtgttcgaggacacctacacctacatgaagctgaacctgaaccccaagatgcagctgctggagtgcaactacatcgtgcagagcctgaacctgctggagggcctgatccccagcaaggaggagggcggcgtgagctgcgtggagcacctgcacaagctgttcgtgttcggcctgatgtggagcctgggcgccctgctggagctggagagcagagagaagctggaggccttcctgagacagcacgagagcaagctggacctgcccgagatccccaagggcagcaaccagaccatgtacgagttctacgtgaccgactacggcgactgggagcactggaacaagaagctgcagccctactactaccccaccgacagcatccccgagtacagcagcatcctggtgcccaacgtggacaacatcagaaccaacttcctgatcgacaccatcgccaagcagcacaaggccgtgctgctgaccggcgagcagggcaccgccaagaccgtgatggtgaaggcctacctgaagaagtacgaccccgaggtgcagctgagcaagagcctgaacttcagcagcgccaccgagcccatgatgttccagagaaccatcgagagctacgtggacaagagaatcggcagcacctacggcccccccggcggcagaaagatgaccgtgttcatcgacgacatcaacatgcccgtgatcaacgagtggggcgaccagatcaccaacgagatcgtgagacagatgatggagatggagggcatgtacagcctggacaagcccggcgacttcaccaccatcgtggacgtgcagctgatcgccgccatgatccaccccggcggcggcagaaacgacatcccccagagactgaagagacagttcaccgtgttcaactgcaccctgcccagcaacgccagcatcgacaagatcttcggcatcatcggctgcggctacttcgacccctgcagaagcttcaagccccagatctgcgagatgatcgtgaacctggtgagcgtgggcagagtgctgtggcagtggaccaaggtgaagatgctgcccacccccagcaagttccactacatcttcaacctgagagacctgagcagaatctggcagggcatgctgaccatcaaggccgaggagtgcgccagcatccccaccctgctgagcctgttcaagcacgagtgcagcagagtgatcgccgacagattcatcacccccgaggacgagcagtggttcaacgcccacctgaccagagccgtggaggagaacatcggcagcgacgccgccagctgcatcctgcccgagccctacttcgtggacttcctgagagagatgcccgagcccaccggcgacgagcccgaggacagcgtgttcgaggtgcccaagatctacgagctgatgcccagcttcgacttcctggccgagaagctgcagttctaccagagacagttcaacgagatcatcagaggcaccagcctggacctggtgttcttcaaggacgccatgacccacctgatcaagatcagcagaatcatcagaaccagctgcggcaacgccctgctggtgggcgtgggcggcagcggcaagcagagcctgagcagactggccagcttcatcgccggctaccagatcttccagatcaccctgaccagaagctacaacgtgaccaacctgaccgacgacctgaaggccctgtacaaggtggccggcgccgacggcaagggcatcaccttcatcttcaccgacagcgagatcaaggacgaggccttcctggagtacctgaacaacctgctgagcagcggcgagatcagcaacctgttcgccagagacgagatggacgagatcacccagggcctgatcagcgtgatgaagagagagctgcccagacacccccccaccttcgacaacctgtacgagtacttcatcagcagaagcagaaagaacctgcacgtggtgctgtgcttcagccccgtgggcgagaagttcagagccagaagcctgaagttccccggcctgatcagcggctgcaccatggactggttcagcagatggcccagagaggccctgatcgccgtggccagctacttcctgagcgactacaacatcgtgtgcagcagcgagatcaagagacaggtggtggagaccatgggcctgttccacgacatggtgagcgagagctgcgagagctacttccagagatacagaagaagagcccacgtgacccccaagagctacctgagcttcatcaacggctacaagaacatctacgccgagaaggtgaagttcatcaacgagcaggccgagagaatgaacatcggcctggacaagctgatggaggccagcgagagcgtggccaagctgagccaggacctggccgtgaaggagaaggagctggccgtggccagcatcaaggccgacgaggtgctggccgaggtgaccgtgagcgcccaggccagcgccaagatcaagaacgaggtgcaggaggtgaaggacaaggcccagaagatcgtggacgagatcgacagcgagaaggtgaaggccgagagcaagctggaggccgccaagcccgccctggaggaggccgaggccgccctgaacaccatcaagcccaacgacatcgccaccgtgagaaagctggccaagcccccccacctgatcatgagaatcatggactgcgtgctgctgctgttccagaagaagatcgaccccgtgaccatggaccccgagaagagctgctgcaagcccagctggggcgagagcctgaagctgatgagcgccaccggcttcctgtggagcctgcagcagttccccaaggacaccatcaacgaggagaccgtggagctgctgcagccctacttcaacatggacgactacaccttcgagagcgccaagaaggtgtgcggcaacgtggccggcctgctgagctggaccctggccatggccatcttctacggcatcaacagagaggtgctgcccctgaaggccaacctggccaagcaggagggcagactggccgtggccaacgccgagctgggcaaggcccaggccctgctggacgagaagcaggccgagctggacaaggtgcaggccaagttcgacgccgccatgaacgagaagatggacctgctgaacgacgccgacacctgcagaaagaagatgcaggccgccagcaccctgatcgacggcctgagcggcgagaagatcagatggacccagcagagcaaggagttcaaggcccagatcaacagactggtgggcgacatcctgctgtgcaccggcttcctgagctacctgggccccttcaaccagatcttcagaaactacctgctgaaggaccagtgggagatggagctgagagccagaaagatccccttcaccgagaacctgaacctgatcagcatgctggtggacccccccaccatcggcgagtggggcctgcagggcctgcccggcgacgacctgagcatccagaacggcatcatcgtgaccaaggccaccagataccccctgctgatcgacccccagacccagggcaagacctggatcaagagcaaggagaaggagaacgacctgcaggtgaccagcctgaaccacaagtacttcagaacccacctggaggacagcctgagcctgggcagacccctgctgatcgaggacatccacgaggagctggaccccgccctggacaacgtgctggagaagaacttcatcaagagcggcaccaccttcaaggtgaaggtgggcgacaaggagtgcgacatcatggacaccttcaagctgtacatcaccaccaagctgcccaaccccgccttcacccccgagatcaacgccaagaccagcgtgatcgacttcaccgtgaccatgaagggcctggagaaccagctgctgagaagagtgatcctgaccgagaagcaggagctggaggccgagagagtgaagctgctggaggacgtgaccttcaacaagagaaagatgaaggagctggaggacaacctgctgtacaagctgagcgccaccaagggcagcctggtggacgacgagagcctgatcggcgtgctgagaaccaccaagcagaccgccgccgaggtgagcgagaagctgcacgtggccgccgagaccgagatcaagatcaacgccgcccaggaggagttcagacccgccgccaccagaggcagcatcctgtacttcctgatcaccgagatgagcatggtgaacatcatgtaccagaccagcctggcccagttcctgaagctgttcgaccagagcatggccagaagcgagaagagccccctgccccagaagagaatcaccaacatcatcgagtacctgacctacgaggtgttcacctacagcgtgagaggcctgtacgagaaccacaagttcctgttcgtgctgctgatgaccctgaagatcgacctgcagagaggcaccgtgaagcacagagagttccaggccctgatcaagggcggcgccgccctggacctgaaggcctgcccccccaagccctacagatggatcctggacatgacctggctgaacctggtggagctgagcaagctgccccagttcgccgagatcatgaaccagatcagcagaaacgagaagggctggaagagctggttcgacaaggacgcccccgaggaggagatcatccccgacggctacaacgacagcctggacacctgccacaagctgctgctgatcagaagctggtgccccgacagaaccgtgttccaggccagaaagtacatcgccgacagcctggaggagaagtacaccgagcccgtgatcctgaacctggagaagacctgggaggagagcgacaccagaacccccctgatctgcttcctgagcatgggcagcgaccccaccaaccagatcgacgccctggccaagaagctgaagctggagtgcagaaccatcagcatgggccagggccaggaggtgcacgccagaaagctgatccagatgagcatgcagcagggcggctgggtgctgctgcagaactgccacctgggcctggagttcatggaggagctgctggagaccctgatcaccaccgaggccagcgacgacagcttcagagtgtggatcaccaccgagccccacgacagattccccatcaccctgctgcagaccagcctgaagttcaccaacgagcccccccagggcgtgagagccggcctgaagagaaccttcgccggcatcaaccaggacctgctggacatcagcaacctgcccatgtggaagcccatgctgtacaccgtggccttcctgcacagcaccgtgcaggagagaagaaagttcggccccctgggctggaacatcccctacgagttcaacagcgccgacttcagcgccagcgtgcagttcatccagaaccacctggacgagtgcgacatcaagaagggcgtgagctggaacaccgtgagatacatgatcggcgaggtgcagtacggcggcagagtgaccgacgacttcgacaagagactgctgaactgcttcgccagagtgtggttcagcgagaagatgttcgagcccagcttctgcttctacaccggctacaagatccccctgtgcaagaccctggaccagtacttcgagtacatccagagcctgcccagcctggacaaccccgaggtgttcggcctgcaccccaacgccgacatcacctaccagagcaacaccgccagcgccgtgctggagaccatcaccaacatccagcccaaggagagcggcggcggcgtgggcgagaccagagaggccatcgtgtacagactgagcgaggacatgctgagcaagctgccccccgactacatcccccacgaggtgaagagcagactgatcaagatgggccacctgaacagcatgaacatcttcctgagacaggagatcgacagaatgcagagagtgatcagcatcctgagaagcagcctgagcgacctgaagctggccatcgagggcaccatcatcatgagcgagaacctgagagacgccctggacaacatgtacgacgccagaatcccccagctgtggaagagagtgagctgggacagcagcaccctgggcttctggttcaccgagctgctggagagaaacgcccagttcagcacctggatcttcgagggcagacccaacgtgttctggatgaccggcttcttcaacccccagggcttcctgaccgccatgagacaggaggtgaccagagcccacaagggctgggccctggacaccgtgaccatccacaacgaggtgctgagacagaccaaggaggagatcaccagcccccccggcgagggcgtgtacatctacggcctgtacatggacggcgccgcctgggacagaagaaacggcaagctgatggagagcacccccaaggtgctgttcacccagctgcccgtgctgcacatcttcgccatcaacagcaccgcccccaaggaccccaagctgtacgtgtgccccatctacaagaagcccagaagaaccgacctgaccttcatcaccgtggtgtacctgagaaccgtgctgagccccgaccactggatcctgagaggcgtggccctgctgtgcgacatcaagtag

SEQ ID NO: 79852 - DNA, 13473 bp, synthetic construct
  misc_feature 1..13473: note = Description of Artificial Sequence: Synthetic coding sequence
  source 1..13473: mol_type = other DNA
atgatgaagctgtacatcgacaacgccgcccccgacaagctgaagggcctgtgcatcttcttcgtgagatgcagaaacgacgtggccatcaacgtgaagaccatccaggaggaggccctgttcaccgtgctggacgccagcaagggcctgctgaacggcatcagagacatgctggccaacatcttcctgcccgccgtgctggccaccaacaactggggcgccctgaaccagagcaagcagggcgagagcgagaagcacatcttcaccgagaccatcaacagatacctgagcttcctggacggcgccagaatcagcatcgagggcaccgtgaagctgaagaccatcgacaacgtgaacttcagcaagctgcacaccttcgaggaggtgaccgccgccgccagcaacagcgagaccgtgcaccagctggaggaggtgctgatggtgtggtacaagcagatcgagcaggtgctgatcgagagcgagcagatgagaaaggaggccggcgacagcggccccctgaccgagctggagcactggaagagaatgagcgccaagttcaactacatcatcgagcagatcaagggccccagctgcaaggccgtgatcaacgtgctgaacgtggcccacagcaagctgctgaagaactggagagacctggacgccagaatcaccgacaccgccaacgagagcaaggacaacgtgagatacctgtacaccctggagaaggtgtgccagcccctgtacaaccacgacctggtgagcatggcccacggcatccagaacctgatcaacgccatcagaatgatccacggcgtgagcagatactacaacaccagcgagagaatgaccagcctgttcatcaaggtgaccaaccagatggtgaccgcctgcaaggcctacatcaccgacggcggcctgaaccacgtgtgggaccaggagacccccgtggtgctgaagaagatccaggactgcatcttcctgttcaaggagtaccaggccagcttccacaagaccagaaagctgatcagcgagagcagcggcgagaagagcttcgaggtgagcgagatgtacatcttcggcaagttcgaggccttctgcaagagactggagaagatcaccgagatgatcaccgtggtgcagacctacagcaccctgagcaacagcaccatcgagggcatcgacatcatggccatcaagttcagaaacatctaccagggcgtgaagaagaagcagtacgacatcctggaccccagaagaaccgagttcgacaccgacttcctggacttcatgaccaagatcaacggcctggaggtgcagatccaggccttcatgaacagcagcttcggcaagatcctgagcagccagcaggccctgcagctgctgcagagattccagaagctgaacatcccctgcctgggcctggagatcaaccacaccatcgagagaatcctgcagtactacgtggccgagctggacgccaccaagaagctgtaccacagccagaaggacgacccccccctggccagaaacatgccccccatcgccggcaagatcctgtgggtgagacagctgtacagaagaatcagcgagcccatcaactacttcttcaagaacagcgacatcctgagcagccccgacggcaaggccgtgatcagacagtacaacaagatcagctacgtgctggtggagttcgaggtggtgtaccacaccgcctggatcagagagatcagccagctgcactacgccctgcaggccaccctgttcgtgagacaccccgagaccggcaagctgctggtgaacttcgaccccaagatcctggaggtggtgagagagaccaagtgcatgatcaagatgaagctggacgtgcccgagcaggccaagagactgctgaagctggagagcaagctgaaggccgacaagctgtacctgcagggcctgctgcagtactacgacgagctgtgccaggaggtgcccagcgtgttcgtgaacctgatgacccccaagatgaagaaggtggagagcgtgctgagacagggcctgaccgtgctgacctggagcagcctgaccctggagagcttcttccaggaggtggagctggtgctggacatgttcaaccagctgctgaagaagatcagcgacctgtgcgagatgcacatcgacaccgtgctgaaggagatcgccaagaccgtgctgatcagcctgcccgagagcggcgccaccaaggtggaggacatgctgaccctgaacgagacctacaccaaggagtgggccgacatcctgaaccacaagagcaagcacgtggaggaggccgtgagagagctgatcagcatcttcgagcagatctacgaggtgaagtacaccggcaaggtgggcaagcagagcgagcagagaaagcacgtggtgttcggcagcgagaccggcgagggcgagaacaacgactacgaggccaacatcgtgaacgagttcgacacccacgacaaggaggacgagttcaagaaggagtgcaaggaggtgttcgccttcttcagccaccagctgctggacagcctgcagaaggccaccagactgagcctggacaccatgaagagaagaatcttcgtggccagcctgtacggcagaaagcagagcgaggacatcatcagcttcatcaagagcgaggtgcacctggccatccccaacgtggtgatgatccccagcctggacgacatccagcaggccatcaacagaatgatccagctgaccctggaggtgagcagaggcgtggcccactggggccagcagcagatcagacccatcaagagcgtgatccccagccccaccaccaccgacgtgacccaccagaacaccggcaagctgctgaagaaggaggagagaagcttcgaggaggccatccccgccagaaagctgaagaacttctaccccggcgtggccgagcacaaggacatcagcaagctggtgctgctgctgagcagcagcgtgaacagcctgagaaaggccgcccacgaggccctgcaggacttccagaagtacaagaccctgtggaccgaggacagagacgtgaaggtgaaggagttcctggccaacaaccccagcctgaccgagatcagaagcgagatcctgcactacgccaccttcgagcaggagatcgacgagctgaagcccatcatcgtggtgggcgccctggagctgcacaccgagcccatgaagctggccctgagcatcgaggccaaggcctggaagatgctgctgtgcagatacctgaacgaggagtacaagaagaagatgagctacatgatcgccttcatcaacgagtacctgaagaagctgagcagacccatcagagacctggacgacgtgagattcgccatggaggccctgagctgcatcagagacaacgagatccagatggacatgaccctgggccccatcgaggaggcctacgccatcctgaacagattcgaggtggaggtgaccaaggaggagagcgaggccgtggacaccctgagatacagcttcaacaagctgcagagcaaggccgtgagcgtgcaggaggacctggtgcaggtgcagcccaagttcaagagcaacctgctggagagcgtggaggtgttcagagaggacgtgatcaacttcgccgaggcctacgagctggagggccccatggtgcccaacatccccccccaggaggccagcaacagactgcagatcttccaggccagcttcgacgacctgtggagaaagttcgtgacctacagcagcggcgagcagctgttcggcctgcccgtgaccgactacgaggtgctgcacaagaccagaaaggagctgaacctgctgcagaagctgtacggcctgtacgacaccgtgatgagcagcatcagcggctactacgagatcctgtggggcgacgtggacatcgagaagatcaacgccgagctgctggagttccagaacagatgcagaaagctgcccaagggcctgaaggactggcaggccttcctggacctgaagaagagaatcgacgacttcagcgagagctgccccctgctggagatgatgaccaacaaggccatgaagcagagacactgggacagaatcagcgagctgaccggcacccccttcgacgtggagagcgacagcttctgcctgagaaacatcatggaggcccccctgctgaagcacaaggacgacatcgaggacatctgcatcagcgccatcaaggagaaggacatcgaggccaagctgacccaggtgatcgagaactggaccaaccagaacctgagcttcgccgccttcaagggcaagggcgagctgctgctgaagggcaccgagagcggcgagatcatcaccctgatggaggacagcctgatggtgctgggcagcctgctgagcaacagatacaacgcccccttcaagaagaacatccagaactgggtgtacaagctgagcaccagcagcgacatcatcgaggagtggctggtggtgcagaacctgtgggtgtacctggaggccgtgttcgtgggcggcgacatcgccaagcagctgccccaggaggccaagagattccagaacatcgacaagagctggatcaagatcatgcagagagcccacgagaaccccaacgtgatcaactgctgcgtgggcgacgagaccatgggccagctgctgccccacctgcacgagcagctggaggtgtgccagaagagcctgaccggctacctggagaagaagagactgctgttccccagattcttcttcgtgagcgaccccgtgctgctggagatcctgggccaggccagcgacagccacaccatccagccccacctgcccgccgtgagcgacaacatcaacgaggtgaccttccacgccaaggactacgacagaatcatggccgtgatcagcagagagggcgagaagatcgtgctggacaacagcgtgatggccaagggccccgtggagatctggctgctggacctgctgaagatgcagatgagcagcctgcacaacatcatcagaagcgccttctaccagatcagcgacagcggcttccagctgctgcccttcctgagccacttccccgcccaggtgggcctgctgggcatccagatgctgtggacccacgacagcgaggaggccctgagaaacgccaaggacgacagaaagatcatgcaggtgaccaaccagaagttcctggacatcctgaacaccctgatcagccagaccacccacgacctgagcaagttcgacagagtgaagttcgagaccctgatcaccatccacgtgcaccagagagacatcttcgacgacctggtgaagatgcacatcaagagccccaccgacttcgagtggctgaagcagagcagattctacttcaaggaggacctggaccagaccgtggtgagcatcaccgacgtggacttcatctaccagaacgagttcctgggctgcaccgacagactggtgatcacccccctgaccgacagatgctacatcaccctggcccaggccctgggcatgaacatgggcggcgcccccgccggccccgccggcaccggcaagaccgagaccaccaaggacatgggcagatgcctgggcaagtacgtggtggtgttcaactgcagcgaccagatggacttcagaggcctgggcagaatcttcaagggcctggcccagagcggcagctggggctgcttcgacgagttcaacagaatcgagctgcccgtgctgagcgtggccgcccagcagatctacatcgtgctgaccgccagaaaggagagaaagaagcagttcatcttcagcgacggcgactgcgtggacctgaaccccgagttcggcatcttcctgaccatgaaccccggctacgccggcagacaggagctgcccgagaacctgaagatccagttcagaaccgtggccatgatggtgcccgacagacagatcatcatgagagtgaagctggccagctgcggcttcctggagaacgtgatcctggcccagaagttctacgtgctgtacaagctgtgcgaggagcagctgaccaagcaggtgcactacgacttcggcctgagaaacatcctgagcgtgctgagaaccctgggcagccagaagagagccagacccgaggacagcgagctgagcatcgtgatgagaggcctgagagacatgaacctgagcaagctggtggacgaggacgagcccctgttcctgagcctgatcaacgacctgttccccggcctgcagctggacagcaacacctacgccgagctgcagaacgccgtggcccaccaggtgcagatcgagggcctgatcaaccaccccccctggaacctgaagctggtgcagctgtacgagaccagcctggtgagacacggcctgatgaccctgggccccagcggcagcggcaagaccaccgtgatcaccatcctgatgaaggcccagaccgagtgcggcagaccccacagagagatgagaatgaaccccaaggccatcaccgccccccagatgttcggcagactggacaccgccaccaacgactggaccgacggcatcttcagcaccctgtggagaaagaccctgaaggccaagaagggcgagaacatcttcctgatcctggacggccccgtggacgccatctggatcgagaacctgaacagcgtgctggacgacaacaagaccctgaccctggccaacggcgacagaatccccatggcccccagctgcaagctgctgttcgaggtgcacaacatcgagaacgccagccccgccaccgtgagcagaatgggcatggtgtacatcagcagcagcgccctgagctggagacccatcctgcaggcctggctgaagaagagaaccgcccaggaggccgccgtgttcctgaccctgtacgagaaggtgttcgaggacacctacacctacatgaagctgaacctgaaccccaagatgcagctgctggagtgcaactacatcgtgcagagcctgaacctgctggagggcctgatccccagcaaggaggagggcggcgtgagctgcgtggagcacctgcacaagctgttcgtgttcggcctgatgtggagcctgggcgccctgctggagctggagagcagagagaagctggaggccttcctgagacagcacgagagcaagctggacctgcccgagatccccaagggcagcaaccagaccatgtacgagttctacgtgaccgactacggcgactgggagcactggaacaagaagctgcagccctactactaccccaccgacagcatccccgagtacagcagcatcctggtgcccaacgtggacaacatcagaaccaacttcctgatcgacaccatcgccaagcagcacaaggccgtgctgctgaccggcgagcagggcaccgccaagaccgtgatggtgaaggcctacctgaagaagtacgaccccgaggtgcagctgagcaagagcctgaacttcagcagcgccaccgagcccatgatgttccagagaaccatcgagagctacgtggacaagagaatcggcagcacctacggcccccccggcggcagaaagatgaccgtgttcatcgacgacatcaacatgcccgtgatcaacgagtggggcgaccagatcaccaacgagatcgtgagacagatgatggagatggagggcatgtacagcctggacaagcccggcgacttcaccaccatcgtggacgtgcagctgatcgccgccatgatccaccccggcggcggcagaaacgacatcccccagagactgaagagacagttcaccgtgttcaactgcaccctgcccagcaacgccagcatcgacaagatcttcggcatcatcggctgcggctacttcgacccctgcagaagcttcaagccccagatctgcgagatgatcgtgaacctggtgagcgtgggcagagtgctgtggcagtggaccaaggtgaagatgctgcccacccccagcaagttccactacatcttcaacctgagagacctgagcagaatctggcagggcatgctgaccatcaaggccgaggagtgcgccagcatccccaccctgctgagcctgttcaagcacgagtgcagcagagtgatcgccgacagattcatcacccccgaggacgagcagtggttcaacgcccacctgaccagagccgtggaggagaacatcggcagcgacgccgccagctgcatcctgcccgagccctacttcgtggacttcctgagagagatgcccgagcccaccggcgacgagcccgaggacagcgtgttcgaggtgcccaagatctacgagctgatgcccagcttcgacttcctggccgagaagctgcagttctaccagagacagttcaacgagatcatcagaggcaccagcctggacctggtgttcttcaaggacgccatgacccacctgatcaagatcagcagaatcatcagaaccagctgcggcaacgccctgctggtgggcgtgggcggcagcggcaagcagagcctgagcagactggccagcttcatcgccggctaccagatcttccagatcaccctgaccagaagctacaacgtgaccaacctgaccgacgacctgaaggccctgtacaaggtggccggcgccgacggcaagggcatcaccttcatcttcaccgacagcgagatcaaggacgaggccttcctggagtacctgaacaacctgctgagcagcggcgagatcagcaacctgttcgccagagacgagatggacgagatcacccagggcctgatcagcgtgatgaagagagagctgcccagacacccccccaccttcgacaacctgtacgagtacttcatcagcagaagcagaaagaacctgcacgtggtgctgtgcttcagccccgtgggcgagaagttcagagccagaagcctgaagttccccggcctgatcagcggctgcaccatggactggttcagcagatggcccagagaggccctgatcgccgtggccagctacttcctgagcgactacaacatcgtgtgcagcagcgagatcaagagacaggtggtggagaccatgggcctgttccacgacatggtgagcgagagctgcgagagctacttccagagatacagaagaagagcccacgtgacccccaagagctacctgagcttcatcaacggctacaagaacatctacgccgagaaggtgaagttcatcaacgagcaggccgagagaatgaacatcggcctggacaagctgatggaggccagcgagagcgtggccaagctgagccaggacctggccgtgaaggagaaggagctggccgtggccagcatcaaggccgacgaggtgctggccgaggtgaccgtgagcgcccaggccagcgccaagatcaagaacgaggtgcaggaggtgaaggacaaggcccagaagatcgtggacgagatcgacagcgagaaggtgaaggccgagagcaagctggaggccgccaagcccgccctggaggaggccgaggccgccctgaacaccatcaagcccaacgacatcgccaccgtgagaaagctggccaagcccccccacctgatcatgagaatcatggactgcgtgctgctgctgttccagaagaagatcgaccccgtgaccatggaccccgagaagagctgctgcaagcccagctggggcgagagcctgaagctgatgagcgccaccggcttcctgtggagcctgcagcagttccccaaggacaccatcaacgaggagaccgtggagctgctgcagccctacttcaacatggacgactacaccttcgagagcgccaagaaggtgtgcggcaacgtggccggcctgctgagctggaccctggccatggccatcttctacggcatcaacagagaggtgctgcccctgaaggccaacctggccaagcaggagggcagactggccgtggccaacgccgagctgggcaaggcccaggccctgctggacgagaagcaggccgagctggacaaggtgcaggccaagttcgacgccgccatgaacgagaagatggacctgctgaacgacgccgacacctgcagaaagaagatgcaggccgccagcaccctgatcgacggcctgagcggcgagaagatcagatggacccagcagagcaaggagttcaaggcccagatcaacagactggtgggcgacatcctgctgtgcaccggcttcctgagctacctgggccccttcaaccagatcttcagaaactacctgctgaaggaccagtgggagatggagctgagagccagaaagatccccttcaccgagaacctgaacctgatcagcatgctggtggacccccccaccatcggcgagtggggcctgcagggcctgcccggcgacgacctgagcatccagaacggcatcatcgtgaccaaggccaccagataccccctgctgatcgacccccagacccagggcaagacctggatcaagagcaaggagaaggagaacgacctgcaggtgaccagcctgaaccacaagtacttcagaacccacctggaggacagcctgagcctgggcagacccctgctgatcgaggacatccacgaggagctggaccccgccctggacaacgtgctggagaagaacttcatcaagagcggcaccaccttcaaggtgaaggtgggcgacaaggagtgcgacatcatggacaccttcaagctgtacatcaccaccaagctgcccaaccccgccttcacccccgagatcaacgccaagaccagcgtgatcgacttcaccgtgaccatgaagggcctggagaaccagctgctgagaagagtgatcctgaccgagaagcaggagctggaggccgagagagtgaagctgctggaggacgtgaccttcaacaagagaaagatgaaggagctggaggacaacctgctgtacaagctgagcgccaccaagggcagcctggtggacgacgagagcctgatcggcgtgctgagaaccaccaagcagaccgccgccgaggtgagcgagaagctgcacgtggccgccgagaccgagatcaagatcaacgccgcccaggaggagttcagacccgccgccaccagaggcagcatcctgtacttcctgatcaccgagatgagcatggtgaacatcatgtaccagaccagcctggcccagttcctgaagctgttcgaccagagcatggccagaagcgagaagagccccctgccccagaagagaatcaccaacatcatcgagtacctgacctacgaggtgttcacctacagcgtgagaggcctgtacgagaaccacaagttcctgttcgtgctgctgatgaccctgaagatcgacctgcagagaggcaccgtgaagcacagagagttccaggccctgatcaagggcggcgccgccctggacctgaaggcctgcccccccaagccctacagatggatcctggacatgacctggctgaacctggtggagctgagcaagctgccccagttcgccgagatcatgaaccagatcagcagaaacgagaagggctggaagagctggttcgacaaggacgcccccgaggaggagatcatccccgacggctacaacgacagcctggacacctgccacaagctgctgctgatcagaagctggtgccccgacagaaccgtgttccaggccagaaagtacatcgccgacagcctggaggagaagtacaccgagcccgtgatcctgaacctggagaagacctgggaggagagcgacaccagaacccccctgatctgcttcctgagcatgggcagcgaccccaccaaccagatcgacgccctggccaagaagctgaagctggagtgcagaaccatcagcatgggccagggccaggaggtgcacgccagaaagctgatccagatgagcatgcagcagggcggctgggtgctgctgcagaactgccacctgggcctggagttcatggaggagctgctggagaccctgatcaccaccgaggccagcgacgacagcttcagagtgtggatcaccaccgagccccacgacagattccccatcaccctgctgcagaccagcctgaagttcaccaacgagcccccccagggcgtgagagccggcctgaagagaaccttcgccggcatcaaccaggacctgctggacatcagcaacctgcccatgtggaagcccatgctgtacaccgtggccttcctgcacagcaccgtgcaggagagaagaaagttcggccccctgggctggaacatcccctacgagttcaacagcgccgacttcagcgccagcgtgcagttcatccagaaccacctggacgagtgcgacatcaagaagggcgtgagctggaacaccgtgagatacatgatcggcgaggtgcagtacggcggcagagtgaccgacgacttcgacaagagactgctgaactgcttcgccagagtgtggttcagcgagaagatgttcgagcccagcttctgcttctacaccggctacaagatccccctgtgcaagaccctggaccagtacttcgagtacatccagagcctgcccagcctggacaaccccgaggtgttcggcctgcaccccaacgccgacatcacctaccagagcaacaccgccagcgccgtgctggagaccatcaccaacatccagcccaaggagagcggcggcggcgtgggcgagaccagagaggccatcgtgtacagactgagcgaggacatgctgagcaagctgccccccgactacatcccccacgaggtgaagagcagactgatcaagatgggccacctgaacagcatgaacatcttcctgagacaggagatcgacagaatgcagagagtgatcagcatcctgagaagcagcctgagcgacctgaagctggccatcgagggcaccatcatcatgagcgagaacctgagagacgccctggacaacatgtacgacgccagaatcccccagctgtggaagagagtgagctgggacagcagcaccctgggcttctggttcaccgagctgctggagagaaacgcccagttcagcacctggatcttcgagggcagacccaacgtgttctggatgaccggcttcttcaacccccagggcttcctgaccgccatgagacaggaggtgaccagagcccacaagggctgggccctggacaccgtgaccatccacaacgaggtgctgagacagaccaaggaggagatcaccagcccccccggcgagggcgtgtacatctacggcctgtacatggacggcgccgcctgggacagaagaaacggcaagctgatggagagcacccccaaggtgctgttcacccagctgcccgtgctgcacatcttcgccatcaacagcaccgcccccaaggaccccaagctgtacgtgtgccccatctacaagaagcccagaagaaccgacctgaccttcatcaccgtggtgtacctgagaaccgtgctgagccccgaccactggatcctgagaggcgtggccctgctgtgcgacatcaagtag

SEQ ID NO: 79853 - DNA, 13365 bp, synthetic construct
  misc_feature 1..13365: note = Description of Artificial Sequence: Synthetic coding sequence
  source 1..13365: mol_type = other DNA
atgatgaagctgtacatcgacaacgccgcccccgacaagctgaagggcctgtgcatcttcttcgtgagatgcagaaacgacgtggccatcaacgtgaagaccatccaggaggaggccctgttcaccgtgctggacgccagcaagggcctgctgaacggcatcagagacatgctggccaacatcttcctgcccgccgtgctggccaccaacaactggggcgccctgaaccagagcaagcagggcgagagcgagaagcacatcttcaccgagaccatcaacagatacctgagcttcctggacggcgccagaatcagcatcgagggcaccgtgaagctgaagaccatcgacaacgtgaacttcagcaagctgcacaccttcgaggaggtgaccgccgccgccagcaacagcgagaccgtgcaccagctggaggaggtgctgatggtgtggtacaagcagatcgagcaggtgctgatcgagagcgagcagatgagaaaggaggccggcgacagcggccccctgaccgagctggagcactggaagagaatgagcgccaagttcaactacatcatcgagcagatcaagggccccagctgcaaggccgtgatcaacgtgctgaacgtggcccacagcaagctgctgaagaactggagagacctggacgccagaatcaccgacaccgccaacgagagcaaggacaacgtgagatacctgtacaccctggagaaggtgtgccagcccctgtacaaccacgacctggtgagcatggcccacggcatccagaacctgatcaacgccatcagaatgatccacggcgtgagcagatactacaacaccagcgagagaatgaccagcctgttcatcaaggtgaccaaccagatggtgaccgcctgcaaggcctacatcaccgacggcggcctgaaccacgtgtgggaccaggagacccccgtggtgctgaagaagatccaggactgcatcttcctgttcaaggagtaccaggccagcttccacaagaccagaaagctgatcagcgagagcagcggcgagaagagcttcgaggtgagcgagatgtacatcttcggcaagttcgaggccttctgcaagagactggagaagatcaccgagatgatcaccgtggtgcagacctacagcaccctgagcaacagcaccatcgagggcatcgacatcatggccatcaagttcagaaacatctaccagggcgtgaagaagaagcagtacgacatcctggaccccagaagaaccgagttcgacaccgacttcctggacttcatgaccaagatcaacggcctggaggtgcagatccaggccttcatgaacagcagcttcggcaagatcctgagcagccagcaggccctgcagctgctgcagagattccagaagctgaacatcccctgcctgggcctggagatcaaccacaccatcgagagaatcctgcagtactacgtggccgagctggacgccaccaagaagctgtaccacagccagaaggacgacccccccctggccagaaacatgccccccatcgccggcaagatcctgtgggtgagacagctgtacagaagaatcagcgagcccatcaactacttcttcaagaacagcgacatcctgagcagccccgacggcaaggccgtgatcagacagtacaacaagatcagctacgtgctggtggagttcgaggtggtgtaccacaccgcctggatcagagagatcagccagctgcactacgccctgcaggccaccctgttcgtgagacaccccgagaccggcaagctgctggtgaacttcgaccccaagatcctggaggtggtgagagagaccaagtgcatgatcaagatgaagctggacgtgcccgagcaggccaagagactgctgaagctggagagcaagctgaaggccgacaagctgtacctgcagggcctgctgcagtactacgacgagctgtgccaggaggtgcccagcgtgttcgtgaacctgatgacccccaagatgaagaaggtggagagcgtgctgagacagggcctgaccgtgctgacctggagcagcctgaccctggagagcttcttccaggaggtggagctggtgctggacatgttcaaccagctgctgaagaagatcagcgacctgtgcgagatgcacatcgacaccgtgctgaaggagatcgccaagaccgtgctgatcagcctgcccgagagcggcgccaccaaggtggaggacatgctgaccctgaacgagacctacaccaaggagtgggccgacatcctgaaccacaagagcaagcacgtggaggaggccgtgagagagctgatcagcatcttcgagcagatctacgaggtgaagtacaccggcaaggtgggcaagcagagcgagcagagaaagcacgtggtgttcggcagcgagaccggcgagggcgagaacaacgactacgaggccaacatcgtgaacgagttcgacacccacgacaaggaggacgagttcaagaaggagtgcaaggaggtgttcgccttcttcagccaccagctgctggacagcctgcagaaggccaccagactgagcctggacaccatgaagagaagaatcttcgtggccagcctgtacggcagaaagcagagcgaggacatcatcagcttcatcaagagcgaggtgcacctggccatccccaacgtggtgatgatccccagcctggacgacatccagcaggccatcaacagaatgatccagctgaccctggaggtgagcagaggcgtggcccactggggccagcagcagatcagacccatcaagagcgtgatccccagccccaccaccaccgacgtgacccaccagaacaccggcaagctgctgaagaaggaggagagaagcttcgaggaggccatccccgccagaaagctgaagaacttctaccccggcgtggccgagcacaaggacatcagcaagctggtgctgctgctgagcagcagcgtgaacagcctgagaaaggccgcccacgaggccctgcaggacttccagaagtacaagaccctgtggaccgaggacagagacgtgaaggtgaaggagttcctggccaacaaccccagcctgaccgagatcagaagcgagatcctgcactacgccaccttcgagcaggagatcgacgagctgaagcccatcatcgtggtgggcgccctggagctgcacaccgagcccatgaagctggccctgagcatcgaggccaaggcctggaagatgctgctgtgcagatacctgaacgaggagtacaagaagaagatgagctacatgatcgccttcatcaacgagtacctgaagaagctgagcagacccatcagagacctggacgacgtgagattcgccatggaggccctgagctgcatcagagacaacgagatccagatggacatgaccctgggccccatcgaggaggcctacgccatcctgaacagattcgaggtggaggtgaccaaggaggagagcgaggccgtggacaccctgagatacagcttcaacaagctgcagagcaaggccgtgagcgtgcaggaggacctggtgcaggtgcagcccaagttcaagagcaacctgctggagagcgtggaggtgttcagagaggacgtgatcaacttcgccgaggcctacgagctggagggccccatggtgcccaacatccccccccaggaggccagcaacagactgcagatcttccaggccagcttcgacgacctgtggagaaagttcgtgacctacagcagcggcgagcagctgttcggcctgcccgtgaccgactacgaggtgctgcacaagaccagaaaggagctgaacctgctgcagaagctgtacggcctgtacgacaccgtgatgagcagcatcagcggctactacgagatcctgtggggcgacgtggacatcgagaagatcaacgccgagctgctggagttccagaacagatgcagaaagctgcccaagggcctgaaggactggcaggccttcctggacctgaagaagagaatcgacgacttcagcgagagctgccccctgctggagatgatgaccaacaaggccatgaagcagagacactgggacagaatcagcgagctgaccggcacccccttcgacgtggagagcgacagcttctgcctgagaaacatcatggaggcccccctgctgaagcacaaggacgacatcgaggacatctgcatcagcgccatcaaggagaaggacatcgaggccaagctgacccaggtgatcgagaactggaccaaccagaacctgagcttcgccgccttcaagggcaagggcgagctgctgctgaagggcaccgagagcggcgagatcatcaccctgatggaggacagcctgatggtgctgggcagcctgctgagcaacagatacaacgcccccttcaagaagaacatccagaactgggtgtacaagctgagcaccagcagcgacatcatcgaggagtggctggtggtgcagaacctgtgggtgtacctggaggccgtgttcgtgggcggcgacatcgccaagcagctgccccaggaggccaagagattccagaacatcgacaagagctggatcaagatcatgcagagagcccacgagaaccccaacgtgatcaactgctgcgtgggcgacgagaccatgggccagctgctgccccacctgcacgagcagctggaggtgtgccagaagagcctgaccggctacctggagaagaagagactgctgttccccagattcttcttcgtgagcgaccccgtgctgctggagatcctgggccaggccagcgacagccacaccatccagccccacctgcccgccgtgagcgacaacatcaacgaggtgaccttccacgccaaggactacgacagaatcatggccgtgatcagcagagagggcgagaagatcgtgctggacaacagcgtgatggccaagggccccgtggagatctggctgctggacctgctgaagatgcagatgagcagcctgcacaacatcatcagaagcgccttctaccagatcagcgacagcggcttccagctgctgcccttcctgagccacttccccgcccaggtgggcctgctgggcatccagatgctgtggacccacgacagcgaggaggccctgagaaacgccaaggacgacagaaagatcatgcaggtgaccaaccagaagttcctggacatcctgaacaccctgatcagccagaccacccacgacctgagcaagttcgacagagtgaagttcgagaccctgatcaccatccacgtgcaccagagagacatcttcgacgacctggtgaagatgcacatcaagagccccaccgacttcgagtggctgaagcagagcagattctacttcaaggaggacctggaccagaccgtggtgagcatcaccgacgtggacttcatctaccagaacgagttcctgggctgcaccgacagactggtgatcacccccctgaccgacagatgctacatcaccctggcccaggccctgggcatgaacatgggcggcgcccccgccggccccgccggcaccggcaagaccgagaccaccaaggacatgggcagatgcctgggcaagtacgtggtggtgttcaactgcagcgaccagatggacttcagaggcctgggcagaatcttcaagggcctggcccagagcggcagctggggctgcttcgacgagttcaacagaatcgagctgcccgtgctgagcgtggccgcccagcagatctacatcgtgctgaccgccagaaaggagagaaagaagcagttcatcttcagcgacggcgactgcgtggacctgaaccccgagttcggcatcttcctgaccatgaaccccggctacgccggcagacaggagctgcccgagaacctgaagatccagttcagaaccgtggccatgatggtgcccgacagacaggtgcactacgacttcggcctgagaaacatcctgagcgtgctgagaaccctgggcagccagaagagagccagacccgaggacagcgagctgagcatcgtgatgagaggcctgagagacatgaacctgagcaagctggtggacgaggacgagcccctgttcctgagcctgatcaacgacctgttccccggcctgcagctggacagcaacacctacgccgagctgcagaacgccgtggcccaccaggtgcagatcgagggcctgatcaaccaccccccctggaacctgaagctggtgcagctgtacgagaccagcctggtgagacacggcctgatgaccctgggccccagcggcagcggcaagaccaccgtgatcaccatcctgatgaaggcccagaccgagtgcggcagaccccacagagagatgagaatgaaccccaaggccatcaccgccccccagatgttcggcagactggacaccgccaccaacgactggaccgacggcatcttcagcaccctgtggagaaagaccctgaaggccaagaagggcgagaacatcttcctgatcctggacggccccgtggacgccatctggatcgagaacctgaacagcgtgctggacgacaacaagaccctgaccctggccaacggcgacagaatccccatggcccccagctgcaagctgctgttcgaggtgcacaacatcgagaacgccagccccgccaccgtgagcagaatgggcatggtgtacatcagcagcagcgccctgagctggagacccatcctgcaggcctggctgaagaagagaaccgcccaggaggccgccgtgttcctgaccctgtacgagaaggtgttcgaggacacctacacctacatgaagctgaacctgaaccccaagatgcagctgctggagtgcaactacatcgtgcagagcctgaacctgctggagggcctgatccccagcaaggaggagggcggcgtgagctgcgtggagcacctgcacaagctgttcgtgttcggcctgatgtggagcctgggcgccctgctggagctggagagcagagagaagctggaggccttcctgagacagcacgagagcaagctggacctgcccgagatccccaagggcagcaaccagaccatgtacgagttctacgtgaccgactacggcgactgggagcactggaacaagaagctgcagccctactactaccccaccgacagcatccccgagtacagcagcatcctggtgcccaacgtggacaacatcagaaccaacttcctgatcgacaccatcgccaagcagcacaaggccgtgctgctgaccggcgagcagggcaccgccaagaccgtgatggtgaaggcctacctgaagaagtacgaccccgaggtgcagctgagcaagagcctgaacttcagcagcgccaccgagcccatgatgttccagagaaccatcgagagctacgtggacaagagaatcggcagcacctacggcccccccggcggcagaaagatgaccgtgttcatcgacgacatcaacatgcccgtgatcaacgagtggggcgaccagatcaccaacgagatcgtgagacagatgatggagatggagggcatgtacagcctggacaagcccggcgacttcaccaccatcgtggacgtgcagctgatcgccgccatgatccaccccggcggcggcagaaacgacatcccccagagactgaagagacagttcaccgtgttcaactgcaccctgcccagcaacgccagcatcgacaagatcttcggcatcatcggctgcggctacttcgacccctgcagaagcttcaagccccagatctgcgagatgatcgtgaacctggtgagcgtgggcagagtgctgtggcagtggaccaaggtgaagatgctgcccacccccagcaagttccactacatcttcaacctgagagacctgagcagaatctggcagggcatgctgaccatcaaggccgaggagtgcgccagcatccccaccctgctgagcctgttcaagcacgagtgcagcagagtgatcgccgacagattcatcacccccgaggacgagcagtggttcaacgcccacctgaccagagccgtggaggagaacatcggcagcgacgccgccagctgcatcctgcccgagccctacttcgtggacttcctgagagagatgcccgagcccaccggcgacgagcccgaggacagcgtgttcgaggtgcccaagatctacgagctgatgcccagcttcgacttcctggccgagaagctgcagttctaccagagacagttcaacgagatcatcagaggcaccagcctggacctggtgttcttcaaggacgccatgacccacctgatcaagatcagcagaatcatcagaaccagctgcggcaacgccctgctggtgggcgtgggcggcagcggcaagcagagcctgagcagactggccagcttcatcgccggctaccagatcttccagatcaccctgaccagaagctacaacgtgaccaacctgaccgacgacctgaaggccctgtacaaggtggccggcgccgacggcaagggcatcaccttcatcttcaccgacagcgagatcaaggacgaggccttcctggagtacctgaacaacctgctgagcagcggcgagatcagcaacctgttcgccagagacgagatggacgagatcacccagggcctgatcagcgtgatgaagagagagctgcccagacacccccccaccttcgacaacctgtacgagtacttcatcagcagaagcagaaagaacctgcacgtggtgctgtgcttcagccccgtgggcgagaagttcagagccagaagcctgaagttccccggcctgatcagcggctgcaccatggactggttcagcagatggcccagagaggccctgatcgccgtggccagctacttcctgagcgactacaacatcgtgtgcagcagcgagatcaagagacaggtggtggagaccatgggcctgttccacgacatggtgagcgagagctgcgagagctacttccagagatacagaagaagagcccacgtgacccccaagagctacctgagcttcatcaacggctacaagaacatctacgccgagaaggtgaagttcatcaacgagcaggccgagagaatgaacatcggcctggacaagctgatggaggccagcgagagcgtggccaagctgagccaggacctggccgtgaaggagaaggagctggccgtggccagcatcaaggccgacgaggtgctggccgaggtgaccgtgagcgcccaggccagcgccaagatcaagaacgaggtgcaggaggtgaaggacaaggcccagaagatcgtggacgagatcgacagcgagaaggtgaaggccgagagcaagctggaggccgccaagcccgccctggaggaggccgaggccgccctgaacaccatcaagcccaacgacatcgccaccgtgagaaagctggccaagcccccccacctgatcatgagaatcatggactgcgtgctgctgctgttccagaagaagatcgaccccgtgaccatggaccccgagaagagctgctgcaagcccagctggggcgagagcctgaagctgatgagcgccaccggcttcctgtggagcctgcagcagttccccaaggacaccatcaacgaggagaccgtggagctgctgcagccctacttcaacatggacgactacaccttcgagagcgccaagaaggtgtgcggcaacgtggccggcctgctgagctggaccctggccatggccatcttctacggcatcaacagagaggtgctgcccctgaaggccaacctggccaagcaggagggcagactggccgtggccaacgccgagctgggcaaggcccaggccctgctggacgagaagcaggccgagctggacaaggtgcaggccaagttcgacgccgccatgaacgagaagatggacctgctgaacgacgccgacacctgcagaaagaagatgcaggccgccagcaccctgatcgacggcctgagcggcgagaagatcagatggacccagcagagcaaggagttcaaggcccagatcaacagactggtgggcgacatcctgctgtgcaccggcttcctgagctacctgggccccttcaaccagatcttcagaaactacctgctgaaggaccagtgggagatggagctgagagccagaaagatccccttcaccgagaacctgaacctgatcagcatgctggtggacccccccaccatcggcgagtggggcctgcagggcctgcccggcgacgacctgagcatccagaacggcatcatcgtgaccaaggccaccagataccccctgctgatcgacccccagacccagggcaagacctggatcaagagcaaggagaaggagaacgacctgcaggtgaccagcctgaaccacaagtacttcagaacccacctggaggacagcctgagcctgggcagacccctgctgatcgaggacatccacgaggagctggaccccgccctggacaacgtgctggagaagaacttcatcaagagcggcaccaccttcaaggtgaaggtgggcgacaaggagtgcgacatcatggacaccttcaagctgtacatcaccaccaagctgcccaaccccgccttcacccccgagatcaacgccaagaccagcgtgatcgacttcaccgtgaccatgaagggcctggagaaccagctgctgagaagagtgatcctgaccgagaagcaggagctggaggccgagagagtgaagctgctggaggacgtgaccttcaacaagagaaagatgaaggagctggaggacaacctgctgtacaagctgagcgccaccaagggcagcctggtggacgacgagagcctgatcggcgtgctgagaaccaccaagcagaccgccgccgaggtgagcgagaagctgcacgtggccgccgagaccgagatcaagatcaacgccgcccaggaggagttcagacccgccgccaccagaggcagcatcctgtacttcctgatcaccgagatgagcatggtgaacatcatgtaccagaccagcctggcccagttcctgaagctgttcgaccagagcatggccagaagcgagaagagccccctgccccagaagagaatcaccaacatcatcgagtacctgacctacgaggtgttcacctacagcgtgagaggcctgtacgagaaccacaagttcctgttcgtgctgctgatgaccctgaagatcgacctgcagagaggcaccgtgaagcacagagagttccaggccctgatcaagggcggcgccgccctggacctgaaggcctgcccccccaagccctacagatggatcctggacatgacctggctgaacctggtggagctgagcaagctgccccagttcgccgagatcatgaaccagatcagcagaaacgagaagggctggaagagctggttcgacaaggacgcccccgaggaggagatcatccccgacggctacaacgacagcctggacacctgccacaagctgctgctgatcagaagctggtgccccgacagaaccgtgttccaggccagaaagtacatcgccgacagcctggaggagaagtacaccgagcccgtgatcctgaacctggagaagacctgggaggagagcgacaccagaacccccctgatctgcttcctgagcatgggcagcgaccccaccaaccagatcgacgccctggccaagaagctgaagctggagtgcagaaccatcagcatgggccagggccaggaggtgcacgccagaaagctgatccagatgagcatgcagcagggcggctgggtgctgctgcagaactgccacctgggcctggagttcatggaggagctgctggagaccctgatcaccaccgaggccagcgacgacagcttcagagtgtggatcaccaccgagccccacgacagattccccatcaccctgctgcagaccagcctgaagttcaccaacgagcccccccagggcgtgagagccggcctgaagagaaccttcgccggcatcaaccaggacctgctggacatcagcaacctgcccatgtggaagcccatgctgtacaccgtggccttcctgcacagcaccgtgcaggagagaagaaagttcggccccctgggctggaacatcccctacgagttcaacagcgccgacttcagcgccagcgtgcagttcatccagaaccacctggacgagtgcgacatcaagaagggcgtgagctggaacaccgtgagatacatgatcggcgaggtgcagtacggcggcagagtgaccgacgacttcgacaagagactgctgaactgcttcgccagagtgtggttcagcgagaagatgttcgagcccagcttctgcttctacaccggctacaagatccccctgtgcaagaccctggaccagtacttcgagtacatccagagcctgcccagcctggacaaccccgaggtgttcggcctgcaccccaacgccgacatcacctaccagagcaacaccgccagcgccgtgctggagaccatcaccaacatccagcccaaggagagcggcggcggcgtgggcgagaccagagaggccatcgtgtacagactgagcgaggacatgctgagcaagctgccccccgactacatcccccacgaggtgaagagcagactgatcaagatgggccacctgaacagcatgaacatcttcctgagacaggagatcgacagaatgcagagagtgatcagcatcctgagaagcagcctgagcgacctgaagctggccatcgagggcaccatcatcatgagcgagaacctgagagacgccctggacaacatgtacgacgccagaatcccccagctgtggaagagagtgagctgggacagcagcaccctgggcttctggttcaccgagctgctggagagaaacgcccagttcagcacctggatcttcgagggcagacccaacgtgttctggatgaccggcttcttcaacccccagggcttcctgaccgccatgagacaggaggtgaccagagcccacaagggctgggccctggacaccgtgaccatccacaacgaggtgctgagacagaccaaggaggagatcaccagcccccccggcgagggcgtgtacatctacggcctgtacatggacggcgccgcctgggacagaagaaacggcaagctgatggagagcacccccaaggtgctgttcacccagctgcccgtgctgcacatcttcgccatcaacagcaccgcccccaaggaccccaagctgtacgtgtgccccatctacaagaagcccagaagaaccgacctgaccttcatcaccgtggtgtacctgagaaccgtgctgagccccgaccactggatcctgagaggcgtggccctgctgtgcgacatcaagtag

SEQ ID NO: 79854 - DNA, 12567 bp, synthetic construct
  misc_feature 1..12567: note = Description of Artificial Sequence: Synthetic coding sequence
  source 1..12567: mol_type = other DNA
atggagaaggacgccgaggacggcgcccccagcgagggcgccgaggccccccccagcaccgaggaggccgccccccccagaagcgaggaggaggaggcccccagaccccccaccgtggaggcccccgccgaggacggcttcagccccagcgccgaggacgccgtgagcagcgtggtggactacagagacctgatccccagcgaggagggcatcgtgctgcccgacgaccacgaggccgacctgaacagagtgagacagagactggcccccagacccgtgcagagcgtgatcagcgaggtgctgagcctgcccagcagcagaagaagcagcagatacagaagaagcatgagcggcctgcccaacctgcaggagaccctgaaggagagacaggccagattcagagaggccagagagagcagaagactgaagatcgaccccagctacaagtacatcttcgagatcctggccgagaacctgggcctggacatcgtgaccgtggaggagctgatcctggactgccccagcctggaggccttcaccaacttcttcgccaaggacggctgcaagaccctgaagttcctgtaccaggagggcgacgtgcccggcatcgagtgcggcagaaccatcgccggcgccaccaagggcgccaagatgatgaagctgtacatcgacaacgccgcccccgacaagctgaagggcctgtgcatcttcttcgtgagatgcagaaacgacgtggccatcaacgtgaagaccatccaggaggaggccctgttcaccgtgctggacgccagcaagggcctgctgaacggcatcagagacatgctggccaacatcttcctgcccgccgtgctggccaccaacaactggggcgccctgaaccagagcaagcagggcgagagcgagaagcacatcttcaccgagaccatcaacagatacctgagcttcctggacggcgccagaatcagcatcgagggcaccgtgaagctgaagaccatcgacaacgtgaacttcagcaagctgcacaccttcgaggaggtgaccgccgccgccagcaacagcgagaccgtgcaccagctggaggaggtgctgatggtgtggtacaagcagatcgagcaggtgctgatcgagagcgagcagatgagaaaggaggccggcgacagcggccccctgaccgagctggagcactggaagagaatgagcgccaagttcaactacatcatcgagcagatcaagggccccagctgcaaggccgtgatcaacgtgctgaacgtggcccacagcaagctgctgaagaactggagagacctggacgccagaatcaccgacaccgccaacgagagcaaggacaacgtgagatacctgtacaccctggagaaggtgtgccagcccctgtacaaccacgacctggtgagcatggcccacggcatccagaacctgatcaacgccatcagaatgatccacggcgtgagcagatactacaacaccagcgagagaatgaccagcctgttcatcaaggtgaccaaccagatggtgaccgcctgcaaggcctacatcaccgacggcggcctgaaccacgtgtgggaccaggagacccccgtggtgctgaagaagatccaggactgcatcttcctgttcaaggagtaccaggccagcttccacaagaccagaaagctgatcagcgagagcagcggcgagaagagcttcgaggtgagcgagatgtacatcttcggcaagttcgaggccttctgcaagagactggagaagatcaccgagatgatcaccgtggtgcagacctacagcaccctgagcaacagcaccatcgagggcatcgacatcatggccatcaagttcagaaacatctaccagggcgtgaagaagaagcagtacgacatcctggaccccagaagaaccgagttcgacaccgacttcctggacttcatgaccaagatcaacggcctggaggtgcagatccaggccttcatgaacagcagcttcggcaagatcctgagcagccagcaggccctgcagctgctgcagagattccagaagctgaacatcccctgcctgggcctggagatcaaccacaccatcgagagaatcctgcagtactacgtggccgagctggacgccaccaagaagctgtaccacagccagaaggacgacccccccctggccagaaacatgccccccatcgccggcaagatcctgtgggtgagacagctgtacagaagaatcagcgagcccatcaactacttcttcaagaacagcgacatcctgagcagccccgacggcaaggccgtgatcagacagtacaacaagatcagctacgtgctggtggagttcgaggtggtgtaccacaccgcctggatcagagagatcagccagctgcactacgccctgcaggccaccctgttcgtgagacaccccgagaccggcaagctgctggtgaacttcgaccccaagatcctggaggtggtgagagagaccaagtgcatgatcaagatgaagctggacgtgcccgagcaggccaagagactgctgaagctggagagcaagctgaaggccgacaagctgtacctgcagggcctgctgcagtactacgacgagctgtgccaggaggtgcccagcgtgttcgtgaacctgatgacccccaagatgaagaaggtggagagcgtgctgagacagggcctgaccgtgctgacctggagcagcctgaccctggagagcttcttccaggaggtggagctggtgctggacatgttcaaccagctgctgaagaagatcagcgacctgtgcgagatgcacatcgacaccgtgctgaaggagatcgccaagaccgtgctgatcagcctgcccgagagcggcgccaccaaggtggaggacatgctgaccctgaacgagacctacaccaaggagtgggccgacatcctgaaccacaagagcaagcacgtggaggaggccgtgagagagctgatcagcatcttcgagcagatctacgaggtgaagtacaccggcaaggtgggcaagcagagcgagcagagaaagcacgtggtgttcggcagcgagaccggcgagggcgagaacaacgactacgaggccaacatcgtgaacgagttcgacacccacgacaaggaggacgagttcaagaaggagtgcaaggaggtgttcgccttcttcagccaccagctgctggacagcctgcagaaggccaccagactgagcctggacaccatgaagagaagaatcttcgtggccagcctgtacggcagaaagcagagcgaggacatcatcagcttcatcaagagcgaggtgcacctggccatccccaacgtggtgatgatccccagcctggacgacatccagcaggccatcaacagaatgatccagctgaccctggaggtgagcagaggcgtggcccactggggccagcagcagatcagacccatcaagagcgtgatccccagccccaccaccaccgacgtgacccaccagaacaccggcaagctgctgaagaaggaggagagaagcttcgaggaggccatccccgccagaaagctgaagaacttctaccccggcgtggccgagcacaaggacatcagcaagctggtgctgctgctgagcagcagcgtgaacagcctgagaaaggccgcccacgaggccctgcaggacttccagaagtacaagaccctgtggaccgaggacagagacgtgaaggtgaaggagttcctggccaacaaccccagcctgaccgagatcagaagcgagatcctgcactacgccaccttcgagcaggagatcgacgagctgaagcccatcatcgtggtgggcgccctggagctgcacaccgagcccatgaagctggccctgagcatcgaggccaaggcctggaagatgctgctgtgcagatacctgaacgaggagtacaagaagaagatgagctacatgatcgccttcatcaacgagtacctgaagaagctgagcagacccatcagagacctggacgacgtgagattcgccatggaggccctgagctgcatcagagacaacgagatccagatggacatgaccctgggccccatcgaggaggcctacgccatcctgaacagattcgaggtggaggtgaccaaggaggagagcgaggccgtggacaccctgagatacagcttcaacaagctgcagagcaaggccgtgagcgtgcaggaggacctggtgcaggtgcagcccaagttcaagagcaacctgctggagagcgtggaggtgttcagagaggacgtgatcaacttcgccgaggcctacgagctggagggccccatggtgcccaacatccccccccaggaggccagcaacagactgcagatcttccaggccagcttcgacgacctgtggagaaagttcgtgacctacagcagcggcgagcagctgttcggcctgcccgtgaccgactacgaggtgctgcacaagaccagaaaggagctgaacctgctgcagaagctgtacggcctgtacgacaccgtgatgagcagcatcagcggctactacgagatcctgtggggcgacgtggacatcgagaagatcaacgccgagctgctggagttccagaacagatgcagaaagctgcccaagggcctgaaggactggcaggccttcctggacctgaagaagagaatcgacgacttcagcgagagctgccccctgctggagatgatgaccaacaaggccatgaagcagagacactgggacagaatcagcgagctgaccggcacccccttcgacgtggagagcgacagcttctgcctgagaaacatcatggaggcccccctgctgaagcacaaggacgacatcgaggacatctgcatcagcgccatcaaggagaaggacatcgaggccaagctgacccaggtgatcgagaactggaccaaccagaacctgagcttcgccgccttcaagggcaagggcgagctgctgctgaagggcaccgagagcggcgagatcatcaccctgatggaggacagcctgatggtgctgggcagcctgctgagcaacagatacaacgcccccttcaagaagaacatccagaactgggtgtacaagctgagcaccagcagcgacatcatcgaggagtggctggtggtgcagaacctgtgggtgtacctggaggccgtgttcgtgggcggcgacatcgccaagcagctgccccaggaggccaagagattccagaacatcgacaagagctggatcaagatcatgcagagagcccacgagaaccccaacgtgatcaactgctgcgtgggcgacgagaccatgggccagctgctgccccacctgcacgagcagctggaggtgtgccagaagagcctgaccggctacctggagaagaagagactgctgttccccagattcttcttcgtgagcgaccccgtgctgctggagatcctgggccaggccagcgacagccacaccatccagccccacctgcccgccgtgagcgacaacatcaacgaggtgaccttccacgccaaggactacgacagaatcatggccgtgatcagcagagagggcgagaagatcgtgctggacaacagcgtgatggccaagggccccgtggagatctggctgctggacctgctgaagatgcagatgagcagcctgcacaacatcatcagaagcgccttctaccagatcagcgacagcggcttccagctgctgcccttcctgagccacttccccgcccaggtgggcctgctgggcatccagatgctgtggacccacgacagcgaggaggccctgagaaacgccaaggacgacagaaagatcatgcaggtgaccaaccagaagttcctggacatcctgaacaccctgatcagccagaccacccacgacctgagcaagttcgacagagtgaagttcgagaccctgatcaccatccacgtgcaccagagagacatcttcgacgacctggtgaagatgcacatcaagagccccaccgacttcgagtggctgaagcagagcagattctacttcaaggaggacctggaccagaccgtggtgagcatcaccgacgtggacttcatctaccagaacgagttcctgggctgcaccgacagactggtgatcacccccctgaccgacagatgctacatcaccctggcccaggccctgggcatgaacatgggcggcgcccccgccggccccgccggcaccggcaagaccgagaccaccaaggacatgggcagatgcctgggcaagtacgtggtggtgttcaactgcagcgaccagatggacttcagaggcctgggcagaatcttcaagggcctggcccagagcggcagctggggctgcttcgacgagttcaacagaatcgagctgcccgtgctgagcgtggccgcccagcagatctacatcgtgctgaccgccagaaaggagagaaagaagcagttcatcttcagcgacggcgactgcgtggacctgaaccccgagttcggcatcttcctgaccatgaaccccggctacgccggcagacaggagctgcccgagaacctgaagatccagttcagaaccgtggccatgatggtgcccgacagacagatcatcatgagagtgaagctggccagctgcggcttcctggagaacgtgatcctggcccagaagttctacgtgctgtacaagctgtgcgaggagcagctgaccaagcaggtgcactacgacttcggcctgagaaacatcctgagcgtgctgagaaccctgggcagccagaagagagccagacccgaggacagcgagctgagcatcgtgatgagaggcctgagagacatgaacctgagcaagctggtggacgaggacgagcccctgttcctgagcctgatcaacgacctgttccccggcctgcagctggacagcaacacctacgccgagctgcagaacgccgtggcccaccaggtgcagatcgagggcctgatcaaccaccccccctggaacctgaagctggtgcagctgtacgagaccagcctggtgagacacggcctgatgaccctgggccccagcggcagcggcaagaccaccgtgatcaccatcctgatgaaggcccagaccgagtgcggcagaccccacagagagatgagaatgaaccccaaggccatcaccgccccccagatgttcggcagactggacaccgccaccaacgactggaccgacggcatcttcagcaccctgtggagaaagaccctgaaggccaagaagggcgagaacatcttcctgatcctggacggccccgtggacgccatctggatcgagaacctgaacagcgtgctggacgacaacaagaccctgaccctggccaacggcgacagaatccccatggcccccagctgcaagctgctgttcgaggtgcacaacatcgagaacgccagccccgccaccgtgagcagaatgggcatggtgtacatcagcagcagcgccctgagctggagacccatcctgcaggcctggctgaagaagagaaccgcccaggaggccgccgtgttcctgaccctgtacgagaaggtgttcgaggacacctacacctacatgaagctgaacctgaaccccaagatgcagctgctggagtgcaactacatcgtgcagagcctgaacctgctggagggcctgatccccagcaaggaggagggcggcgtgagctgcgtggagcacctgcacaagctgttcgtgttcggcctgatgtggagcctgggcgccctgctggagctggagagcagagagaagctggaggccttcctgagacagcacgagagcaagctggacctgcccgagatccccaagggcagcaaccagaccatgtacgagttctacgtgaccgactacggcgactgggagcactggaacaagaagctgcagccctactactaccccaccgacagcatccccgagtacagcagcatcctggtgcccaacgtggacaacatcagaaccaacttcctgatcgacaccatcgccaagcagcacaaggccgtgctgctgaccggcgagcagggcaccgccaagaccgtgatggtgaaggcctacctgaagaagtacgaccccgaggtgcagctgagcaagagcctgaacttcagcagcgccaccgagcccatgatgttccagagaaccatcgagagctacgtggacaagagaatcggcagcacctacggcccccccggcggcagaaagatgaccgtgttcatcgacgacatcaacatgcccgtgatcaacgagtggggcgaccagatcaccaacgagatcgtgagacagatgatggagatggagggcatgtacagcctggacaagcccggcgacttcaccaccatcgtggacgtgcagctgatcgccgccatgatccaccccggcggcggcagaaacgacatcccccagagactgaagagacagttcaccgtgttcaactgcaccctgcccagcaacgccagcatcgacaagatcttcggcatcatcggctgcggctacttcgacccctgcagaagcttcaagccccagatctgcgagatgatcgtgaacctggtgagcgtgggcagagtgctgtggcagtggaccaaggtgaagatgctgcccacccccagcaagttccactacatcttcaacctgagagacctgagcagaatctggcagggcatgctgaccatcaaggccgaggagtgcgccagcatccccaccctgctgagcctgttcaagcacgagtgcagcagagtgatcgccgacagattcatcacccccgaggacgagcagtggttcaacgcccacctgaccagagccgtggaggagaacatcggcagcgacgccgccagctgcatcctgcccgagccctacttcgtggacttcctgagagagatgcccgagcccaccggcgacgagcccgaggacagcgtgttcgaggtgcccaagatctacgagctgatgcccagcttcgacttcctggccgagaagctgcagttctaccagagacagttcaacgagatcatcagaggcaccagcctggacctggtgttcttcaaggacgccatgacccacctgatcaagatcagcagaatcatcagaaccagctgcggcaacgccctgctggtgggcgtgggcggcagcggcaagcagagcctgagcagactggccagcttcatcgccggctaccagatcttccagatcaccctgaccagaagctacaacgtgaccaacctgaccgacgacctgaaggccctgtacaaggtggccggcgccgacggcaagggcatcaccttcatcttcaccgacagcgagatcaaggacgaggccttcctggagtacctgaacaacctgctgagcagcggcgagatcagcaacctgttcgccagagacgagatggacgagatcacccagggcctgatcagcgtgatgaagagagagctgcccagacacccccccaccttcgacaacctgtacgagtacttcatcagcagaagcagaaagaacctgcacgtggtgctgtgcttcagccccgtgggcgagaagttcagagccagaagcctgaagttccccggcctgatcagcggctgcaccatggactggttcagcagatggcccagagaggccctgatcgccgtggccagctacttcctgagcgactacaacatcgtgtgcagcagcgagatcaagagacaggtggtggagaccatgggcctgttccacgacatggtgagcgagagctgcgagagctacttccagagatacagaagaagagcccacgtgacccccaagagctacctgagcttcatcaacggctacaagaacatctacgccgagaaggtgaagttcatcaacgagcaggccgagagaatgaacatcggcctggacaagctgatggaggccagcgagagcgtggccaagctgagccaggacctggccgtgaaggagaaggagctggccgtggccagcatcaaggccgacgaggtgctggccgaggtgaccgtgagcgcccaggccagcgccaagatcaagaacgaggtgcaggaggtgaaggacaaggcccagaagatcgtggacgagatcgacagcgagaaggtgaaggccgagagcaagctggaggccgccaagcccgccctggaggaggccgaggccgccctgaacaccatcaagcccaacgacatcgccaccgtgagaaagctggccaagcccccccacctgatcatgagaatcatggactgcgtgctgctgctgttccagaagaagatcgaccccgtgaccatggaccccgagaagagctgctgcaagcccagctggggcgagagcctgaagctgatgagcgccaccggcttcctgtggagcctgcagcagttccccaaggacaccatcaacgaggagaccgtggagctgctgcagccctacttcaacatggacgactacaccttcgagagcgccaagaaggtgtgcggcaacgtggccggcctgctgagctggaccctggccatggccatcttctacggcatcaacagagaggtgctgcccctgaaggccaacctggccaagcaggagggcagactggccgtggccaacgccgagctgggcaaggcccaggccctgctggacgagaagcaggccgagctggacaaggtgcaggccaagttcgacgccgccatgaacgagaagatggacctgctgaacgacgccgacacctgcagaaagaagatgcaggccgccagcaccctgatcgacggcctgagcggcgagaagatcagatggacccagcagagcaaggagttcaaggcccagatcaacagactggtgggcgacatcctgctgtgcaccggcttcctgagctacctgggccccttcaaccagatcttcagaaactacctgctgaaggaccagtgggagatggagctgagagccagaaagatccccttcaccgagaacctgaacctgatcagcatgctggtggacccccccaccatcggcgagtggggcctgcagggcctgcccggcgacgacctgagcatccagaacggcatcatcgtgaccaaggccaccagataccccctgctgatcgacccccagacccagggcaagacctggatcaagagcaaggagaaggagaacgacctgcaggtgaccagcctgaaccacaagtacttcagaacccacctggaggacagcctgagcctgggcagacccctgctgatcgaggacatccacgaggagctggaccccgccctggacaacgtgctggagaagaacttcatcaagagcggcaccaccttcaaggtgaaggtgggcgacaaggagtgcgacatcatggacaccttcaagctgtacatcaccaccaagctgcccaaccccgccttcacccccgagatcaacgccaagaccagcgtgatcgacttcaccgtgaccatgaagggcctggagaaccagctgctgagaagagtgatcctgaccgagaagcaggagctggaggccgagagagtgaagctgctggaggacgtgaccttcaacaagagaaagatgaaggagctggaggacaacctgctgtacaagctgagcgccaccaagggcagcctggtggacgacgagagcctgatcggcgtgctgagaaccaccaagcagaccgccgccgaggtgagcgagaagctgcacgtggccgccgagaccgagatcaagatcaacgccgcccaggaggagttcagacccgccgccaccagaggcagcatcctgtacttcctgatcaccgagatgagcatggtgaacatcatgtaccagaccagcctggcccagttcctgaagctgttcgaccagagcatggccagaagcgagaagagccccctgccccagaagagaatcaccaacatcatcgagtacctgacctacgaggtgttcacctacagcgtgagaggcctgtacgagaaccacaagttcctgttcgtgctgctgatgaccctgaagatcgacctgcagagaggcaccgtgaagcacagagagttccaggccctgatcaagggcggcgccgccctggacctgaaggcctgcccccccaagccctacagatggatcctggacatgacctggctgaacctggtggagctgagcaagctgccccagttcgccgagatcatgaaccagatcagcagaaacgagaagggctggaagagctggttcgacaaggacgcccccgaggaggagatcatccccgacggctacaacgacagcctggacacctgccacaagctgctgctgatcagaagctggtgccccgacagaaccgtgttccaggccagaaagtacatcgccgacagcctggaggagaagtacaccgagcccgtgatcctgaacctggagaagacctgggaggagagcgacaccagaacccccctgatctgcttcctgagcatgggcagcgaccccaccaaccagatcgacgccctggccaagaagctgaagctggagtgcagaaccatcagcatgggccagggccaggaggtgcacgccagaaagctgatccagatgagcatgcagcaggtgtgcgacaagagactgctgctgctgcagcactactgctag

SEQ ID NO: 79855 - DNA, 13461 bp, synthetic construct
  misc_feature 1..13461: note = Description of Artificial Sequence: Synthetic coding sequence
  source 1..13461: mol_type = other DNA
atgagactggccgaggagagagccgccctggccgccgagaacgccgacggcgagcccggcgccgacagaagactgagactgctgggcacctacgtggccatgagcctgagacccgccgccggcgcctgggagagatgcgccggcagcgccgaggccgagcagctgctgcaggccttcctgggcagagacgccgccgagggccccagacccctgctggtggtgagacccggccccagaggcctggccatcagacccggcctggaggtgggccccgagagcggcctggccggcgccaaggccctgttcttcctgagaaccggccccgagccccccggccccgacagcttcagaggcgccgtggtgtgcggcgacctgcccgccgcccccctggagcacctggccgccctgttcagcgaggtggtgctgcccgtgctggccaacgagaagaacagactgaactggccccacatgatctgcgaggacgtgagaagacacgcccacagcctgcagtgcgacctgagcgtgatcctggagcaggtgaagggcaagaccctgctgcccctgcccgccggcagcgagaagatggagttcgccgacagcaagagcgagaccgtgctggacagcatcgacaagagcgtgatctacgccatcgagagcgccgtgatcaagtggagctaccaggtgcaggtggtgctgaagagagagagcagccagcccctgctgcagggcgagaaccccacccccaaggtggagctggagttctggaagagcagatacgaggacctgaagtacatctacaaccagctgagaaccatcaccgtgagaggcatggccaagctgctggacaagctgcagagcagctacttccccgccttcaaggccatgtacagagacgtggtggccgccctggccgaggcccaggacatccacgtgcacctgatccccctgcagagacacctggaggccctggagaacgccgagttccccgaggtgaagccccagctgagacccctgctgcacgtggtgtgcctgatctgggccacctgcaagagctacagaagccccggcagactgaccgtgctgctgcaggagatctgcaacctgctgatccagcaggccagcaactacctgagccccgaggacctgctgagaagcgaggtggaggagagccagagaaagctgcaggtggtgagcgacaccctgagcttcttcaagcaggagttccaggacagaagagagaacctgcacacctacttcaaggagaaccaggaggtgaaggagtgggacttccagagcagcctggtgttcgtgagactggacggcttcctgggccagctgcacgtggtggagggcctgctgaagaccgccctggacttccacaagctgggcaaggtggagttcagcggcgtgagaggcaacgccctgagccagcaggtgcagcagatgcacgaggagttccaggagatgtacagactgctgagcggcagcagcagcgactgcctgtacctgcagagcaccgacttcgagaacgacgtgagcgagttcaaccagaaggtggaggacctggacagaagactgggcaccatcttcatccaggccttcgacgacgcccccggcctggagcacgccttcaagctgctggacatcgccggcaacctgctggagagacccctggtggccagagacaccagcgacaagtacctggtgctgatccagatgttcaacaaggacctggacgccgtgagaatgatctacagccagcacgtgcaggaggaggccgagctgggcttcagccccgtgcacaagaacatgcccaccgtggccggcggcctgagatgggcccaggagctgagacagagaatccagggccccttcagcaacttcggcagaatcacccacccctgcatggagagcgccgagggcaagagaatgcagcagaagtacgaggacatgctgagcctgctggagaagtacgagaccagactgtacgaggactggtgcagaaccgtgagcgagaagagccagtacaacctgagccagcccctgctgaagagagaccccgagaccaaggagatcaccatcaacttcaacccccagctgatcagcgtgctgaaggagatgagctacctggagcccagagagatgaagcacatgcccgagaccgccgccgccatgttcagcagcagagacttctacagacagctggtggccaacctggagctgatggccaactggtacaacaaggtgatgaagaccctgctggaggtggagttccccctggtggaggaggagctgcagaacatcgacctgagactgagagccgccgaggagaccctgaactggaagaccgagggcatctgcgactacgtgaccgagatcaccagcagcatccacgacctggagcagagaatccagaagaccaaggacaacgtggaggagatccagaacatcatgaagacctgggtgacccccatcttcaagaccaaggacggcaagagagagagcctgctgagcctggacgacagacacgacagaatggagaagtactacaacctgatcaaggagagcggcctgaagatccacgccctggtgcaggagaacctgggcctgttcagcgccgaccccaccagcaacatctggaagacctacgtgaacagcatcgacaacctgctgctgaacggcttcttcctggccatcgagtgcagcctgaagtacctgctggagaacaccgagtgcaaggccggcctgacccccatcttcgaggcccagctgagcctggccatccccgagctggtgttctaccccagcctggagagcggcgtgaagggcggcttctgcgacatcgtggagggcctgatcaccagcatcttcagaatccccagcctggtgcccagactgagcccccagaacggcagcccccactaccaggtggacctggacggcatccccgacctggccaacatgagaagaaccctgatggagagagtgcagagaatgatgggcctgtgctgcggctaccagagcaccttcagccagtacagctacctgtacgtggaggacagaaaggaggtgctgggccagttcctgctgtacggccacatcctgacccccgaggagatcgaggaccacgtggaggacggcatccccgagaacccccccctgctgagccagttcaaggtgcagatcgacagctacgagaccctgtacgaggaggtgtgcagactggagcccatcaaggtgttcgacggctggatgaagatcgacatcagacccttcaaggccagcctgctgaacatcatcaagagatggagcctgctgttcaagcagcacctggtggaccacgtgacccacagcctggccaacctggacgccttcatcaagaagagcgagagcggcctgctgaagaaggtggagaagggcgacttccagggcctggtggagatcatgggccacctgatggccgtgaaggagagacagagcaacaccgacgagatgttcgagcccctgaagcagaccatcgagctgctgaagacctacgagcaggagctgcccgagaccgtgttcaagcagctggaggagctgcccgagaagtggaacaacatcaagaaggtggccatcaccgtgaagcagcaggtggcccccctgcaggccaacgaggtgaccctgctgagacagagatgcaccgccttcgacgccgagcagcagcagttctgggagcagttccacaaggaggcccccttcagattcgacagcatccacccccaccagatgctggacgccagacacatcgagatccagcagatggagagcaccatggccagcatcagcgagagcgccagcctgttcgaggtgaacgtgcccgactacaagcagctgagacagtgcagaaaggaggtgtgccagctgaaggagctgtgggacaccatcggcatggtgaccagcagcatccacgcctgggagaccaccccctggagaaacatcaacgtggaggccatggagctggagtgcaagcagttcgccagacacatcagaaacctggacaaggaggtgagagcctgggacgccttcaccggcctggagagcaccgtgtggaacaccctgagcagcctgagagccgtggccgagctgcagaaccccgccatcagagagagacactggagacagctgatgcaggccaccggcgtgagcttcaccatggaccaggacaccaccctggcccacctgctgcagctgcagctgcaccactacgaggacgaggtgagaggcatcgtggacaaggccgccaaggagatgggcatggagaagaccctgaaggagctgcagaccacctgggccggcatggagttccagtacgagccccaccccagaaccaacgtgcccctgctgtgcagcgacgaggacctgatcgaggtgctggaggacaaccaggtgcagctgcagaacctggtgatgagcaagtacgtggccttcttcctggaggaggtgagcggctggcagaagaagctgagcaccgtggacgccgtgatcagcatctggttcgaggtgcagagaacctggacccacctggagagcatcttcaccggcagcgaggacatcagagcccagctgccccaggacagcaagagattcgagggcatcgacatcgacttcaaggagctggcctacgacgcccagaagatccccaacgtggtgcagaccaccaacaagcccggcctgtacgagaagctggaggacatccagggcagactgtgcctgtgcgagaaggccctggccgagtacctggacaccaagagactggccttccccagattctacttcctgagcagcagcgacctgctggacatcctgagcaacggcaccgccccccagcaggtgcagagacacctgagcaagctgttcgacaacatggccaagatgagattccagctggacgccagcggcgagcccaccaagaccagcctgggcatgtacagcaaggaggaggagtacgtggccttcagcgagccctgcgactgcagcggccaggtggagatctggctgaaccacgtgctgggccacatgaaggccaccgtgagacacgagatgaccgagggcgtgaccgcctacgaggagaagcccagagagcagtggctgttcgaccaccccgcccaggtggccctgacctgcacccagatctggtggaccaccgaggtgggcatggccttcgccagactggaggagggctacgagagcgccatgaaggactactacaagaagcaggtggcccagctgaagaccctgatcaccatgctgatcggccagctgagcaagggcgacagacagaagatcatgaccatctgcaccatcgacgtgcacgccagagacgtggtggccaagatgatcgcccagaaggtggacaacgcccaggccttcctgtggctgagccagctgagacacagatgggacgacgaggtgaagcactgcttcgccaacatctgcgacgcccagttcctgtacagctacgagtacctgggcaacacccccagactggtgatcacccccctgaccgacagatgctacatcaccctgacccagagcctgcacctgaccatgagcggcgcccccgccggccccgccggcaccggcaagaccgagaccaccaaggacctgggcagagccctgggcatcctggtgtacgtgttcaactgcagcgagcagatggactacaagagctgcggcaacatctacaagggcctggcccagaccggcgcctggggctgcttcgacgagttcaacagaatcagcgtggaggtgctgagcgtggtggccgtgcaggtgaagagcatccaggacgccatcagagacaagaagcagtggttcagcttcctgggcgaggagatcagcctgaaccccagcgtgggcatcttcatcaccatgaaccccggctacgccggcagaaccgagctgcccgagaacctgaagagcctgttcagaccctgcgccatggtggtgcccgacttcgagctgatctgcgagatcatgctggtggccgagggcttcatcgaggcccagagcctggccagaaagttcatcaccctgtaccagctgtgcaaggagctgctgagcaagcaggaccactacgactggggcctgagagccatcaagagcgtgctggtggtggccggcagcctgaagagaggcgaccccgacagacccgaggaccaggtgctgatgagaagcctgagagacttcaacatccccaagatcgtgaccgacgacatgcccatcttcatgggcctgatcggcgacctgttccccgccctggacgtgcccagaagaagagaccccaacttcgaggccctggtgagaaaggccatcgtggacctgaagctgcaggccgaggacaacttcgtgctgaaggtggtgcagctggaggagctgctggccgtgagacacagcgtgttcgtggtgggcggcgccggcaccggcaagagccaggtgctgagaagcctgcacaagacctaccagatcatgaagagaagacccgtgtggaccgacctgaaccccaaggccgtgaccaacgacgagctgttcggcatcatcaaccccgccaccggcgagtggaaggacggcctgttcagcagcatcatgagagagctggccaacatcacccacgacggccccaagtggatcctgctggacggcgacatcgaccccatgtggatcgagagcctgaacaccgtgatggacgacaacaaggtgctgaccctggccagcaacgagagaatccccctgaaccccaccatgaagctgctgttcgagatcagccacctgagaaccgccacccccgccaccgtgagcagagccggcatcctgtacatcaaccccgccgacctgggctggaacccccccgtgagcagctggatcgagaagagagagatccagaccgagagagccaacctgaccatcctgttcgacaagtacctgcccacctgcctggacaccctgagaaccagattcaagaagatcatccccatccccgagcagagcatggtgcagatggtgtgccacctgctggagtgcctgctgaccaccgaggacatccccgccgactgccccaaggagatctacgagcactacttcgtgttcgccgccatctgggccttcggcggcgccatggtgcaggaccagctggtggactacagagccgagttcagcaagtggtggctgaccgagttcaagaccgtgaagttccccagccagggcaccatcttcgactactacatcgaccccgagaccaagaagttcgagccctggagcaagctggtgccccagttcgagttcgaccccgagatgcccctgcaggcctgcctggtgcacaccagcgagaccatcagagtgtgctacttcatggagagactgatggccagacagagacccgtgatgctggtgggcaccgccggcaccggcaagagcgtgctggtgggcgccaagctggccagcctggaccccgaggcctacctggtgaagaacgtgcccttcaactactacaccaccagcgccatgctgcaggccgtgctggagaagcccctggagaagaaggccggcagaaactacggcccccccggcaacaagaagctgatctacttcatcgacgacatgaacatgcccgaggtggacgcctacggcaccgtgcagccccacaccatcatcagacagcacctggactacggccactggtacgacagaagcaagctgagcctgaaggagatcaccaacgtgcagtacgtgagctgcatgaaccccaccgccggcagcttcaccatcaaccccagactgcagagacacttcagcgtgttcgtgctgagcttccccggcgccgacgccctgagcagcatctacagcatcatcctgacccagcacctgaagctgggcaacttccccgccagcctgcagaagagcatcccccccctgatcgacctggccctggccttccaccagaagatcgccaccaccttcctgcccaccggcatcaagttccactacatcttcaacctgagagacttcgccaacatcttccagggcatcctgttcagcagcgtggagtgcgtgaagagcacctgggacctgatcagactgtacctgcacgagagcaacagagtgtacagagacaagatggtggaggagaaggacttcgacctgttcgacaagatccagaccgaggtgctgaagaagaccttcgacgacatcgaggaccccgtggagcagacccagagccccaacctgtactgccacttcgccaacggcatcggcgagcccaagtacatgcccgtgcagagctgggagctgctgacccagaccctggtggaggccctggagaaccacaacgaggtgaacaccgtgatggacctggtgctgttcgaggacgccatgagacacgtgtgccacatcaacagaatcctggagagccccagaggcaacgccctgctggtgggcgtgggcggcagcggcaagcagagcctgaccagactggccgccttcatcagcagcatggacgtgttccagatcaccctgagaaagggctaccagatccaggacttcaagatggacctggccagcctgtgcctgaaggccggcgtgaagaacctgaacaccgtgttcctgatgaccgacgcccaggtggccgacgagagattcctggtgctgatcaacgacctgctggccagcggcgagatccccgacctgtacagcgacgacgaggtggagaacatcatcagcaacgtgagaaacgaggtgaagagccagggcctggtggacaacagagagaactgctggaagttcttcatcgacagaatcagaagacagctgaaggtgaccctgtgcttcagccccgtgggcaacaagctgagagtgagaagcagaaagttccccgccatcgtgaactgcaccgccatccactggttccacgagtggccccagcaggccctggagagcgtgagcctgagattcctgcagaacaccgagggcatcgagcccaccgtgaagcagagcatcagcaagttcatggccttcgtgcacaccagcgtgaaccagaccagccagagctacctgagcaacgagcagagatacaactacaccacccccaagagcttcctggagttcatcagactgtaccagagcctgctgcacagacacagaaaggagctgaagtgcaagaccgagagactggagaacggcctgctgaagctgcacagcaccagcgcccaggtggacgacctgaaggccaagctggccgcccaggaggtggagctgaagcagaagaacgaggacgccgacaagctgatccaggtggtgggcgtggagaccgacaaggtgagcagagagaaggccatggccgacgaggaggagcagaaggtggccgtgatcatgctggaggtgaagcagaagcagaaggactgcgaggaggacctggccaaggccgagcccgccctgaccgccgcccaggccgccctgaacaccctgaacaagaccaacctgaccgagctgaagagcttcggcagcccccccctggccgtgagcaacgtgagcgccgccgtgatggtgctgatggcccccagaggcagagtgcccaaggacagaagctggaaggccgccaaggtgaccatggccaaggtggacggcttcctggacagcctgatcaacttcaacaaggagaacatccacgagaactgcctgaaggccatcagaccctacctgcaggaccccgagttcaaccccgagttcgtggccaccaagagctacgccgccgccggcctgtgcagctgggtgatcaacatcgtgagattctacgaggtgttctgcgacgtggagcccaagagacaggccctgaacaaggccaccgccgacctgaccgccgcccaggagaagctggccgccatcaaggccaagatcgcccacctgaacgagaacctggccaagctgaccgccagattcgagaaggccaccgccgacaagctgaagtgccagcaggaggccgaggtgaccgccgtgaccatcagcctggccaacagactggtgggcggcctggccagcgagaacgtgagatgggccgacgccgtgcagaacttcaagcagcaggagagaaccctgtgcggcgacatcctgctgatcaccgccttcatcagctacctgggcttcttcaccaagaagtacagacagagcctgctggacagaacctggagaccctacctgagccagctgaagacccccatccccgtgacccccgccctggaccccctgagaatgctgatggacgacgccgacgtggccgcctggcagaacgagggcctgcccgccgacagaatgagcgtggagaacgccaccatcctgatcaactgcgagagatggcccctgatggtggacccccagctgcagggcatcaagtggatcaagaacaagtacggcgaggacctgagagtgacccagatcggccagaagggctacctgcagatcatcgagcaggccctggaggccggcgccgtggtgctgatcgagaacctggaggagagcatcgaccccgtgctgggccccctgctgggcagagaggtgatcaagaagggcagattcatcaagatcggcgacaaggagtgcgagtacaaccccaagttcagactgatcctgcacaccaagctggccaacccccactaccagcccgagctgcaggcccaggccaccctgatcaacttcaccgtgaccagagacggcctggaggaccagctgctggccgccgtggtgagcatggagagacccgacctggagcagctgaagagcgacctgaccaagcagcagaacggcttcaagatcaccctgaagaccctggaggacagcctgctgagcagactgagcagcgccagcggcaacttcctgggcgagaccgtgctggtggagaacctggagatcaccaagcagaccgccgccgaggtggagaagaaggtgcaggaggccaaggtgaccgaggtgaagatcaacgaggccagagagcactacagacccgccgccgccagagccagcctgctgtacttcatcatgaacgacctgagcaagatccaccccatgtaccagttcagcctgaaggccttcagcatcgtgttccagaaggccgtggagagagccgcccccgacgagagcctgagagagagagtggccaacctgatcgacagcatcaccttcagcgtgtaccagtacaccatcagaggcctgttcgagtgcgacaagctgacctacctggcccagctgaccttccagatcctgctgatgaacagagaggtgaacgccgtggagctggacttcctgctgagaagccccgtgcagaccggcaccgccagccccgtggagttcctgagccaccaggcctggggcgccgtgaaggtgctgagcagcatggaggagttcagcaacctggacagagacatcgagggcagcgccaagagctggaagaagttcgtggagagcgagtgccccgagaaggagaagctgccccaggagtggaagaacaagaccgccctgcagagactgtgcatgctgagagccatgagacccgacagaatgacctacgccctgagagacttcgtggaggagaagctgggcagcaagtacgtggtgggcagagccctggacttcgccaccagcttcgaggagagcggccccgccacccccatgttcttcatcctgagccccggcgtggaccccctgaaggacgtggagagccagggcagaaagctgggctacaccttcaacaaccagaacttccacaacgtgagcctgggccagggccaggaggtggtggccgaggccgccctggacctggccgccaagaagggccactgggtgatcctgcagaacatccacctggtggccaagtggctgagcaccctggagaagaagctggaggagcacagcgagaacagccaccccgagttcagagtgttcatgagcgccgagcccgcccccagccccgagggccacatcatcccccagggcatcctggagaacagcatcaagatcaccaacgagccccccaccggcatgcacgccaacctgcacaaggccctggacaacttcacccaggacaccctggagatgtgcagcagagagaccgagttcaagagcatcctgttcgccctgtgctacttccacgccgtggtggccgagagaagaaagttcggcccccagggctggaacagaagctaccccttcaacaccggcgacctgaccatcagcgtgaacgtgctgtacaacttcctggaggccaacgccaaggtgccctacgacgacctgagatacctgttcggcgagatcatgtacggcggccacatcaccgacgactgggacagaagactgtgcagaacctacctgggcgagttcatcagacccgagatgctggagggcgagctgagcctggcccccggcttccccctgcccggcaacatggactacaacggctaccaccagtacatcgacgccgagctgccccccgagagcccctacctgtacggcctgcaccccaacgccgagatcggcttcctgacccagaccagcgagaagctgttcagaaccgtgctggagctgcagcccagagacagccaggccagagacggcgccggcgccaccagagaggagaaggtgaaggccctgctggaggagatcctggagagagtgaccgacgagttcaacatccccgagctgatggccaaggtggaggagagaaccccctacatcgtggtggccttccaggagtgcggcagaatgaacatcctgaccagagagatccagagaagcctgagagagctggagctgggcctgaagggcgagctgaccatgaccagccacatggagaacctgcagaacgccctgtacttcgacatggtgcccgagagctgggccagaagagcctaccccagcaccgccggcctggccgcctggttccccgacctgctgaacagaatcaaggagctggaggcctggaccggcgacttcaccatgcccagcaccgtgtggctgaccggcttcttcaacccccagagcttcctgaccgccatcatgcagagcaccgccagaaagaacgagtggcccctggaccagatggccctgcagtgcgacatgaccaagaagaacagagaggagttcagaagcccccccagagagggcgcctacatccacggcctgttcatggagggcgcctgctgggacacccaggccggcatcatcaccgaggccaagctgaaggacctgaccccccccatgcccgtgatgttcatcaaggccatccccgccgacaagcaggactgcagaagcgtgtacagctgccccgtgtacaagaccagccagagaggccccacctacgtgtggaccttcaacctgaagaccaaggagaaccccagcaagtgggtgctggccggcgtggccctgctgctgcagatctag

SEQ ID NO: 79856 - DNA, 1002 bp, synthetic construct
  misc_feature 1..1002: note = Description of Artificial Sequence: Synthetic coding sequence
  source 1..1002: mol_type = other DNA
atgaaggacttcgtgctgggcagagacaaggtgcaggaggccaaggtgaccgaggtgaagatcaacgaggccagagagcactacagacccgccgccgccagagccagcctgctgtacttcatcatgaacgacctgagcaagatccaccccatgtaccagttcagcctgaaggccttcagcatcgtgttccagaaggccgtggagagagccgcccccgacgagagcctgagagagagagtggccaacctgatcgacagcatcaccttcagcgtgtaccagtacaccatcagaggcctgttcgagtgcgacaagctgacctacctggcccagctgaccttccagatcctgctgatgaacagagaggtgaacgccgtggagctggacttcctgctgagaagccccgtgcagaccggcaccgccagccccgtggagttcctgagccaccaggcctggggcgccgtgaaggtgctgagcagcatggaggagttcagcaacctggacagagacatcgagggcagcgccaagagctggaagaagttcgtggagagcgagtgccccgagaaggagaagctgccccaggagtggaagaacaagaccgccctgcagagactgtgcatgctgagagccatgagacccgacagaatgacctacgccctgagagacttcgtggaggagaagctgggcagcaagtacgtggtgggcagagccctggacttcgccaccagcttcgaggagagcggccccgccacccccatgttcttcatcctgagccccggcgtggaccccctgaaggacgtggagagccagggcagaaagctgggctacaccttcaacaaccagaacttccacaacgtgagcctgggccagggccaggaggtggtggccgaggccgccctggacctggccgccaagaagggccactgggtgatcctgcaggtgaagagatgcagcttcttcaccttctaccaccccgcccactgcctggagcacagcagacactag

SEQ ID NO: 79857 - DNA, 2397 bp, synthetic construct
  misc_feature 1..2397: note = Description of Artificial Sequence: Synthetic coding sequence
  source 1..2397: mol_type = other DNA
atgaacgacctgagcaagatccaccccatgtaccagttcagcctgaaggccttcagcatcgtgttccagaaggccgtggagagagccgcccccgacgagagcctgagagagagagtggccaacctgatcgacagcatcaccttcagcgtgtaccagtacaccatcagaggcctgttcgagtgcgacaagctgacctacctggcccagctgaccttccagatcctgctgatgaacagagaggtgaacgccgtggagctggacttcctgctgagaagccccgtgcagaccggcaccgccagccccgtggagttcctgagccaccaggcctggggcgccgtgaaggtgctgagcagcatggaggagttcagcaacctggacagagacatcgagggcagcgccaagagctggaagaagttcgtggagagcgagtgccccgagaaggagaagctgccccaggagtggaagaacaagaccgccctgcagagactgtgcatgctgagagccatgagacccgacagaatgacctacgccctgagagacttcgtggaggagaagctgggcagcaagtacgtggtgggcagagccctggacttcgccaccagcttcgaggagagcggccccgccacccccatgttcttcatcctgagccccggcgtggaccccctgaaggacgtggagagccagggcagaaagctgggctacaccttcaacaaccagaacttccacaacgtgagcctgggccagggccaggaggtggtggccgaggccgccctggacctggccgccaagaagggccactgggtgatcctgcagaacatccacctggtggccaagtggctgagcaccctggagaagaagctggaggagcacagcgagaacagccaccccgagttcagagtgttcatgagcgccgagcccgcccccagccccgagggccacatcatcccccagggcatcctggagaacagcatcaagatcaccaacgagccccccaccggcatgcacgccaacctgcacaaggccctggacaacttcacccaggacaccctggagatgtgcagcagagagaccgagttcaagagcatcctgttcgccctgtgctacttccacgccgtggtggccgagagaagaaagttcggcccccagggctggaacagaagctaccccttcaacaccggcgacctgaccatcagcgtgaacgtgctgtacaacttcctggaggccaacgccaaggtgccctacgacgacctgagatacctgttcggcgagatcatgtacggcggccacatcaccgacgactgggacagaagactgtgcagaacctacctgggcgagttcatcagacccgagatgctggagggcgagctgagcctggcccccggcttccccctgcccggcaacatggactacaacggctaccaccagtacatcgacgccgagctgccccccgagagcccctacctgtacggcctgcaccccaacgccgagatcggcttcctgacccagaccagcgagaagctgttcagaaccgtgctggagctgcagcccagagacagccaggccagagacggcgccggcgccaccagagaggagaaggtgaaggccctgctggaggagatcctggagagagtgaccgacgagttcaacatccccgagctgatggccaaggtggaggagagaaccccctacatcgtggtggccttccaggagtgcggcagaatgaacatcctgaccagagagatccagagaagcctgagagagctggagctgggcctgaagggcgagctgaccatgaccagccacatggagaacctgcagaacgccctgtacttcgacatggtgcccgagagctgggccagaagagcctaccccagcaccgccggcctggccgcctggttccccgacctgctgaacagaatcaaggagctggaggcctggaccggcgacttcaccatgcccagcaccgtgtggctgaccggcttcttcaacccccagagcttcctgaccgccatcatgcagagcaccgccagaaagaacgagtggcccctggaccagatggccctgcagtgcgacatgaccaagaagaacagagaggagttcagaagcccccccagagagggcgcctacatccacggcctgttcatggagggcgcctgctgggacacccaggccggcatcatcaccgaggccaagctgaaggacctgaccccccccatgcccgtgatgttcatcaaggccatccccgccgacaagcaggactgcagaagcgtgtacagctgccccgtgtacaagaccagccagagaggccccacctacgtgtggaccttcaacctgaagaccaaggagaaccccagcaagtgggtgctggccggcgtggccctgctgctgcagatctag

SEQ ID NO: 79858 - DNA, 8979 bp, synthetic construct
  misc_feature 1..8979: note = Description of Artificial Sequence: Synthetic coding sequence
  source 1..8979: mol_type = other DNA
gaggtgagaggcatcgtggacaaggccgccaaggagatgggcatggagaagaccctgaaggagctgcagaccacctgggccggcatggagttccagtacgagccccaccccagaaccaacgtgcccctgctgtgcagcgacgaggacctgatcgaggtgctggaggacaaccaggtgcagctgcagaacctggtgatgagcaagtacgtggccttcttcctggaggaggtgagcggctggcagaagaagctgagcaccgtggacgccgtgatcagcatctggttcgaggtgcagagaacctggacccacctggagagcatcttcaccggcagcgaggacatcagagcccagctgccccaggacagcaagagattcgagggcatcgacatcgacttcaaggagctggcctacgacgcccagaagatccccaacgtggtgcagaccaccaacaagcccggcctgtacgagaagctggaggacatccagggcagactgtgcctgtgcgagaaggccctggccgagtacctggacaccaagagactggccttccccagattctacttcctgagcagcagcgacctgctggacatcctgagcaacggcaccgccccccagcaggtgcagagacacctgagcaagctgttcgacaacatggccaagatgagattccagctggacgccagcggcgagcccaccaagaccagcctgggcatgtacagcaaggaggaggagtacgtggccttcagcgagccctgcgactgcagcggccaggtggagatctggctgaaccacgtgctgggccacatgaaggccaccgtgagacacgagatgaccgagggcgtgaccgcctacgaggagaagcccagagagcagtggctgttcgaccaccccgcccaggtggccctgacctgcacccagatctggtggaccaccgaggtgggcatggccttcgccagactggaggagggctacgagagcgccatgaaggactactacaagaagcaggtggcccagctgaagaccctgatcaccatgctgatcggccagctgagcaagggcgacagacagaagatcatgaccatctgcaccatcgacgtgcacgccagagacgtggtggccaagatgatcgcccagaaggtggacaacgcccaggccttcctgtggctgagccagctgagacacagatgggacgacgaggtgaagcactgcttcgccaacatctgcgacgcccagttcctgtacagctacgagtacctgggcaacacccccagactggtgatcacccccctgaccgacagatgctacatcaccctgacccagagcctgcacctgaccatgagcggcgcccccgccggccccgccggcaccggcaagaccgagaccaccaaggacctgggcagagccctgggcatcctggtgtacgtgttcaactgcagcgagcagatggactacaagagctgcggcaacatctacaagggcctggcccagaccggcgcctggggctgcttcgacgagttcaacagaatcagcgtggaggtgctgagcgtggtggccgtgcaggtgaagagcatccaggacgccatcagagacaagaagcagtggttcagcttcctgggcgaggagatcagcctgaaccccagcgtgggcatcttcatcaccatgaaccccggctacgccggcagaaccgagctgcccgagaacctgaagagcctgttcagaccctgcgccatggtggtgcccgacttcgagctgatctgcgagatcatgctggtggccgagggcttcatcgaggcccagagcctggccagaaagttcatcaccctgtaccagctgtgcaaggagctgctgagcaagcaggaccactacgactggggcctgagagccatcaagagcgtgctggtggtggccggcagcctgaagagaggcgaccccgacagacccgaggaccaggtgctgatgagaagcctgagagacttcaacatccccaagatcgtgaccgacgacatgcccatcttcatgggcctgatcggcgacctgttccccgccctggacgtgcccagaagaagagaccccaacttcgaggccctggtgagaaaggccatcgtggacctgaagctgcaggccgaggacaacttcgtgctgaaggtggtgcagctggaggagctgctggccgtgagacacagcgtgttcgtggtgggcggcgccggcaccggcaagagccaggtgctgagaagcctgcacaagacctaccagatcatgaagagaagacccgtgtggaccgacctgaaccccaaggccgtgaccaacgacgagctgttcggcatcatcaaccccgccaccggcgagtggaaggacggcctgttcagcagcatcatgagagagctggccaacatcacccacgacggccccaagtggatcctgctggacggcgacatcgaccccatgtggatcgagagcctgaacaccgtgatggacgacaacaaggtgctgaccctggccagcaacgagagaatccccctgaaccccaccatgaagctgctgttcgagatcagccacctgagaaccgccacccccgccaccgtgagcagagccggcatcctgtacatcaaccccgccgacctgggctggaacccccccgtgagcagctggatcgagaagagagagatccagaccgagagagccaacctgaccatcctgttcgacaagtacctgcccacctgcctggacaccctgagaaccagattcaagaagatcatccccatccccgagcagagcatggtgcagatggtgtgccacctgctggagtgcctgctgaccaccgaggacatccccgccgactgccccaaggagatctacgagcactacttcgtgttcgccgccatctgggccttcggcggcgccatggtgcaggaccagctggtggactacagagccgagttcagcaagtggtggctgaccgagttcaagaccgtgaagttccccagccagggcaccatcttcgactactacatcgaccccgagaccaagaagttcgagccctggagcaagctggtgccccagttcgagttcgaccccgagatgcccctgcaggcctgcctggtgcacaccagcgagaccatcagagtgtgctacttcatggagagactgatggccagacagagacccgtgatgctggtgggcaccgccggcaccggcaagagcgtgctggtgggcgccaagctggccagcctggaccccgaggcctacctggtgaagaacgtgcccttcaactactacaccaccagcgccatgctgcaggccgtgctggagaagcccctggagaagaaggccggcagaaactacggcccccccggcaacaagaagctgatctacttcatcgacgacatgaacatgcccgaggtggacgcctacggcaccgtgcagccccacaccatcatcagacagcacctggactacggccactggtacgacagaagcaagctgagcctgaaggagatcaccaacgtgcagtacgtgagctgcatgaaccccaccgccggcagcttcaccatcaaccccagactgcagagacacttcagcgtgttcgtgctgagcttccccggcgccgacgccctgagcagcatctacagcatcatcctgacccagcacctgaagctgggcaacttccccgccagcctgcagaagagcatcccccccctgatcgacctggccctggccttccaccagaagatcgccaccaccttcctgcccaccggcatcaagttccactacatcttcaacctgagagacttcgccaacatcttccagggcatcctgttcagcagcgtggagtgcgtgaagagcacctgggacctgatcagactgtacctgcacgagagcaacagagtgtacagagacaagatggtggaggagaaggacttcgacctgttcgacaagatccagaccgaggtgctgaagaagaccttcgacgacatcgaggaccccgtggagcagacccagagccccaacctgtactgccacttcgccaacggcatcggcgagcccaagtacatgcccgtgcagagctgggagctgctgacccagaccctggtggaggccctggagaaccacaacgaggtgaacaccgtgatggacctggtgctgttcgaggacgccatgagacacgtgtgccacatcaacagaatcctggagagccccagaggcaacgccctgctggtgggcgtgggcggcagcggcaagcagagcctgaccagactggccgccttcatcagcagcatggacgtgttccagatcaccctgagaaagggctaccagatccaggacttcaagatggacctggccagcctgtgcctgaaggccggcgtgaagaacctgaacaccgtgttcctgatgaccgacgcccaggtggccgacgagagattcctggtgctgatcaacgacctgctggccagcggcgagatccccgacctgtacagcgacgacgaggtggagaacatcatcagcaacgtgagaaacgaggtgaagagccagggcctggtggacaacagagagaactgctggaagttcttcatcgacagaatcagaagacagctgaaggtgaccctgtgcttcagccccgtgggcaacaagctgagagtgagaagcagaaagttccccgccatcgtgaactgcaccgccatccactggttccacgagtggccccagcaggccctggagagcgtgagcctgagattcctgcagaacaccgagggcatcgagcccaccgtgaagcagagcatcagcaagttcatggccttcgtgcacaccagcgtgaaccagaccagccagagctacctgagcaacgagcagagatacaactacaccacccccaagagcttcctggagttcatcagactgtaccagagcctgctgcacagacacagaaaggagctgaagtgcaagaccgagagactggagaacggcctgctgaagctgcacagcaccagcgcccaggtggacgacctgaaggccaagctggccgcccaggaggtggagctgaagcagaagaacgaggacgccgacaagctgatccaggtggtgggcgtggagaccgacaaggtgagcagagagaaggccatggccgacgaggaggagcagaaggtggccgtgatcatgctggaggtgaagcagaagcagaaggactgcgaggaggacctggccaaggccgagcccgccctgaccgccgcccaggccgccctgaacaccctgaacaagaccaacctgaccgagctgaagagcttcggcagcccccccctggccgtgagcaacgtgagcgccgccgtgatggtgctgatggcccccagaggcagagtgcccaaggacagaagctggaaggccgccaaggtgaccatggccaaggtggacggcttcctggacagcctgatcaacttcaacaaggagaacatccacgagaactgcctgaaggccatcagaccctacctgcaggaccccgagttcaaccccgagttcgtggccaccaagagctacgccgccgccggcctgtgcagctgggtgatcaacatcgtgagattctacgaggtgttctgcgacgtggagcccaagagacaggccctgaacaaggccaccgccgacctgaccgccgcccaggagaagctggccgccatcaaggccaagatcgcccacctgaacgagaacctggccaagctgaccgccagattcgagaaggccaccgccgacaagctgaagtgccagcaggaggccgaggtgaccgccgtgaccatcagcctggccaacagactggtgggcggcctggccagcgagaacgtgagatgggccgacgccgtgcagaacttcaagcagcaggagagaaccctgtgcggcgacatcctgctgatcaccgccttcatcagctacctgggcttcttcaccaagaagtacagacagagcctgctggacagaacctggagaccctacctgagccagctgaagacccccatccccgtgacccccgccctggaccccctgagaatgctgatggacgacgccgacgtggccgcctggcagaacgagggcctgcccgccgacagaatgagcgtggagaacgccaccatcctgatcaactgcgagagatggcccctgatggtggacccccagctgcagggcatcaagtggatcaagaacaagtacggcgaggacctgagagtgacccagatcggccagaagggctacctgcagatcatcgagcaggccctggaggccggcgccgtggtgctgatcgagaacctggaggagagcatcgaccccgtgctgggccccctgctgggcagagaggtgatcaagaagggcagattcatcaagatcggcgacaaggagtgcgagtacaaccccaagttcagactgatcctgcacaccaagctggccaacccccactaccagcccgagctgcaggcccaggccaccctgatcaacttcaccgtgaccagagacggcctggaggaccagctgctggccgccgtggtgagcatggagagacccgacctggagcagctgaagagcgacctgaccaagcagcagaacggcttcaagatcaccctgaagaccctggaggacagcctgctgagcagactgagcagcgccagcggcaacttcctgggcgagaccgtgctggtggagaacctggagatcaccaagcagaccgccgccgaggtggagaagaaggtgcaggaggccaaggtgaccgaggtgaagatcaacgaggccagagagcactacagacccgccgccgccagagccagcctgctgtacttcatcatgaacgacctgagcaagatccaccccatgtaccagttcagcctgaaggccttcagcatcgtgttccagaaggccgtggagagagccgcccccgacgagagcctgagagagagagtggccaacctgatcgacagcatcaccttcagcgtgtaccagtacaccatcagaggcctgttcgagtgcgacaagctgacctacctggcccagctgaccttccagatcctgctgatgaacagagaggtgaacgccgtggagctggacttcctgctgagaagccccgtgcagaccggcaccgccagccccgtggagttcctgagccaccaggcctggggcgccgtgaaggtgctgagcagcatggaggagttcagcaacctggacagagacatcgagggcagcgccaagagctggaagaagttcgtggagagcgagtgccccgagaaggagaagctgccccaggagtggaagaacaagaccgccctgcagagactgtgcatgctgagagccatgagacccgacagaatgacctacgccctgagagacttcgtggaggagaagctgggcagcaagtacgtggtgggcagagccctggacttcgccaccagcttcgaggagagcggccccgccacccccatgttcttcatcctgagccccggcgtggaccccctgaaggacgtggagagccagggcagaaagctgggctacaccttcaacaaccagaacttccacaacgtgagcctgggccagggccaggaggtggtggccgaggccgccctggacctggccgccaagaagggccactgggtgatcctgcaggacaccctggagatgtgcagcagagagaccgagttcaagagcatcctgttcgccctgtgctacttccacgccgtggtggccgagagaagaaagttcggcccccagggctggaacagaagctaccccttcaacaccggcgacctgaccatcagcgtgaacgtgctgtacaacttcctggaggccaacgccaaggtgccctacgacgacctgagatacctgttcggcgagatcatgtacggcggccacatcaccgacgactgggacagaagactgtgcagaacctacctgggcgagttcatcagacccgagatgctggagggcgagctgagcctggcccccggcttccccctgcccggcaacatggactacaacggctaccaccagtacatcgacgccgagctgccccccgagagcccctacctgtacggcctgcaccccaacgccgagatcggcttcctgacccagaccagcgagaagctgttcagaaccgtgctggagctgcagcccagagacagccaggccagagacggcgccggcgccaccagagaggagaaggtgaaggccctgctggaggagatcctggagagagtgaccgacgagttcaacatccccgagctgatggccaaggtggaggagagaaccccctacatcgtggtggccttccaggagtgcggcagaatgaacatcctgaccagagagatccagagaagcctgagagagctggagctgggcctgaagggcgagctgaccatgaccagccacatggagaacctgcagaacgccctgtacttcgacatggtgcccgagagctgggccagaagagcctaccccagcaccgccggcctggccgcctggttccccgacctgctgaacagaatcaaggagctggaggcctggaccggcgacttcaccatgcccagcaccgtgtggctgaccggcttcttcaacccccagagcttcctgaccgccatcatgcagagcaccgccagaaagaacgagtggcccctggaccagatggccctgcagtgcgacatgaccaagaagaacagagaggagttcagaagcccccccagagagggcgcctacatccacggcctgttcatggagggcgcctgctgggacacccaggccggcatcatcaccgaggccaagctgaaggacctgaccccccccatgcccgtgatgttcatcaaggccatccccgccgacaagcaggactgcagaagcgtgtacagctgccccgtgtacaagaccagccagagaggccccacctacgtgtggaccttcaacctgaagaccaaggagaaccccagcaagtgggtgctggccggcgtggccctgctgctgcagatctag

SEQ ID NO: 79859 - DNA, 13233 bp, synthetic construct
  misc_feature 1..13233: note = Description of Artificial Sequence: Synthetic coding sequence
  source 1..13233: mol_type = other DNA
atgagactggccgaggagagagccgccctggccgccgagaacgccgacggcgagcccggcgccgacagaagactgagactgctgggcacctacgtggccatgagcctgagacccgccgccggcgcctgggagagatgcgccggcagcgccgaggccgagcagctgctgcaggccttcctgggcagagacgccgccgagggccccagacccctgctggtggtgagacccggccccagaggcctggccatcagacccggcctggaggtgggccccgagagcggcctggccggcgccaaggccctgttcttcctgagaaccggccccgagccccccggccccgacagcttcagaggcgccgtggtgtgcggcgacctgcccgccgcccccctggagcacctggccgccctgttcagcgaggtggtgctgcccgtgctggccaacgagaagaacagactgaactggccccacatgatctgcgaggacgtgagaagacacgcccacagcctgcagtgcgacctgagcgtgatcctggagcaggtgaagggcaagaccctgctgcccctgcccgccggcagcgagaagatggagttcgccgacagcaagagcgagaccgtgctggacagcatcgacaagagcgtgatctacgccatcgagagcgccgtgatcaagtggagctaccaggtgcaggtggtgctgaagagagagagcagccagcccctgctgcagggcgagaaccccacccccaaggtggagctggagttctggaagagcagatacgaggacctgaagtacatctacaaccagctgagaaccatcaccgtgagaggcatggccaagctgctggacaagctgcagagcagctacttccccgccttcaaggccatgtacagagacgtggtggccgccctggccgaggcccaggacatccacgtgcacctgatccccctgcagagacacctggaggccctggagaacgccgagttccccgaggtgaagccccagctgagacccctgctgcacgtggtgtgcctgatctgggccacctgcaagagctacagaagccccggcagactgaccgtgctgctgcaggagatctgcaacctgctgatccagcaggccagcaactacctgagccccgaggacctgctgagaagcgaggtggaggagagccagagaaagctgcaggtggtgagcgacaccctgagcttcttcaagcaggagttccaggacagaagagagaacctgcacacctacttcaaggagaaccaggaggtgaaggagtgggacttccagagcagcctggtgttcgtgagactggacggcttcctgggccagctgcacgtggtggagggcctgctgaagaccgccctggacttccacaagctgggcaaggtggagttcagcggcgtgagaggcaacgccctgagccagcaggtgcagcagatgcacgaggagttccaggagatgtacagactgctgagcggcagcagcagcgactgcctgtacctgcagagcaccgacttcgagaacgacgtgagcgagttcaaccagaaggtggaggacctggacagaagactgggcaccatcttcatccaggccttcgacgacgcccccggcctggagcacgccttcaagctgctggacatcgccggcaacctgctggagagacccctggtggccagagacaccagcgacaagtacctggtgctgatccagatgttcaacaaggacctggacgccgtgagaatgatctacagccagcacgtgcaggaggaggccgagctgggcttcagccccgtgcacaagaacatgcccaccgtggccggcggcctgagatgggcccaggagctgagacagagaatccagggccccttcagcaacttcggcagaatcacccacccctgcatggagagcgccgagggcaagagaatgcagcagaagtacgaggacatgctgagcctgctggagaagtacgagaccagactgtacgaggactggtgcagaaccgtgagcgagaagagccagtacaacctgagccagcccctgctgaagagagaccccgagaccaaggagatcaccatcaacttcaacccccagctgatcagcgtgctgaaggagatgagctacctggagcccagagagatgaagcacatgcccgagaccgccgccgccatgttcagcagcagagacttctacagacagctggtggccaacctggagctgatggccaactggtacaacaaggtgatgaagaccctgctggaggtggagttccccctggtggaggaggagctgcagaacatcgacctgagactgagagccgccgaggagaccctgaactggaagaccgagggcatctgcgactacgtgaccgagatcaccagcagcatccacgacctggagcagagaatccagaagaccaaggacaacgtggaggagatccagaacatcatgaagacctgggtgacccccatcttcaagaccaaggacggcaagagagagagcctgctgagcctggacgacagacacgacagaatggagaagtactacaacctgatcaaggagagcggcctgaagatccacgccctggtgcaggagaacctgggcctgttcagcgccgaccccaccagcaacatctggaagacctacgtgaacagcatcgacaacctgctgctgaacggcttcttcctggccatcgagtgcagcctgaagtacctgctggagaacaccgagtgcaaggccggcctgacccccatcttcgaggcccagctgagcctggccatccccgagctggtgttctaccccagcctggagagcggcgtgaagggcggcttctgcgacatcgtggagggcctgatcaccagcatcttcagaatccccagcctggtgcccagactgagcccccagaacggcagcccccactaccaggtggacctggacggcatccccgacctggccaacatgagaagaaccctgatggagagagtgcagagaatgatgggcctgtgctgcggctaccagagcaccttcagccagtacagctacctgtacgtggaggacagaaaggaggtgctgggccagttcctgctgtacggccacatcctgacccccgaggagatcgaggaccacgtggaggacggcatccccgagaacccccccctgctgagccagttcaaggtgcagatcgacagctacgagaccctgtacgaggaggtgtgcagactggagcccatcaaggtgttcgacggctggatgaagatcgacatcagacccttcaaggccagcctgctgaacatcatcaagagatggagcctgctgttcaagcagcacctggtggaccacgtgacccacagcctggccaacctggacgccttcatcaagaagagcgagagcggcctgctgaagaaggtggagaagggcgacttccagggcctggtggagatcatgggccacctgatggccgtgaaggagagacagagcaacaccgacgagatgttcgagcccctgaagcagaccatcgagctgctgaagacctacgagcaggagctgcccgagaccgtgttcaagcagctggaggagctgcccgagaagtggaacaacatcaagaaggtggccatcaccgtgaagcagcaggtggcccccctgcaggccaacgaggtgaccctgctgagacagagatgcaccgccttcgacgccgagcagcagcagttctgggagcagttccacaaggaggcccccttcagattcgacagcatccacccccaccagatgctggacgccagacacatcgagatccagcagatggagagcaccatggccagcatcagcgagagcgccagcctgttcgaggtgaacgtgcccgactacaagcagctgagacagtgcagaaaggaggtgtgccagctgaaggagctgtgggacaccatcggcatggtgaccagcagcatccacgcctgggagaccaccccctggagaaacatcaacgtggaggccatggagctggagtgcaagcagttcgccagacacatcagaaacctggacaaggaggtgagagcctgggacgccttcaccggcctggagagcaccgtgtggaacaccctgagcagcctgagagccgtggccgagctgcagaaccccgccatcagagagagacactggagacagctgatgcaggccaccggcgtgagcttcaccatggaccaggacaccaccctggcccacctgctgcagctgcagctgcaccactacgaggacgaggtgagaggcatcgtggacaaggccgccaaggagatgggcatggagaagaccctgaaggagctgcagaccacctgggccggcatggagttccagtacgagccccaccccagaaccaacgtgcccctgctgtgcagcgacgaggacctgatcgaggtgctggaggacaaccaggtgcagctgcagaacctggtgatgagcaagtacgtggccttcttcctggaggaggtgagcggctggcagaagaagctgagcaccgtggacgccgtgatcagcatctggttcgaggtgcagagaacctggacccacctggagagcatcttcaccggcagcgaggacatcagagcccagctgccccaggacagcaagagattcgagggcatcgacatcgacttcaaggagctggcctacgacgcccagaagatccccaacgtggtgcagaccaccaacaagcccggcctgtacgagaagctggaggacatccagggcagactgtgcctgtgcgagaaggccctggccgagtacctggacaccaagagactggccttccccagattctacttcctgagcagcagcgacctgctggacatcctgagcaacggcaccgccccccagcaggtgcagagacacctgagcaagctgttcgacaacatggccaagatgagattccagctggacgccagcggcgagcccaccaagaccagcctgggcatgtacagcaaggaggaggagtacgtggccttcagcgagccctgcgactgcagcggccaggtggagatctggctgaaccacgtgctgggccacatgaaggccaccgtgagacacgagatgaccgagggcgtgaccgcctacgaggagaagcccagagagcagtggctgttcgaccaccccgcccaggtggccctgacctgcacccagatctggtggaccaccgaggtgggcatggccttcgccagactggaggagggctacgagagcgccatgaaggactactacaagaagcaggtggcccagctgaagaccctgatcaccatgctgatcggccagctgagcaagggcgacagacagaagatcatgaccatctgcaccatcgacgtgcacgccagagacgtggtggccaagatgatcgcccagaaggtggacaacgcccaggccttcctgtggctgagccagctgagacacagatgggacgacgaggtgaagcactgcttcgccaacatctgcgacgcccagttcctgtacagctacgagtacctgggcaacacccccagactggtgatcacccccctgaccgacagatgctacatcaccctgacccagagcctgcacctgaccatgagcggcgcccccgccggccccgccggcaccggcaagaccgagaccaccaaggacctgggcagagccctgggcatcctggtgtacgtgttcaactgcagcgagcagatggactacaagagctgcggcaacatctacaagggcctggcccagaccggcgcctggggctgcttcgacgagttcaacagaatcagcgtggaggtgctgagcgtggtggccgtgcaggtgaagagcatccaggacgccatcagagacaagaagcagtggttcagcttcctgggcgaggagatcagcctgaaccccagcgtgggcatcttcatcaccatgaaccccggctacgccggcagaaccgagctgcccgagaacctgaagagcctgttcagaccctgcgccatggtggtgcccgacttcgagctgatctgcgagatcatgctggtggccgagggcttcatcgaggcccagagcctggccagaaagttcatcaccctgtaccagctgtgcaaggagctgctgagcaagcaggaccactacgactggggcctgagagccatcaagagcgtgctggtggtggccggcagcctgaagagaggcgaccccgacagacccgaggaccaggtgctgatgagaagcctgagagacttcaacatccccaagatcgtgaccgacgacatgcccatcttcatgggcctgatcggcgacctgttccccgccctggacgtgcccagaagaagagaccccaacttcgaggccctggtgagaaaggccatcgtggacctgaagctgcaggccgaggacaacttcgtgctgaaggtggtgcagctggaggagctgctggccgtgagacacagcgtgttcgtggtgggcggcgccggcaccggcaagagccaggtgctgagaagcctgcacaagacctaccagatcatgaagagaagacccgtgtggaccgacctgaaccccaaggccgtgaccaacgacgagctgttcggcatcatcaaccccgccaccggcgagtggaaggacggcctgttcagcagcatcatgagagagctggccaacatcacccacgacggccccaagtggatcctgctggacggcgacatcgaccccatgtggatcgagagcctgaacaccgtgatggacgacaacaaggtgctgaccctggccagcaacgagagaatccccctgaaccccaccatgaagctgctgttcgagatcagccacctgagaaccgccacccccgccaccgtgagcagagccggcatcctgtacatcaaccccgccgacctgggctggaacccccccgtgagcagctggatcgagaagagagagatccagaccgagagagccaacctgaccatcctgttcgacaagtacctgcccacctgcctggacaccctgagaaccagattcaagaagatcatccccatccccgagcagagcatggtgcagatggtgtgccacctgctggagtgcctgctgaccaccgaggacatccccgccgactgccccaaggagatctacgagcactacttcgtgttcgccgccatctgggccttcggcggcgccatggtgcaggaccagctggtggactacagagccgagttcagcaagtggtggctgaccgagttcaagaccgtgaagttccccagccagggcaccatcttcgactactacatcgaccccgagaccaagaagttcgagccctggagcaagctggtgccccagttcgagttcgaccccgagatgcccctgcaggcctgcctggtgcacaccagcgagaccatcagagtgtgctacttcatggagagactgatggccagacagagacccgtgatgctggtgggcaccgccggcaccggcaagagcgtgctggtgggcgccaagctggccagcctggaccccgaggcctacctggtgaagaacgtgcccttcaactactacaccaccagcgccatgctgcaggccgtgctggagaagcccctggagaagaaggccggcagaaactacggcccccccggcaacaagaagctgatctacttcatcgacgacatgaacatgcccgaggtggacgcctacggcaccgtgcagccccacaccatcatcagacagcacctggactacggccactggtacgacagaagcaagctgagcctgaaggagatcaccaacgtgcagtacgtgagctgcatgaaccccaccgccggcagcttcaccatcaaccccagactgcagagacacttcagcgtgttcgtgctgagcttccccggcgccgacgccctgagcagcatctacagcatcatcctgacccagcacctgaagctgggcaacttccccgccagcctgcagaagagcatcccccccctgatcgacctggccctggccttccaccagaagatcgccaccaccttcctgcccaccggcatcaagttccactacatcttcaacctgagagacttcgccaacatcttccagggcatcctgttcagcagcgtggagtgcgtgaagagcacctgggacctgatcagactgtacctgcacgagagcaacagagtgtacagagacaagatggtggaggagaaggacttcgacctgttcgacaagatccagaccgaggtgctgaagaagaccttcgacgacatcgaggaccccgtggagcagacccagagccccaacctgtactgccacttcgccaacggcatcggcgagcccaagtacatgcccgtgcagagctgggagctgctgacccagaccctggtggaggccctggagaaccacaacgaggtgaacaccgtgatggacctggtgctgttcgaggacgccatgagacacgtgtgccacatcaacagaatcctggagagccccagaggcaacgccctgctggtgggcgtgggcggcagcggcaagcagagcctgaccagactggccgccttcatcagcagcatggacgtgttccagatcaccctgagaaagggctaccagatccaggacttcaagatggacctggccagcctgtgcctgaaggccggcgtgaagaacctgaacaccgtgttcctgatgaccgacgcccaggtggccgacgagagattcctggtgctgatcaacgacctgctggccagcggcgagatccccgacctgtacagcgacgacgaggtggagaacatcatcagcaacgtgagaaacgaggtgaagagccagggcctggtggacaacagagagaactgctggaagttcttcatcgacagaatcagaagacagctgaaggtgaccctgtgcttcagccccgtgggcaacaagctgagagtgagaagcagaaagttccccgccatcgtgaactgcaccgccatccactggttccacgagtggccccagcaggccctggagagcgtgagcctgagattcctgcagaacaccgagggcatcgagcccaccgtgaagcagagcatcagcaagttcatggccttcgtgcacaccagcgtgaaccagaccagccagagctacctgagcaacgagcagagatacaactacaccacccccaagagcttcctggagttcatcagactgtaccagagcctgctgcacagacacagaaaggagctgaagtgcaagaccgagagactggagaacggcctgctgaagctgcacagcaccagcgcccaggtggacgacctgaaggccaagctggccgcccaggaggtggagctgaagcagaagaacgaggacgccgacaagctgatccaggtggtgggcgtggagaccgacaaggtgagcagagagaaggccatggccgacgaggaggagcagaaggtggccgtgatcatgctggaggtgaagcagaagcagaaggactgcgaggaggacctggccaaggccgagcccgccctgaccgccgcccaggccgccctgaacaccctgaacaagaccaacctgaccgagctgaagagcttcggcagcccccccctggccgtgagcaacgtgagcgccgccgtgatggtgctgatggcccccagaggcagagtgcccaaggacagaagctggaaggccgccaaggtgaccatggccaaggtggacggcttcctggacagcctgatcaacttcaacaaggagaacatccacgagaactgcctgaaggccatcagaccctacctgcaggaccccgagttcaaccccgagttcgtggccaccaagagctacgccgccgccggcctgtgcagctgggtgatcaacatcgtgagattctacgaggtgttctgcgacgtggagcccaagagacaggccctgaacaaggccaccgccgacctgaccgccgcccaggagaagctggccgccatcaaggccaagatcgcccacctgaacgagaacctggccaagctgaccgccagattcgagaaggccaccgccgacaagctgaagtgccagcaggaggccgaggtgaccgccgtgaccatcagcctggccaacagactggtgggcggcctggccagcgagaacgtgagatgggccgacgccgtgcagaacttcaagcagcaggagagaaccctgtgcggcgacatcctgctgatcaccgccttcatcagctacctgggcttcttcaccaagaagtacagacagagcctgctggacagaacctggagaccctacctgagccagctgaagacccccatccccgtgacccccgccctggaccccctgagaatgctgatggacgacgccgacgtggccgcctggcagaacgagggcctgcccgccgacagaatgagcgtggagaacgccaccatcctgatcaactgcgagagatggcccctgatggtggacccccagctgcagggcatcaagtggatcaagaacaagtacggcgaggacctgagagtgacccagatcggccagaagggctacctgcagatcatcgagcaggccctggaggccggcgccgtggtgctgatcgagaacctggaggagagcatcgaccccgtgctgggccccctgctgggcagagaggtgatcaagaagggcagattcatcaagatcggcgacaaggagtgcgagtacaaccccaagttcagactgatcctgcacaccaagctggccaacccccactaccagcccgagctgcaggcccaggccaccctgatcaacttcaccgtgaccagagacggcctggaggaccagctgctggccgccgtggtgagcatggagagacccgacctggagcagctgaagagcgacctgaccaagcagcagaacggcttcaagatcaccctgaagaccctggaggacagcctgctgagcagactgagcagcgccagcggcaacttcctgggcgagaccgtgctggtggagaacctggagatcaccaagcagaccgccgccgaggtggagaagaaggtgcaggaggccaaggtgaccgaggtgaagatcaacgaggccagagagcactacagacccgccgccgccagagccagcctgctgtacttcatcatgaacgacctgagcaagatccaccccatgtaccagttcagcctgaaggccttcagcatcgtgttccagaaggccgtggagagagccgcccccgacgagagcctgagagagagagtggccaacctgatcgacagcatcaccttcagcgtgtaccagtacaccatcagaggcctgttcgagtgcgacaagctgacctacctggcccagctgaccttccagatcctgctgatgaacagagaggtgaacgccgtggagctggacttcctgctgagaagccccgtgcagaccggcaccgccagccccgtggagttcctgagccaccaggcctggggcgccgtgaaggtgctgagcagcatggaggagttcagcaacctggacagagacatcgagggcagcgccaagagctggaagaagttcgtggagagcgagtgccccgagaaggagaagctgccccaggagtggaagaacaagaccgccctgcagagactgtgcatgctgagagccatgagacccgacagaatgacctacgccctgagagacttcgtggaggagaagctgggcagcaagtacgtggtgggcagagccctggacttcgccaccagcttcgaggagagcggccccgccacccccatgttcttcatcctgagccccggcgtggaccccctgaaggacgtggagagccagggcagaaagctgggctacaccttcaacaaccagaacttccacaacgtgagcctgggccagggccaggaggtggtggccgaggccgccctggacctggccgccaagaagggccactgggtgatcctgcaggacaccctggagatgtgcagcagagagaccgagttcaagagcatcctgttcgccctgtgctacttccacgccgtggtggccgagagaagaaagttcggcccccagggctggaacagaagctaccccttcaacaccggcgacctgaccatcagcgtgaacgtgctgtacaacttcctggaggccaacgccaaggtgccctacgacgacctgagatacctgttcggcgagatcatgtacggcggccacatcaccgacgactgggacagaagactgtgcagaacctacctgggcgagttcatcagacccgagatgctggagggcgagctgagcctggcccccggcttccccctgcccggcaacatggactacaacggctaccaccagtacatcgacgccgagctgccccccgagagcccctacctgtacggcctgcaccccaacgccgagatcggcttcctgacccagaccagcgagaagctgttcagaaccgtgctggagctgcagcccagagacagccaggccagagacggcgccggcgccaccagagaggagaaggtgaaggccctgctggaggagatcctggagagagtgaccgacgagttcaacatccccgagctgatggccaaggtggaggagagaaccccctacatcgtggtggccttccaggagtgcggcagaatgaacatcctgaccagagagatccagagaagcctgagagagctggagctgggcctgaagggcgagctgaccatgaccagccacatggagaacctgcagaacgccctgtacttcgacatggtgcccgagagctgggccagaagagcctaccccagcaccgccggcctggccgcctggttccccgacctgctgaacagaatcaaggagctggaggcctggaccggcgacttcaccatgcccagcaccgtgtggctgaccggcttcttcaacccccagagcttcctgaccgccatcatgcagagcaccgccagaaagaacgagtggcccctggaccagatggccctgcagtgcgacatgaccaagaagaacagagaggagttcagaagcccccccagagagggcgcctacatccacggcctgttcatggagggcgcctgctgggacacccaggccggcatcatcaccgaggccaagctgaaggacctgaccccccccatgcccgtgatgttcatcaaggccatccccgccgacaagcaggactgcagaagcgtgtacagctgccccgtgtacaagaccagccagagaggccccacctacgtgtggaccttcaacctgaagaccaaggagaaccccagcaagtgggtgctggccggcgtggccctgctgctgcagatctag

SEQ ID NO: 79860 - DNA, 2100 bp, synthetic construct
  misc_feature 1..2100: note = Description of Artificial Sequence: Synthetic coding sequence
  source 1..2100: mol_type = other DNA
atgatccccgccagcgccaaggccccccacaagcagccccacaagcagagcatcagcatcggcagaggcaccagaaagagagacgaggacagcggcaccgaggtgggcgagggcaccgacgagtgggcccagagcaaggccaccgtgagaccccccgaccagctggagctgaccgacgccgagctgaaggaggagttcaccagaatcctgaccgccaacaacccccacgccccccagaacatcgtgagatacagcttcaaggagggcacctacaagcccatcggcttcgtgaaccagctggccgtgcactacacccaggtgggcaacctgatccccaaggacagcgacgagggcagaagacagcactacagagacgagctggtggccggcagccaggagagcgtgaaggtgatcagcgagaccggcaacctggaggaggacgaggagcccaaggagctggagaccgagcccggcagccagaccgacgtgcccgccgccggcgccgccgagaaggtgaccgaggaggagctgatgacccccaagcagcccaaggagagaaagctgaccaaccagttcaacttcagcgagagagccagccagacctacaacaaccccgtgagagacagagagtgccagaccgagcccccccccagaaccaacttcagcgccaccgccaaccagtgggagatctacgacgcctacgtggaggagctggagaagcaggagaagaccaaggagaaggagaaggccaagacccccgtggccaagaagagcggcaagatggccatgagaaagctgaccagcatggagagccagaccgacgacctgatcaagctgagccaggccgccaagatcatggagagaatggtgaaccagaacacctacgacgacatcgcccaggacttcaagtactacgacgacgccgccgacgagtacagagaccaggtgggcaccctgctgcccctgtggaagttccagaacgacaaggccaagagactgagcgtgaccgccctgtgctggaaccccaagtacagagacctgttcgccgtgggctacggcagctacgacttcatgaagcagagcagaggcatgctgctgctgtacagcctgaagaaccccagcttccccgagtacatgttcagcagcaacagcggcgtgatgtgcctggacatccacgtggaccacccctacctggtggccgtgggccactacgacggcaacgtggccatctacaacctgaagaagccccacagccagcccagcttctgcagcagcgccaagagcggcaagcacagcgaccccgtgtggcaggtgaagtggcagaaggacgacatggaccagaacctgaacttcttcagcgtgagcagcgacggcagaatcgtgagctggaccctggtgaagagaaagctggtgcacatcgacgtgatcaagctgaaggtggagggcagcaccaccgaggtgcccgagggcctgcagctgcaccccgtgggctgcggcaccgccttcgacttccacaaggagatcgactacatgttcctggtgggcaccgaggagggcaagatctacaagtgcagcaagagctacagcagccagttcctggacacctacgacgcccacaacatgagcgtggacaccgtgagctggaacccctaccacaccaaggtgttcatgagctgcagcagcgactggaccgtgaagatctgggaccacaccatcaagacccccatgttcatctacgacctgaacagcgccgtgggcgacgtggcctgggccccctacagcagcaccgtgttcgccgccgtgaccaccgacggcaaggcccacatcttcgacctggccatcaacaagtacgaggccatctgcaaccagcccgtggccgccaagaagaacagactgacccacgtgcagttcaacctgatccaccccatcatcatcgtgggcgacgacagaggccacatcatcagcctgaagctgagccccaacctgagaaagatgcccaaggagaagaagggccaggaggtgcagaagggccccgccgtggagatcgccaagctggacaagctgctgaacctggtgagagaggtgaagatcaagacctag

SEQ ID NO: 79861 - DNA, 585 bp, synthetic construct
  misc_feature 1..585: note = Description of Artificial Sequence: Synthetic coding sequence
  source 1..585: mol_type = other DNA
atggaccagaacctgaacttcttcagcgtgagcagcgacggcagaatcgtgagctggaccctggtgaagagaaagctggtgcacatcgacgtgatcaagctgaaggtggagggcagcaccaccgaggtgcccgagggcctgcagctgcaccccgtgggctgcggcaccgccttcgacttccacaaggagatcgactacatgttcctggtgggcaccgaggagggcaagatctacaagtgcagcaagagctacagcagccagttcctggacacctacgacgcccacaacatgagcgtggacaccgtgagctggaacccctaccacaccaaggtgttcatgagctgcagcagcgactggaccgtgaagatctgggaccacaccatcaagacccccatgttcatctacgacctgaacagcgccgtgggcgacgtggcctgggccccctacagcagcaccgtgttcgccgccgtgaccaccgacggcaaggagaagaagggccaggaggtgcagaagggccccgccgtggagatcgccaagctggacaagctgctgaacctggtgagagaggtgaagatcaagacctag

SEQ ID NO: 79862 - DNA, 870 bp, synthetic construct
  misc_feature 1..870: note = Description of Artificial Sequence: Synthetic coding sequence
  source 1..870: mol_type = other DNA
atgatccccgccagcgccaaggccccccacaagcagccccacaagcaggacgaggacagcggcaccgaggtgggcgagggcaccgacgagtgggcccagagcaaggccaccgtgagaccccccgaccagctggagctgaccgacgccgagctgaaggaggagttcaccagaatcctgaccgccaacaacccccacgccccccagaacatcgtgagatacagcttcaaggagggcacctacaagcccatcggcttcgtgaaccagctggccgtgcactacacccaggtgggcaacctgatccccaaggacagcgacgagggcagaagacagcactacagagacgagctggtggccggcagccaggagagcgtgaaggtgatcagcgagaccggcaacctggaggaggacgaggagcccaaggagctggagaccgagcccggcagccagaccgacgtgcccgccgccggcgccgccgagaaggtgaccgaggaggagctgatgacccccaagcagcccaaggagagaaagctgaccaaccagttcaacttcagcgagagagccagccagacctacaacaaccccgtgagagacagagagtgccagaccgagcccccccccagaaccaacttcagcgccaccgccaaccagtgggagatctacgacgcctacgtggaggagctggagaagcaggagaagaccaaggagaaggagaaggccaagacccccgtggccaagaagagcggcaagatggccatgagaaagctgaccagcatggagagccagaccgacgacctgatcaagctgagccaggccgccaagatcatggagagaatggtgaaccagaacacctacgacgacatcgcccagtag

SEQ ID NO: 79863 - DNA, 870 bp, synthetic construct; identical to SEQ ID NO: 79862
  misc_feature 1..870: note = Description of Artificial Sequence: Synthetic coding sequence
  source 1..870: mol_type = other DNA

SEQ ID NO: 79864 - DNA, 429 bp, synthetic construct
  misc_feature 1..429: note = Description of Artificial Sequence: Synthetic coding sequence
  source 1..429: mol_type = other DNA
tgatgcggcaccgccttcgacttccacaaggagatcgactacatgttcctggtgggcaccgaggagggcaagatctacaagtgcagcaagagctacagcagccagttcctggacacctacgacgcccacaacatgagcgtggacaccgtgagctggaacccctaccacaccaaggtgttcatgagctgcagcagcgactggaccgtgaagatctgggaccacaccatcaagacccccatgttcatctacgacctgaacagcgccgtgggcgacgtggcctgggccccctacagcagcaccgtgttcgccgccgtgaccaccgacggcaaggagaagaagggccaggaggtgcagaagggccccgccgtggagatcgccaagctggacaagctgctgaacctggtgagagaggtgaagatcaagacctag

SEQ ID NO: 79865 - DNA, 507 bp, synthetic construct
  misc_feature 1..507: note = Description of Artificial Sequence: Synthetic coding sequence
  source 1..507: mol_type = other DNA
atgatccccgccagcgccaaggccccccacaagcagccccacaagcagagcatcagcatcggcagaggcaccagaaagagagacgaggacagcggcaccgaggtgggcgagggcaccgacgagtgggcccagagcaaggccaccgtgagaccccccgaccagctggagctgaccgacgccgagctgaaggaggagttcaccagaatcctgaccgccaacaacccccacgccccccagaacatcgtgagatacagcttcaagaagcagtggagcctgggcttcatccccaagctgaagagaaagatccccgtgaactactggggccaggacgagggcgagatcagcaacgagaccgtgagagtgatctacagcctgggcatcttcatcatgaagatcgtgaccatcctgctgaacatcaacatcgagcacctgctgtgcgtgagacactgcgtgaacagactgttcctgctgttcctgatcctgatcatcatcatgcagatcagatag

SEQ ID NO: 79866 - DNA, 1209 bp, synthetic construct
  misc_feature 1..1209: note = Description of Artificial Sequence: Synthetic coding sequence
  source 1..1209: mol_type = other DNA
atgagaaccaccctgacccccagctgcagcagcgccctggacccccaggagatcaagagagccgccacccacctgagctggcaccccgacggcaacagaaagctggccgtggcctacagctgcctggacttccagagagcccccgtgggcatgagcagcgacagctacatctgggacctggagaaccccaacaagcccgagctggccctgaagcccagcagccccctggtgaccctggagttcaaccccaaggacagccacgtgctgctgggcggctgctacaacggccagatcgcctgctgggacaccagaaagggcagcctggtggccgagctgagcaccatcgagagcagccacagagaccccgtgtacggcaccatctggctgcagagcaagaccggcaccgagtgcttcagcgccagcaccgacggccaggtgatgtggtgggacatcagaaagatgagcgagcccaccgaggtggtgatcctggacatcaccaagaaggagcagctggagaacgccctgggcgccatcagcctggagttcgagagcaccctgcccaccaagttcatggtgggcaccgagcagggcatcgtgatcagctgcaacagaaaggccaagaccagcgccgagaagatcgtgtgcaccttccccggccaccacggccccatctacgccctgcagagaaaccccttctaccccaagaacttcctgaccgtgggcgactggaccgccagaatctggagcgaggacagcagagagagcagcatcatgtggaccaagtaccacatggcctacctgaccgacgccgcctggagccccgtgagacccaccgtgttcttcaccaccagaatggacggcaccctggacatctgggacttcatgttcgagcagtgcgaccccaccctgagcctgaaggtgtgcgacgaggccctgttctgcctgagagtgcaggacaacggctgcctgatcgcctgcggcagccagctgggcaccaccaccctgctggaggtgagccccggcctgagcaccctgcagagaaacgagaagaacgtggccagcagcatgttcgagagagagaccagaagagagaagatcctggaggccagacacagagagatgagactgaaggagaaggccgccaccaagagcagaagaagacccggcggcggcggcggcagaggcagcagcggcggcagaagaggctag

SEQ ID NO: 79867 - DNA, 1818 bp, synthetic construct
  misc_feature 1..1818: note = Description of Artificial Sequence: Synthetic coding sequence
  source 1..1818: mol_type = other DNA
atggagatcgtgtacgtgtacgtgaagaagagaagcgagttcggcaagcagtgcaacttcagcgacagacaggccgagctgaacatcgacatcatgcccaaccccgagctggccgagcagttcgtggagagaaaccccgtggacaccggcatccagtgcagcatcagcatgagcgagcacgaggccaacagcgagagattcgagatggagaccagaggcgtgaaccacgtggagggcggctggcccaaggacgtgaaccccctggagctggagcagaccatcagattcagaaagaaggtggagaaggacgagaactacgtgaacgccatcatgcagctgggcagcatcatggagcactgcatcaagcagaacaacgccatcgacatctacgaggagtacttcaacgacgaggaggccatggaggtgatggaggaggaccccagcgccaagaccatcaacgtgttcagagacccccaggagatcaagagagccgccacccacctgagctggcaccccgacggcaacagaaagctggccgtggcctacagctgcctggacttccagagagcccccgtgggcatgagcagcgacagctacatctgggacctggagaaccccaacaagcccgagctggccctgaagcccagcagccccctggtgaccctggagttcaaccccaaggacagccacgtgctgctgggcggctgctacaacggccagatcgcctgctgggacaccagaaagggcagcctggtggccgagctgagcaccatcgagagcagccacagagaccccgtgtacggcaccatctggctgcagagcaagaccggcaccgagtgcttcagcgccagcaccgacggccaggtgatgtggtgggacatcagaaagatgagcgagcccaccgaggtggtgatcctggacatcaccaagaaggagcagctggagaacgccctgggcgccatcagcctggagttcgagagcaccctgcccaccaagttcatggtgggcaccgagcagggcatcgtgatcagctgcaacagaaaggccaagaccagcgccgagaagatcgtgtgcaccttccccggccaccacggccccatctacgccctgcagagaaaccccttctaccccaagaacttcctgaccgtgggcgactggaccgccagaatctggagcgaggacagcagagagagcagcatcatgtggaccaagtaccacatggcctacctgaccgacgccgcctggagccccgtgagacccaccgtgttcttcaccaccagaatggacggcaccctggacatctgggacttcatgttcgagcagtgcgaccccaccctgagcctgaaggtgtgcgacgaggccctgttctgcctgagagtgcaggacaacggctgcctgatcgcctgcggcagccagctgggcaccaccaccctgctggaggtgagccccggcctgagcaccctgcagagaaacgagaagaacgtggccagcagcatgttcgagagagagaccagaagagagaagatcctggaggccagacacagagagatgagactgaaggagaagggcaaggccgagggcagagacgaggagcagaccgacgaggagctggccgtggacctggaggccctggtgagcaaggccgaggaggagttcttcgacatcatcttcgccgagctgaagaagaaggaggccgacgccatcaagctgacccccgtgccccagcagcccagccccgaggaggaccaggtggtggaggagggcgaggaggccgccggcgaggagggcgacgaggaggtggaggaggacctggcctag

SEQ ID NO: 79868 - DNA, 1818 bp, synthetic construct; identical to SEQ ID NO: 79867
  misc_feature 1..1818: note = Description of Artificial Sequence: Synthetic coding sequence
  source 1..1818: mol_type = other DNA

SEQ ID NO: 79869 - DNA, 234 bp, synthetic construct
  misc_feature 1..234: note = Description of Artificial Sequence: Synthetic coding sequence
  source 1..234: mol_type = other DNA
atgaagaagctgaagatcctgtacatgagcaacaacctggtgaaggactgggccgagttcgtgaagctggccgagctgccctgcctggaggacctggtgttcgtgggcaaccccctggaggagaagcacagcgccgagaacaactggatcgaggaggccaccaagagagtgcccaagctgaagaagctggacggcacccccgtgatcaagggcgacgaggaggaggacaactag

SEQ ID NO: 79870 - DNA, 456 bp, synthetic construct
  misc_feature 1..456: note = Description of Artificial Sequence: Synthetic coding sequence
  source 1..456: mol_type = other DNA
atggacgccagcctgagcatgctggccaactgcgagaagctgagcctgagcaccaactgcatcgagaagatcgccaacctgaacggcctgaagaacctgagaatcctgagcctgggcagaaacaacatcaagaacctgaacggcctggaggccgtgggcgacaccctggaggagctgtggatcagctacaacttcatcgagaagctgaagggcatccacatcatgaagaagctgaagatcctgtacatgagcaacaacctggtgaaggactgggccgagttcgtgaagctggccgagctgccctgcctggaggacctggtgttcgtgggcaaccccctggaggagaagcacagcgccgagaacaactggatcgaggaggccaccaagagagtgcccaagctgaagaagctggacggcacccccgtgatcaagggcgacgaggaggaggacaactag

SEQ ID NO: 79871 - DNA, 573 bp, synthetic construct
  misc_feature 1..573: note = Description of Artificial Sequence: Synthetic coding sequence
  source 1..573: mol_type = other DNA
atggccaaggccaccaccatcaaggaggccctggccagatgggaggagaagaccggccagagacccagcgaggccaaggagatcaagctgtacgcccagatcccccccatcgagaagatggacgccagcctgagcatgctggccaactgcgagaagctgagcctgagcaccaactgcatcgagaagatcgccaacctgaacggcctgaagaacctgagaatcctgagcctgggcagaaacaacatcaagaacctgaacggcctggaggccgtgggcgacaccctggaggagctgtggatcagctacaacttcatcgagaagctgaagggcatccacatcatgaagaagctgaagatcctgtacatgagcaacaacctggtgaaggactgggccgagttcgtgaagctggccgagctgccctgcctggaggacctggtgttcgtgggcaaccccctggaggagaagcacagcgccgagaacaactggatcgaggaggccaccaagagagtgcccaagctgaagaagctggacggcacccccgtgatcaagggcgacgaggaggaggacaactag

SEQ ID NO: 79872 - DNA, 174 bp, synthetic construct
  misc_feature 1..174: note = Description of Artificial Sequence: Synthetic coding sequence
  source 1..174: mol_type = other DNA
atgaagaagctgaagatcctgtacatgagcaacaacctggtgaaggactgggccgagttcgtgaagctggccgagctgccctgcctggaggacctggtgttcgtgggcaaccccctggaggagaagcacagcgccgagaacaactggatcgaggaggccaccaagagagtgtag

SEQ ID NO: 79873 - DNA, 456 bp, synthetic construct; identical to SEQ ID NO: 79870
  misc_feature 1..456: note = Description of Artificial Sequence: Synthetic coding sequence
  source 1..456: mol_type = other DNA

SEQ ID NO: 79874 - DNA, 195 bp, synthetic construct
  misc_feature 1..195: note = Description of Artificial Sequence: Synthetic coding sequence
  source 1..195: mol_type = other DNA
atgaagaagctgaagatcctgtacatgagcaacaacctggtgaaggactgggccgagttcgtgaagctggccgagctgccctgcctggaggacctggtgttcgtgggcaaccccctggaggagaagcacagcgccgagaacaactggatcgaggaggccaccaagagagtgcccaagctgaagaagctggactag

SEQ ID NO: 79875 - DNA, 159 bp, synthetic construct
  misc_feature 1..159: note = Description of Artificial Sequence: Synthetic coding sequence
  source 1..159: mol_type = other DNA
atggacgccagcctgagcatgctggccaactgcgagaagctgagcctgagcaccaactgcatcgagaagatcgccaacctgaacggcctgaagaacctgagaatcctgagcctgggcagaaacaacatcaagaacctgaacggcctggaggccgtgtag

SEQ ID NO: 79876 - DNA, 198 bp, synthetic construct
  misc_feature 1..198: note = Description of Artificial Sequence: Synthetic coding sequence
  source 1..198: mol_type = other DNA
atgaagaagctgaagatcctgtacatgagcaacaacctggtgaaggactgggccgagttcgtgaagctggccgagctgccctgcctggaggacctggtgttcgtgggcaaccccctggaggagaagcacagcgccgagaacaactggatcgaggaggccaccaagagagtgcccaagctgaagaagctggacggctag

SEQ ID NO: 79877 - DNA, 843 bp, synthetic construct
  misc_feature 1..843: note = Description of Artificial Sequence: Synthetic coding sequence
  source 1..843: mol_type = other DNA
atggtgaccgccaacaaggcccacaccggccagggcagctgctgggtggccaccctggccagcgccatgatcccccccgccgacagcctgctgaagtacgacacccccgtgctggtgagcagaaacaccgagaagagaagccccaaggccagactgctgaaggtgagcccccagcagcccggccccagcggcagcgccccccagccccccaagaccaagctgcccagcaccccctgcgtgcccgaccccaccaagcaggccgaggagatcctgaacgccatcctgccccccagagagtgggtggaggacacccagctgtggatccagcaggtgagcagcacccccagcaccagaatggacgtggtgcacctgcaggagcagctggacctgaagctgcagcagagacaggccagagagaccggcatctgccccgtgagaagagagctgtacagccagtgcttcgacgagctgatcagagaggtgaccatcaactgcgccgagagaggcctgctgctgctgagagtgagagacgagatcagaatgaccatcgccgcctaccagaccctgtacgagagcagcgtggccttcggcatgagaaaggccctgcaggccgagcagggcaagagcgacatggagagaaagatcgccgagctggagaccgagaagagagacctggagagacaggtgaacgagcagaaggccaagtgcgaggccaccgagaagagagagagcgagagaagacaggtggaggagaagaagcacaacgaggagatccagttcctgaagagaaccaaccagcagctgaaggcccagctggagggcatcatcgcccccaagaagtag

SEQ ID NO: 79878 - DNA, 399 bp, synthetic construct
  misc_feature 1..399: note = Description of Artificial Sequence: Synthetic coding sequence
  source 1..399: mol_type = other DNA
atgccctactacccccaggacgagctgatcagagaggtgaccatcaactgcgccgagagaggcctgctgctgctgagagtgagagacgagatcagaatgaccatcgccgcctaccagaccctgtacgagagcagcgtggccttcggcatgagaaaggccctgcaggccgagcagggcaagagcgacatggagagaaagatcgccgagctggagaccgagaagagagacctggagagacaggtgaacgagcagaaggccaagtgcgaggccaccgagaagagagagagcgagagaagacaggtggaggagaagaagcacaacgaggagatccagttcctgaagagaaccaaccagcagctgaaggcccagctggagggcatcatcgcccccaagaagtag

SEQ ID NO: 79879 - DNA, 13941 bp, synthetic construct
  misc_feature 1..13941: note = Description of Artificial Sequence: Synthetic coding sequence
  source 1..13941: mol_type = other DNA
atgagcgagcccggcggcggcggcggcgaggacggcagcgccggcctggaggtgagcgccgtgcagaacgtggccgacgtgagcgtgctgcagaagcacctgagaaagctggtgcccctgctgctggaggacggcggcgaggcccccgccgccctggaggccgccctggaggagaagagcgccctggagcagatgagaaagttcctgagcgacccccaggtgcacaccgtgctggtggagagaagcaccctgaaggaggacgtgggcgacgagggcgaggaggagaaggagttcatcagctacaacatcaacatcgacatccactacggcgtgaagagcaacagcctggccttcatcaagagaacccccgtgatcgacgccgacaagcccgtgagcagccagctgagagtgctgaccctgagcgaggacagcccctacgagaccctgcacagcttcatcagcaacgccgtggcccccttcttcaagagctacatcagagagagcggcaaggccgacagagacggcgacaagatggcccccagcgtggagaagaagatcgccgagctggagatgggcctgctgcacctgcagcagaacatcgagatccccgagatcagcctgcccatccaccccatgatcaccaacgtggccaagcagtgctacgagagaggcgagaagcccaaggtgaccgacttcggcgacaaggtggaggaccccaccttcctgaaccagctgcagagcggcgtgaacagatggatcagagagatccagaaggtgaccaagctggacagagaccccgccagcggcaccgccctgcaggagatcagcttctggctgaacctggagagagccctgtacagaatccaggagaagagagagagccccgaggtgctgctgaccctggacatcctgaagcacggcaagagattccacgccaccgtgagcttcgacaccgacaccggcctgaagcaggccctggagaccgtgaacgactacaaccccctgatgaaggacttccccctgaacgacctgctgagcgccaccgagctggacaagatcagacaggccctggtggccatcttcacccacctgagaaagatcagaaacaccaagtaccccatccagagagccctgagactggtggaggccatcagcagagacctgagcagccagctgctgaaggtgctgggcaccagaaagctgatgcacgtggcctacgaggagttcgagaaggtgatggtggcctgcttcgaggtgttccagacctgggacgacgagtacgagaagctgcaggtgctgctgagagacatcgtgaagagaaagagagaggagaacctgaagatggtgtggagaatcaaccccgcccacagaaagctgcaggccagactggaccagatgagaaagttcagaagacagcacgagcagctgagagccgtgatcgtgagagtgctgagaccccaggtgaccgccgtggcccagcagaaccagggcgaggtgcccgagccccaggacatgaaggtggccgaggtgctgttcgacgccgccgacgccaacgccatcgaggaggtgaacctggcctacgagaacgtgaaggaggtggacggcctggacgtgagcaaggagggcaccgaggcctgggaggccgccatgaagagatacgacgagagaatcgacagagtggagaccagaatcaccgccagactgagagaccagctgggcaccgccaagaacgccaacgagatgttcagaatcttcagcagattcaacgccctgttcgtgagaccccacatcagaggcgccatcagagagtaccagacccagctgatccagagagtgaaggacgacatcgagagcctgcacgacaagttcaaggtgcagtacccccagagccaggcctgcaagatgagccacgtgagagacctgccccccgtgagcggcagcatcatctgggccaagcagatcgacagacagctgaccgcctacatgaagagagtggaggacgtgctgggcaagggctgggagaaccacgtggagggccagaagctgaagcaggacggcgacagcttcagaatgaagctgaacacccaggagatcttcgacgactgggccagaaaggtgcagcagagaaacctgggcgtgagcggcagaatcttcaccatcgagagcaccagagtgagaggcagaaccggcaacgtgctgaagctgaaggtgaacttcctgcccgagatcatcaccctgagcaaggaggtgagaaacctgaagtggctgggcttcagagtgcccctggccatcgtgaacaaggcccaccaggccaaccagctgtaccccttcgccatcagcctgatcgagagcgtgagaacctacgagagaacctgcgagaaggtggaggagagaaacaccatcagcctgctggtggccggcctgaagaaggaggtgcaggccctgatcgccgagggcatcgccctggtgtgggagagctacaagctggacccctacgtgcagagactggccgagaccgtgttcaacttccaggagaaggtggacgacctgctgatcatcgaggagaagatcgacctggaggtgagaagcctggagacctgcatgtacgaccacaagaccttcagcgagatcctgaacagagtgcagaaggccgtggacgacctgaacctgcacagctacagcaacctgcccatctgggtgaacaagctggacatggagatcgagagaatcctgggcgtgagactgcaggccggcctgagagcctggacccaggtgctgctgggccaggccgaggacaaggccgaggtggacatggacaccgacgccccccaggtgagccacaagcccggcggcgagcccaagatcaagaacgtggtgcacgagctgagaatcaccaaccaggtgatctacctgaacccccccatcgaggagtgcagatacaagctgtaccaggagatgttcgcctggaagatggtggtgctgagcctgcccagaatccagagccagagataccaggtgggcgtgcactacgagctgaccgaggaggagaagttctacagaaacgccctgaccagaatgcccgacggccccgtggccctggaggagagctacagcgccgtgatgggcatcgtgagcgaggtggagcagtacgtgaaggtgtggctgcagtaccagtgcctgtgggacatgcaggccgagaacatctacaacagactgggcgaggacctgaacaagtggcaggccctgctggtgcagatcagaaaggccagaggcaccttcgacaacgccgagaccaagaaggagttcggccccgtggtgatcgactacggcaaggtgcagagcaaggtgaacctgaagtacgacagctggcacaaggaggtgctgagcaagttcggccagatgctgggcagcaacatgaccgagttccacagccagatcagcaagagcagacaggagctggagcagcacagcgtggacaccgccagcaccagcgacgccgtgaccttcatcacctacgtgcagagcctgaagagaaagatcaagcagttcgagaagcaggtggagctgtacagaaacggccagagactgctggagaagcagagattccagttcccccccagctggctgtacatcgacaacatcgagggcgagtggggcgccttcaacgacatcatgagaagaaaggacagcgccatccagcagcaggtggccaacctgcagatgaagatcgtgcaggaggacagagccgtggagagcagaaccaccgacctgctgaccgactgggagaagaccaagcccgtgaccggcaacctgagacccgaggaggccctgcaggccctgaccatctacgagggcaagttcggcagactgaaggacgacagagagaagtgcgccaaggccaaggaggccctggagctgaccgacaccggcctgctgagcggcagcgaggagagagtgcaggtggccctggaggagctgcaggacctgaagggcgtgtggagcgagctgagcaaggtgtgggagcagatcgaccagatgaaggagcagccctgggtgagcgtgcagcccagaaagctgagacagaacctggacgccctgctgaaccagctgaagagcttccccgccagactgagacagtacgccagctacgagttcgtgcagagactgctgaagggctacatgaagatcaacatgctggtgatcgagctgaagagcgaggccctgaaggacagacactggaagcagctgatgaagagactgcacgtgaactgggtggtgagcgagctgaccctgggccagatctgggacgtggacctgcagaagaacgaggccatcgtgaaggacgtgctgctggtggcccagggcgagatggccctggaggagttcctgaagcagatcagagaggtgtggaacacctacgagctggacctggtgaactaccagaacaagtgcagactgatcagaggctgggacgacctgttcaacaaggtgaaggagcacatcaacagcgtgagcgccatgaagctgagcccctactacaaggtgttcgaggaggacgccctgagctgggaggacaagctgaacagaatcatggccctgttcgacgtgtggatcgacgtgcagagaagatgggtgtacctggagggcatcttcaccggcagcgccgacatcaagcacctgctgcccgtggagacccagagattccagagcatcagcaccgagttcctggccctgatgaagaaggtgagcaagagccccctggtgatggacgtgctgaacatccagggcgtgcagagaagcctggagagactggccgacctgctgggcaagatccagaaggccctgggcgagtacctggagagagagagaagcagcttccccagattctacttcgtgggcgacgaggacctgctggagatcatcggcaacagcaagaacgtggccaagctgcagaagcacttcaagaagatgttcgccggcgtgagcagcatcatcctgaacgaggacaacagcgtggtgctgggcatcagcagcagagagggcgaggaggtgatgttcaagacccccgtgagcatcaccgagcaccccaagatcaacgagtggctgaccctggtggagaaggagatgagagtgaccctggccaagctgctggccgagagcgtgaccgaggtggagatcttcggcaaggccaccagcatcgaccccaacacctacatcacctggatcgacaagtaccaggcccagctggtggtgctgagcgcccagatcgcctggagcgagaacgtggagaccgccctgagcagcatgggcggcggcggcgacgccgcccccctgcacagcgtgctgagcaacgtggaggtgaccctgaacgtgctggccgacagcgtgctgatggagcagccccccctgagaagaagaaagctggagcacctgatcaccgagctggtgcaccagagagacgtgaccagaagcctgatcaagagcaagatcgacaacgccaagagcttcgagtggctgagccagatgagattctacttcgaccccaagcagaccgacgtgctgcagcagctgagcatccagatggccaacgccaagttcaactacggcttcgagtacctgggcgtgcaggacaagctggtgcagacccccctgaccgacagatgctacctgaccatgacccaggccctggaggccagactgggcggcagccccttcggccccgccggcaccggcaagaccgagagcgtgaaggccctgggccaccagctgggcagattcgtgctggtgttcaactgcgacgagaccttcgacttccaggccatgggcagaatcttcgtgggcctgtgccaggtgggcgcctggggctgcttcgacgagttcaacagactggaggagagaatgctgagcgccgtgagccagcaggtgcagtgcatccaggaggccctgagagagcacagcaaccccaactacgacaagaccagcgcccccatcacctgcgagctgctgaacaagcaggtgaaggtgagccccgacatggccatcttcatcaccatgaaccccggctacgccggcagaagcaacctgcccgacaacctgaagaagctgttcagaagcctggccatgaccaagcccgacagacagctgatcgcccaggtgatgctgtacagccagggcttcagaaccgccgaggtgctggccaacaagatcgtgcccttcttcaagctgtgcgacgagcagctgagcagccagagccactacgacttcggcctgagagccctgaagagcgtgctggtgagcgccggcaacgtgaagagagagagaatccagaagatcaagagagagaaggaggagagaggcgaggccgtggacgagggcgagatcgccgagaacctgcccgagcaggagatcctgatccagagcgtgtgcgagaccatggtgcccaagctggtggccgaggacatccccctgctgttcagcctgctgagcgacgtgttccccggcgtgcagtaccacagaggcgagatgaccgccctgagagaggagctgaagaaggtgtgccaggagatgtacctgacctacggcgacggcgaggaggtgggcggcatgtgggtggagaaggtgctgcagctgtaccagatcacccagatcaaccacggcctgatgatggtgggccccagcggcagcggcaagagcatggcctggagagtgctgctgaaggccctggagagactggagggcgtggagggcgtggcccacatcatcgaccccaaggccatcagcaaggaccacctgtacggcaccctggaccccaacaccagagagtggaccgacggcctgttcacccacgtgctgagaaagatcatcgacagcgtgagaggcgagctgcagaagagacagtggatcgtgttcgacggcgacgtggaccccgagtgggtggagaacctgaacagcgtgctggacgacaacaagctgctgaccctgcccaacggcgagagactgagcctgccccccaacgtgagaatcatgttcgaggtgcaggacctgaagtacgccaccctggccaccgtgagcagatgcggcatggtgtggttcagcgaggacgtgctgagcaccgacatgatcttcaacaacttcctggccagactgagaagcatccccctggacgagggcgaggacgaggcccagagaagaagaaagggcaaggaggacgagggcgaggaggccgccagccccatgctgcagatccagagagacgccgccaccatcatgcagccctacttcaccagcaacggcctggtgaccaaggccctggagcacgccttccagctggagcacatcatggacctgaccagactgagatgcctgggcagcctgttcagcatgctgcaccaggcctgcagaaacgtggcccagtacaacgccaaccaccccgacttccccatgcagatcgagcagctggagagatacatccagagatacctggtgtacgccatcctgtggagcctgagcggcgacagcagactgaagatgagagccgagctgggcgagtacatcagaagaatcaccaccgtgcccctgcccaccgcccccaacatccccatcatcgactacgaggtgagcatcagcggcgagtggagcccctggcaggccaaggtgccccagatcgaggtggagacccacaaggtggccgcccccgacgtggtggtgcccaccctggacaccgtgagacacgaggccctgctgtacacctggctggccgagcacaagcccctggtgctgtgcggcccccccggcagcggcaagaccatgaccctgttcagcgccctgagagccctgcccgacatggaggtggtgggcctgaacttcagcagcgccaccacccccgagctgctgctgaagaccttcgaccactactgcgagtacagaagaacccccaacggcgtggtgctggcccccgtgcagctgggcaagtggctggtgctgttctgcgacgagatcaacctgcccgacatggacaagtacggcacccagagagtgatcagcttcatcagacagatggtggagcacggcggcttctacagaaccagcgaccagacctgggtgaagctggagagaatccagttcgtgggcgcctgcaacccccccaccgaccccggcagaaagcccctgagccacagattcctgagacacgtgcccgtggtgtacgtggactaccccggccccgccagcctgacccagatctacggcaccttcaacagagccatgctgagactgatccccagcctgagaacctacgccgagcccctgaccgccgccatggtggagttctacaccatgagccaggagagattcacccaggacacccagccccactacatctacagccccagagagatgaccagatgggtgagaggcatcttcgaggccctgagacccctggagaccctgcccgtggagggcctgatcagaatctgggcccacgaggccctgagactgttccaggacagactggtggaggacgaggagagaagatggaccgacgagaacatcgacaccgtggccctgaagcacttccccaacatcgacagagagaaggccatgagcagacccatcctgtacagcaactggctgagcaaggactacatccccgtggaccaggaggagctgagagactacgtgaaggccagactgaaggtgttctacgaggaggagctggacgtgcccctggtgctgttcaacgaggtgctggaccacgtgctgagaatcgacagaatcttcagacagccccagggccacctgctgctgatcggcgtgagcggcgccggcaagaccaccctgagcagattcgtggcctggatgaacggcctgagcgtgtaccagatcaaggtgcacagaaagtacaccggcgaggacttcgacgaggacctgagaaccgtgctgagaagaagcggctgcaagaacgagaagatcgccttcatcatggacgagagcaacgtgctggacagcggcttcctggagagaatgaacaccctgctggccaacggcgaggtgcccggcctgttcgagggcgacgagtacgccaccctgatgacccagtgcaaggagggcgcccagaaggagggcctgatgctggacagccacgaggagctgtacaagtggttcaccagccaggtgatcagaaacctgcacgtggtgttcaccatgaaccccagcagcgagggcctgaaggacagagccgccaccagccccgccctgttcaacagatgcgtgctgaactggttcggcgactggagcaccgaggccctgtaccaggtgggcaaggagttcaccagcaagatggacctggagaagcccaactacatcgtgcccgactacatgcccgtggtgtacgacaagctgccccagccccccagccacagagaggccatcgtgaacagctgcgtgttcgtgcaccagaccctgcaccaggccaacgccagactggccaagagaggcggcagaaccatggccatcacccccagacactacctggacttcatcaaccactacgccaacctgttccacgagaagagaagcgagctggaggagcagcagatgcacctgaacgtgggcctgagaaagatcaaggagaccgtggaccaggtggaggagctgagaagagacctgagaatcaagagccaggagctggaggtgaagaacgccgccgccaacgacaagctgaagaagatggtgaaggaccagcaggaggccgagaagaagaaggtgatgagccaggagatccaggagcagctgcacaagcagcaggaggtgatcgccgacaagcagatgagcgtgaaggaggacctggacaaggtggagcccgccgtgatcgaggcccagaacgccgtgaagagcatcaagaagcagcacctggtggaggtgagaagcatggccaacccccccgccgccgtgaagctggccctggagagcatctgcctgctgctgggcgagagcaccaccgactggaagcagatcagaagcatcatcatgagagagaacttcatccccaccatcgtgaacttcagcgccgaggagatcagcgacgccatcagagagaagatgaagaagaactacatgagcaaccccagctacaactacgagatcgtgaacagagccagcctggcctgcggccccatggtgaagtgggccatcgcccagctgaactacgccgacatgctgaagagagtggagcccctgagaaacgagctgcagaagctggaggacgacgccaaggacaaccagcagaaggccaacgaggtggagcagatgatcagagacctggaggccagcatcgccagatacaaggaggagtacgccgtgctgatcagcgaggcccaggccatcaaggccgacctggccgccgtggaggccaaggtgaacagaagcaccgccctgctgaagagcctgagcgccgagagagagagatgggagaagaccagcgagaccttcaagaaccagatgagcaccatcgccggcgactgcctgctgagcgccgccttcatcgcctacgccggctacttcgaccagcagatgagacagaacctgttcaccacctggagccaccacctgcagcaggccaacatccagttcagaaccgacatcgccagaaccgagtacctgagcaacgccgacgagagactgagatggcaggccagcagcctgcccgccgacgacctgtgcaccgagaacgccatcatgctgaagagattcaacagataccccctgatcatcgaccccagcggccaggccaccgagttcatcatgaacgagtacaaggacagaaagatcaccagaaccagcttcctggacgacgccttcagaaagaacctggagagcgccctgagattcggcaaccccctgctggtgcaggacgtggagagctacgaccccgtgctgaaccccgtgctgaacagagaggtgagaagaaccggcggcagagtgctgatcaccctgggcgaccaggacatcgacctgagccccagcttcgtgatcttcctgagcaccagagaccccaccgtggagttcccccccgacctgtgcagcagagtgaccttcgtgaacttcaccgtgaccagaagcagcctgcagagccagtgcctgaacgaggtgctgaaggccgagagacccgacgtggacgagaagagaagcgacctgctgaagctgcagggcgagttccagctgagactgagacagctggagaagagcctgctgcaggccctgaacgaggtgaagggcagaatcctggacgacgacaccatcatcaccaccctggagaacctgaagagagaggccgccgaggtgaccagaaaggtggaggagaccgacatcgtgatgcaggaggtggagaccgtgagccagcagtacctgcccctgagcaccgcctgcagcagcatctacttcaccatggagagcctgaagcagatccacttcctgtaccagtacagcctgcagttcttcctggacatctaccacaacgtgctgtacgagaaccccaacctgaagggcgtgaccgaccacacccagagactgagcatcatcaccaaggacctgttccaggtggccttcaacagagtggccagaggcatgctgcaccaggaccacatcaccttcgccatgctgctggccagaatcaagctgaagggcaccgtgggcgagcccacctacgacgccgagttccagcacttcctgagaggcaacgagatcgtgctgagcgccggcagcacccccagaatccagggcctgaccgtggagcaggccgaggccgtggtgagactgagctgcctgcccgccttcaaggacctgatcgccaaggtgcaggccgacgagcagttcggcatctggctggacagcagcagccccgagcagaccgtgccctacctgtggagcgaggagacccccgccacccccatcggccaggccatccacagactgctgctgatccaggccttcagacccgacagactgctggccatggcccacatgttcgtgagcaccaacctgggcgagagcttcatgagcatcatggagcagcccctggacctgacccacatcgtgggcaccgaggtgaagcccaacacccccgtgctgatgtgcagcgtgcccggctacgacgccagcggccacgtggaggacctggccgccgagcagaacacccagatcaccagcatcgccatcggcagcgccgagggcttcaaccaggccgacaaggccatcaacaccgccgtgaagagcggcagatgggtgatgctgaagaacgtgcacctggcccccggctggctgatgcagctggagaagaagctgcacagcctgcagccccacgcctgcttcagactgttcctgaccatggagatcaaccccaaggtgcccgtgaacctgctgagagccggcagaatcttcgtgttcgagcccccccccggcgtgaaggccaacatgctgagaaccttcagcagcatccccgtgagcagaatctgcaagagccccaacgagagagccagactgtacttcctgctggcctggttccacgccatcatccaggagagactgagatacgcccccctgggctggagcaagaagtacgagttcggcgagagcgacctgagaagcgcctgcgacaccgtggacacctggctggacgacaccgccaagggcagacagaacatcagccccgacaagatcccctggagcgccctgaagaccctgatggcccagagcatctacggcggcagagtggacaacgagttcgaccagagactgctgaacaccttcctggagagactgttcaccaccagaagcttcgacagcgagttcaagctggcctgcaaggtggacggccacaaggacatccagatgcccgacggcatcagaagagaggagttcgtgcagtgggtggagctgctgcccgacacccagacccccagctggctgggcctgcccaacaacgccgagagagtgctgctgaccacccagggcgtggacatgatcagcaagatgctgaagatgcagatgctggaggacgaggacgacctggcctacgccgagaccgagaagaagaccagaaccgacagcaccagcgacggcagacccgcctggatgagaaccctgcacaccaccgccagcaactggctgcacctgatcccccagaccctgagccacctgaagagaaccgtggagaacatcaaggaccccctgttcagattcttcgagagagaggtgaagatgggcgccaagctgctgcaggacgtgagacaggacctggccgacgtggtgcaggtgtgcgagggcaagaagaagcagaccaactacctgagaaccctgatcaacgagctggtgaagggcatcctgcccagaagctggagccactacaccgtgcccgccggcatgaccgtgatccagtgggtgagcgacttcagcgagagaatcaagcagctgcagaacatcagcctggccgccgccagcggcggcgccaaggagctgaagaacatccacgtgtgcctgggcggcctgttcgtgcccgaggcctacatcaccgccaccagacagtacgtggcccaggccaacagctggagcctggaggagctgtgcctggaggtgaacgtgaccaccagccagggcgccaccctggacgcctgcagcttcggcgtgaccggcctgaagctgcagggcgccacctgcaacaacaacaagctgagcctgagcaacgccatcagcaccgccctgcccctgacccagctgagatgggtgaagcagaccaacaccgagaagaaggccagcgtggtgaccctgcccgtgtacctgaacttcaccagagccgacctgatcttcaccgtggacttcgagatcgccaccaaggaggaccccagaagcttctacgagagaggcgtggccgtgctgtgcaccgagtag

SEQ ID NO: 79880 - DNA, 1899 bp, synthetic construct
  misc_feature 1..1899: note = Description of Artificial Sequence: Synthetic coding sequence
  source 1..1899: mol_type = other DNA
atgagcgacaagagcgagctgaaggccgagctggagagaaagaagcagagactggcccagatcagagaggagaagaagagaaaggaggaggagagaaagaagaaggagaccgaccagaagaaggaggccgtggcccccgtgcaggaggagagcgacctggagaagaagagaagagaggccgaggccctgctgcagagcatgggcctgacccccgagagccccatcgtgcccccccccatgagccccagcagcaagagcgtgagcacccccagcgaggccggcagccaggacagcggcgacggcgccgtgggcagcagaaccctgcactgggacaccgaccccagcgtgctgcagctgcacagcgacagcgacctgggcagaggccccatcaagctgggcatggccaagatcacccaggtggacttcccccccagagagatcgtgacctacaccaaggagacccagacccccgtgatggcccagcccaaggaggacgaggaggaggacgacgacgtggtggcccccaagccccccatcgagcccgaggaggagaagaccctgaagaaggacgaggagaacgacagcaaggcccccccccacgagctgaccgaggaggagaagcagcagatcctgcacagcgaggagttcctgagcttcttcgaccacagcaccagaatcgtggagagagccctgagcgagcagatcaacatcttcttcgactacagcggcagagacctggaggacaaggagggcgagatccaggccggcgccaagctgagcctgaacagacagttcttcgacgagagatggagcaagcacagagtggtgagctgcctggactggagcagccagtaccccgagctgctggtggccagctacaacaacaacgaggacgccccccacgagcccgacggcgtggccctggtgtggaacatgaagtacaagaagaccacccccgagtacgtgttccactgccagagcgccgtgatgagcgccaccttcgccaagttccaccccaacctggtggtgggcggcacctacagcggccagatcgtgctgtgggacaacagaagcaacaagagaacccccgtgcagagaacccccctgagcgccgccgcccacacccaccccgtgtactgcgtgaacgtggtgggcacccagaacgcccacaacctgatcagcatcagcaccgacggcaagatctgcagctggagcctggacatgctgagccacccccaggacagcatggagctggtgcacaagcagagcaaggccgtggccgtgaccagcatgagcttccccgtgggcgacgtgaacaacttcgtggtgggcagcgaggagggcagcgtgtacaccgcctgcagacacggcagcaaggccggcatcagcgagatgttcgagggccaccagggccccatcaccggcatccactgccacgccgccgtgggcgccgtggacttcagccacctgttcgtgaccagcagcttcgactggaccgtgaagctgtggaccaccaagaacaacaagcccctgtacagcttcgaggacaacgccgactacgtgtacgacgtgatgtggagccccacccaccccgccctgttcgcctgcgtggacggcatgggcagactggacctgtggaacctgaacaacgacaccgaggtgcccaccgccagcatcagcgtggagggcaaccccgccctgaacagagtgagatggacccacagcggcagagagatcgccgtgggcgacagcgagggccagatcgtgatctacgacgtgggcgagcagatcgccgtgcccagaaacgacgagtgggccagattcggcagaaccctggccgagatcaacgccaacagagccgacgccgaggaggaggccgccaccagaatccccgcctag

SEQ ID NO: 79881 - DNA, 1839 bp, synthetic construct
  misc_feature 1..1839: note = Description of Artificial Sequence: Synthetic coding sequence
  source 1..1839: mol_type = other DNA
atgagcgacaagagcgagctgaaggccgagctggagagaaagaagcagagactggcccagatcagagaggagaagaagagaaaggaggaggagagaaagaagaaggagaccgaccagaagaaggaggccgtggcccccgtgcaggaggagagcgacctggagaagaagagaagagaggccgaggccctgctgcagagcatgggcctgacccccgagagccccatcgtgcccccccccatgagccccagcagcaagagcgtgagcacccccagcgaggccggcagccaggacagcggcgacggcgccgtgggcagcagaagaggccccatcaagctgggcatggccaagatcacccaggtggacttcccccccagagagatcgtgacctacaccaaggagacccagacccccgtgatggcccagcccaaggaggacgaggaggaggacgacgacgtggtggcccccaagccccccatcgagcccgaggaggagaagaccctgaagaaggacgaggagaacgacagcaaggcccccccccacgagctgaccgaggaggagaagcagcagatcctgcacagcgaggagttcctgagcttcttcgaccacagcaccagaatcgtggagagagccctgagcgagcagatcaacatcttcttcgactacagcggcagagacctggaggacaaggagggcgagatccaggccggcgccaagctgagcctgaacagacagttcttcgacgagagatggagcaagcacagagtggtgagctgcctggactggagcagccagtaccccgagctgctggtggccagctacaacaacaacgaggacgccccccacgagcccgacggcgtggccctggtgtggaacatgaagtacaagaagaccacccccgagtacgtgttccactgccagagcgccgtgatgagcgccaccttcgccaagttccaccccaacctggtggtgggcggcacctacagcggccagatcgtgctgtgggacaacagaagcaacaagagaacccccgtgcagagaacccccctgagcgccgccgcccacacccaccccgtgtactgcgtgaacgtggtgggcacccagaacgcccacaacctgatcagcatcagcaccgacggcaagatctgcagctggagcctggacatgctgagccacccccaggacagcatggagctggtgcacaagcagagcaaggccgtggccgtgaccagcatgagcttccccgtgggcgacgtgaacaacttcgtggtgggcagcgaggagggcagcgtgtacaccgcctgcagacacggcagcaaggccggcatcagcgagatgttcgagggccaccagggccccatcaccggcatccactgccacgccgccgtgggcgccgtggacttcagccacctgttcgtgaccagcagcttcgactggaccgtgaagctgtggaccaccaagaacaacaagcccctgtacagcttcgaggacaacgccgactacgtgtacgacgtgatgtggagccccacccaccccgccctgttcgcctgcgtggacggcatgggcagactggacctgtggaacctgaacaacgacaccgaggtgcccaccgccagcatcagcgtggagggcaaccccgccctgaacagagtgagatggacccacagcggcagagagatcgccgtgggcgacagcgagggccagatcgtgatctacgacgtgggcgagcagatcgccgtgcccagaaacgacgagtgggccagattcggcagaaccctggccgagatcaacgccaacagagccgacgccgaggaggaggccgccaccagaatccccgcctag

SEQ ID NO: 79882 - DNA, 1893 bp, synthetic construct
  misc_feature 1..1893: note = Description of Artificial Sequence: Synthetic coding sequence
  source 1..1893: mol_type = other DNA
atgagcgacaagagcgagctgaaggccgagctggagagaaagaagcagagactggcccagatcagagaggagaagaagagaaaggaggaggagagaaagaagaaggagaccgaccagaagaaggaggccgtggcccccgtgcaggaggagagcgacctggagaagaagagaagagaggccgaggccctgctgcagagcatgggcctgacccccgagagccccatcgccgagcagcccctgagagtggtgaccgccgacacctgcctgttccactacctggtgcccccccccatgagccccagcagcaagagcgtgagcacccccagcgaggccggcagccaggacagcggcgacggcgccgtgggcagcagaagaggccccatcaagctgggcatggccaagatcacccaggtggacttcccccccagagagatcgtgacctacaccaaggagacccagacccccgtgatggcccagcccaaggaggacgaggaggaggacgacgacgtggtggcccccaagccccccatcgagcccgaggaggagaagaccctgaagaaggacgaggagaacgacagcaaggcccccccccacgagctgaccgaggaggagaagcagcagatcctgcacagcgaggagttcctgagcttcttcgaccacagcaccagaatcgtggagagagccctgagcgagcagatcaacatcttcttcgactacagcggcagagacctggaggacaaggagggcgagatccaggccggcgccaagctgagcctgaacagacagttcttcgacgagagatggagcaagcacagagtggtgagctgcctggactggagcagccagtaccccgagctgctggtggccagctacaacaacaacgaggacgccccccacgagcccgacggcgtggccctggtgtggaacatgaagtacaagaagaccacccccgagtacgtgttccactgccagagcgccgtgatgagcgccaccttcgccaagttccaccccaacctggtggtgggcggcacctacagcggccagatcgtgctgtgggacaacagaagcaacaagagaacccccgtgcagagaacccccctgagcgccgccgcccacacccaccccgtgtactgcgtgaacgtggtgggcacccagaacgcccacaacctgatcagcatcagcaccgacggcaagatctgcagctggagcctggacatgctgagccacccccaggacagcatggagctggtgcacaagcagagcaaggccgtggccgtgaccagcatgagcttccccgtgggcgacgtgaacaacttcgtggtgggcagcgaggagggcagcgtgtacaccgcctgcagacacggcagcaaggccggcatcagcgagatgttcgagggccaccagggccccatcaccggcatccactgccacgccgccgtgggcgccgtggacttcagccacctgttcgtgaccagcagcttcgactggaccgtgaagctgtggaccaccaagaacaacaagcccctgtacagcttcgaggacaacgccgactacgtgtacgacgtgatgtggagccccacccaccccgccctgttcgcctgcgtggacggcatgggcagactggacctgtggaacctgaacaacgacaccgaggtgcccaccgccagcatcagcgtggagggcaaccccgccctgaacagagtgagatggacccacagcggcagagagatcgccgtgggcgacagcgagggccagatcgtgatctacgacgtgggcgagcagatcgccgtgcccagaaacgacgagtgggccagattcggcagaaccctggccgagatcaacgccaacagagccgacgccgaggaggaggccgccaccagaatccccgcctag

SEQ ID NO: 79883 - DNA, 1917 bp, synthetic construct
  misc_feature 1..1917: note = Description of Artificial Sequence: Synthetic coding sequence
  source 1..1917: mol_type = other DNA
atgagcgacaagagcgagctgaaggccgagctggagagaaagaagcagagactggcccagatcagagaggagaagaagagaaaggaggaggagagaaagaagaaggagaccgaccagaagaaggaggccgtggcccccgtgcaggaggagagcgacctggagaagaagagaagagaggccgaggccctgctgcagagcatgggcctgacccccgagagccccatcgtgttcagcgagtactgggtgcccccccccatgagccccagcagcaagagcgtgagcacccccagcgaggccggcagccaggacagcggcgacggcgccgtgggcagcagaaccctgcactgggacaccgaccccagcgtgctgcagctgcacagcgacagcgacctgggcagaggccccatcaagctgggcatggccaagatcacccaggtggacttcccccccagagagatcgtgacctacaccaaggagacccagacccccgtgatggcccagcccaaggaggacgaggaggaggacgacgacgtggtggcccccaagccccccatcgagcccgaggaggagaagaccctgaagaaggacgaggagaacgacagcaaggcccccccccacgagctgaccgaggaggagaagcagcagatcctgcacagcgaggagttcctgagcttcttcgaccacagcaccagaatcgtggagagagccctgagcgagcagatcaacatcttcttcgactacagcggcagagacctggaggacaaggagggcgagatccaggccggcgccaagctgagcctgaacagacagttcttcgacgagagatggagcaagcacagagtggtgagctgcctggactggagcagccagtaccccgagctgctggtggccagctacaacaacaacgaggacgccccccacgagcccgacggcgtggccctggtgtggaacatgaagtacaagaagaccacccccgagtacgtgttccactgccagagcgccgtgatgagcgccaccttcgccaagttccaccccaacctggtggtgggcggcacctacagcggccagatcgtgctgtgggacaacagaagcaacaagagaacccccgtgcagagaacccccctgagcgccgccgcccacacccaccccgtgtactgcgtgaacgtggtgggcacccagaacgcccacaacctgatcagcatcagcaccgacggcaagatctgcagctggagcctggacatgctgagccacccccaggacagcatggagctggtgcacaagcagagcaaggccgtggccgtgaccagcatgagcttccccgtgggcgacgtgaacaacttcgtggtgggcagcgaggagggcagcgtgtacaccgcctgcagacacggcagcaaggccggcatcagcgagatgttcgagggccaccagggccccatcaccggcatccactgccacgccgccgtgggcgccgtggacttcagccacctgttcgtgaccagcagcttcgactggaccgtgaagctgtggaccaccaagaacaacaagcccctgtacagcttcgaggacaacgccgactacgtgtacgacgtgatgtggagccccacccaccccgccctgttcgcctgcgtggacggcatgggcagactggacctgtggaacctgaacaacgacaccgaggtgcccaccgccagcatcagcgtggagggcaaccccgccctgaacagagtgagatggacccacagcggcagagagatcgccgtgggcgacagcgagggccagatcgtgatctacgacgtgggcgagcagatcgccgtgcccagaaacgacgagtgggccagattcggcagaaccctggccgagatcaacgccaacagagccgacgccgaggaggaggccgccaccagaatccccgcctag

SEQ ID NO: 79884 - DNA, 1839 bp, synthetic construct; identical to SEQ ID NO: 79881
  misc_feature 1..1839: note = Description of Artificial Sequence: Synthetic coding sequence
  source 1..1839: mol_type = other DNA

SEQ ID NO: 79885 - DNA, 1899 bp, synthetic construct; identical to SEQ ID NO: 79880
  misc_feature 1..1899: note = Description of Artificial Sequence: Synthetic coding sequence
  source 1..1899: mol_type = other DNA

SEQ ID NO: 79886 - DNA, 1914 bp, synthetic construct
  misc_feature 1..1914: note = Description of Artificial Sequence: Synthetic coding sequence
  source 1..1914: mol_type = other DNA
atgagcgacaagagcgagctgaaggccgagctggagagaaagaagcagagactggcccagatcagagaggagaagaagagaaaggaggaggagagaaagaagaaggagaccgaccagaagaaggaggccgtggcccccgtgcaggaggagagcgacctggagaagaagagaagagaggccgaggccctgctgcagagcatgggcctgacccccgagagccccatcgtgttcagcgagtactgggtgcccccccccatgagccccagcagcaagagcgtgagcacccccagcgaggccggcagccaggacagcggcgacggcgccgtgggcagcagaaccctgcactgggacaccgaccccagcgtgctgcagctgcacagcgacagcgacctgggcagaggccccatcaagctgggcatggccaagatcacccaggtggacttcccccccagagagatcgtgacctacaccaaggagacccagacccccgtgatggcccagcccaaggaggacgaggaggaggacgacgacgtggtggcccccaagccccccatcgagcccgaggaggagaagaccctgaagaaggacgaggagaacgacagcaaggcccccccccacgagctgaccgaggaggagaagcagcagatcctgcacagcgaggagttcctgagcttcttcgaccacagcaccagaatcgtggagagagccctgagcgagcagatcaacatcttcttcgactacagcggcagagacctggaggacaaggagggcgagatccaggccggcgccaagctgagcctgaacagacagttcttcgacgagagatggagcaagcacagagtggtgagctgcctggactggagcagccagtaccccgagctgctggtggccagctacaacaacaacgaggacgccccccacgagcccgacggcgtggccctggtgtggaacatgaagtacaagaagaccacccccgagtacgtgttccactgccagagcgccgtgatgagcgccaccttcgccaagttccaccccaacctggtggtgggcggcacctacagcggccagatcgtgctgtgggacaacagaagcaacaagagaacccccgtgcagagaacccccctgagcgccgccgcccacacccaccccgtgtactgcgtgaacgtggtgggcacccagaacgcccacaacctgatcagcatcagcaccgacggcaagatctgcagctggagcctggacatgctgagccacccccaggacagcatggagctggtgcacaagcagagcaaggccgtggccgtgaccagcatgagcttccccgtgggcgacgtgaacaacttcgtggtgggcagcgaggagggcagcgtgtacaccgcctgcagacacggcagcaaggccggcatcagcgagatgttcgagggccaccagggccccatcaccggcatccactgccacgccgccgtgggcgccgtggacttcagccacctgttcgtgaccagcagcttcgactggaccgtgaagctgtggaccaccaagaacaacaagcccctgtacagcttcgaggacaacgccgactacgtgtacgacgtgatgtggagccccacccaccccgccctgttcgcctgcgtggacggcatgggcagactggacctgtggaacctgaacaacgacaccgaggtgcccaccgccagcatcagcgtggagggcaaccccgccctgaacagagtgagatggacccacagcggcagagagatcgccgtgggcgacagcgagggccagatcgtgatctacgacgtgggcgagatcgccgtgcccagaaacgacgagtgggccagattcggcagaaccctggccgagatcaacgccaacagagccgacgccgaggaggaggccgccaccagaatccccgcctag

SEQ ID NO: 79887 - DNA, 1917 bp, synthetic construct; identical to SEQ ID NO: 79883
  misc_feature 1..1917: note = Description of Artificial Sequence: Synthetic coding sequence
  source 1..1917: mol_type = other DNA

SEQ ID NO: 79888 - DNA, 1836 bp, synthetic construct
  misc_feature 1..1836: note = Description of Artificial Sequence: Synthetic coding sequence
  source 1..1836: mol_type = other DNA
atgagcgacaagagcgagctgaaggccgagctggagagaaagaagcagagactggcccagatcagagaggagaagaagagaaaggaggaggagagaaagaagaaggagaccgaccagaagaaggaggccgtggcccccgtgcaggaggagagcgacctggagaagaagagaagagaggccgaggccctgctgcagagcatgggcctgacccccgagagccccatcgtgcccccccccatgagccccagcagcaagagcgtgagcacccccagcgaggccggcagccaggacagcggcgacggcgccgtgggcagcagaagaggccccatcaagctgggcatggccaagatcacccaggtggacttcccccccagagagatcgtgacctacaccaaggagacccagacccccgtgatggcccagcccaaggaggacgaggaggaggacgacgacgtggtggcccccaagccccccatcgagcccgaggaggagaagaccctgaagaaggacgaggagaacgacagcaaggcccccccccacgagctgaccgaggaggagaagcagcagatcctgcacagcgaggagttcctgagcttcttcgaccacagcaccagaatcgtggagagagccctgagcgagcagatcaacatcttcttcgactacagcggcagagacctggaggacaaggagggcgagatccaggccggcgccaagctgagcctgaacagacagttcttcgacgagagatggagcaagcacagagtggtgagctgcctggactggagcagccagtaccccgagctgctggtggccagctacaacaacaacgaggacgccccccacgagcccgacggcgtggccctggtgtggaacatgaagtacaagaagaccacccccgagtacgtgttccactgccagagcgccgtgatgagcgccaccttcgccaagttccaccccaacctggtggtgggcggcacctacagcggccagatcgtgctgtgggacaacagaagcaacaagagaacccccgtgcagagaacccccctgagcgccgccgcccacacccaccccgtgtactgcgtgaacgtggtgggcacccagaacgcccacaacctgatcagcatcagcaccgacggcaagatctgcagctggagcctggacatgctgagccacccccaggacagcatggagctggtgcacaagcagagcaaggccgtggccgtgaccagcatgagcttccccgtgggcgacgtgaacaacttcgtggtgggcagcgaggagggcagcgtgtacaccgcctgcagacacggcagcaaggccggcatcagcgagatgttcgagggccaccagggccccatcaccggcatccactgccacgccgccgtgggcgccgtggacttcagccacctgttcgtgaccagcagcttcgactggaccgtgaagctgtggaccaccaagaacaacaagcccctgtacagcttcgaggacaacgccgactacgtgtacgacgtgatgtggagccccacccaccccgccctgttcgcctgcgtggacggcatgggcagactggacctgtggaacctgaacaacgacaccgaggtgcccaccgccagcatcagcgtggagggcaaccccgccctgaacagagtgagatggacccacagcggcagagagatcgccgtgggcgacagcgagggccagatcgtgatctacgacgtgggcgagatcgccgtgcccagaaacgacgagtgggccagattcggcagaaccctggccgagatcaacgccaacagagccgacgccgaggaggaggccgccaccagaatccccgcctag

SEQ ID NO: 79889 - DNA, 1917 bp, synthetic construct
  misc_feature 1..1917: note = Description of Artificial Sequence: Synthetic coding sequence
  source 1..1917: mol_type = other DNA
atgagcgacaagagcgagctgaaggccgagctggagagaaagaagcagagactggcccagatcagagaggagaagaagagaaaggaggaggagagaaagaagaaggagaccgaccagaagaaggaggccgtggcccccgtgcaggaggagagcgacctggagaagaagagaagagaggccgaggccctgctgcagagcatgggcctgacccccgagagccccatcgacatcgccgagtacctggtgcccccccccatgagccccagcagcaagagcgtgagcacccccagcgaggccggcagccaggacagcggcgacggcgccgtgggcagcagaaccctgcactgggacaccgaccccagcgtgctgcagctgcacagcgacagcgacctgggcagaggccccatcaagctgggcatggccaagatcacccaggtggacttcccccccagagagatcgtgacctacaccaaggagacccagacccccgtgatggcccagcccaaggaggacgaggaggaggacgacgacgtggtggcccccaagccccccatcgagcccgaggaggagaagaccctgaagaaggacgaggagaacgacagcaaggcccccccccacgagctgaccgaggaggagaagcagcagatcctgcacagcgaggagttcctgagcttcttcgaccacagcaccagaatcgtggagagagccctgagcgagcagatcaacatcttcttcgactacagcggcagagacctggaggacaaggagggcgagatccaggccggcgccaagctgagcctgaacagacagttcttcgacgagagatggagcaagcacagagtggtgagctgcctggactggagcagccagtaccccgagctgctggtggccagctacaacaacaacgaggacgccccccacgagcccgacggcgtggccctggtgtggaacatgaagtacaagaagaccacccccgagtacgtgttccactgccagagcgccgtgatgagcgccaccttcgccaagttccaccccaacctggtggtgggcggcacctacagcggccagatcgtgctgtgggacaacagaagcaacaagagaacccccgtgcagagaacccccctgagcgccgccgcccacacccaccccgtgtactgcgtgaacgtggtgggcacccagaacgcccacaacctgatcagcatcagcaccgacggcaagatctgcagctggagcctggacatgctgagccacccccaggacagcatggagctggtgcacaagcagagcaaggccgtggccgtgaccagcatgagcttccccgtgggcgacgtgaacaacttcgtggtgggcagcgaggagggcagcgtgtacaccgcctgcagacacggcagcaaggccggcatcagcgagatgttcgagggccaccagggccccatcaccggcatccactgccacgccgccgtgggcgccgtggacttcagccacctgttcgtgaccagcagcttcgactggaccgtgaagctgtggaccaccaagaacaacaagcccctgtacagcttcgaggacaacgccgactacgtgtacgacgtgatgtggagccccacccaccccgccctgttcgcctgcgtggacggcatgggcagactggacctgtggaacctgaacaacgacaccgaggtgcccaccgccagcatcagcgtggagggcaaccccgccctgaacagagtgagatggacccacagcggcagagagatcgccgtgggcgacagcgagggccagatcgtgatctacgacgtgggcgagcagatcgccgtgcccagaaacgacgagtgggccagattcggcagaaccctggccgagatcaacgccaacagagccgacgccgaggaggaggccgccaccagaatccccgcctag

SEQ ID NO: 79890 - DNA, 2763 bp, synthetic construct
  misc_feature 1..2763: note = Description of Artificial Sequence: Synthetic coding sequence
  source 1..2763: mol_type = other DNA
atggccaacggcaccgccgacgtgagaaagctgttcatcttcaccaccacccagaactacttcggcctgatgagcgagctgtgggaccagcccctgctgtgcaactgcctggagatcaacaacttcctggacgacggcaaccagatgctgctgagagtgcagagaagcgacgccggcatcagcttcagcaacaccatcgagttcggcgacaccaaggacaaggtgctggtgttcttcaagctgagacccgaggtgatcaccgacgagaacctgcacgacaacatcctggtgagcagcatgctggagagccccatcagcagcctgtaccaggccgtgagacaggtgttcgcccccatgctgctgaaggaccaggagtggagcagaaacttcgaccccaagctgcagaacctgctgagcgagctggaggccggcctgggcatcgtgctgagaagaagcgacaccaacctgaccaagctgaagttcaaggaggacgacaccagaggcatcctgacccccagcgacgagttccagttctggatcgagcaggcccacagaggcaacaagcagatcagcaaggagagagccaactacttcaaggagctgttcgagaccatcgccagagagttctacaacctggacagcctgagcctgctggaggtggtggacctggtggagaccacccaggacgtggtggacgacgtgtggagacagaccgagcacgaccactaccccgagagcagaatgctgcacctgctggacatcatcggcggcagcttcggcagattcgtgcagaagaagctgggcaccctgaacctgtgggaggacccctactacctggtgaaggagagcctgaaggccggcatcagcatctgcgagcagtgggtgatcgtgtgcaaccacctgaccggccaggtgtggcagagatacgtgccccacccctggaagaacgagaagtacttccccgagaccctggacaagctgggcaagagactggaggaggtgctggccatcagaaccatccacgagaagttcctgtacttcctgcccgccagcgaggagaagatcatctgcctgaccagagtgttcgagcccttcaccggcctgaaccccgtgcagtacaacccctacaccgagcccctgtggaaggccgccgtgagccagtacgagaagatcatcgcccccgccgagcagaagatcgccggcaagctgaagaactacatcagcgagatccaggacagcccccagcagctgctgcaggccttcctgaagtacaaggagctggtgaagagacccaccatcagcaaggagctgatgctggagagagagaccctgctggccagactggtggacagcatcaaggacttcagactggacttcgagaacagatgcagaggcatccccggcgacgccagcggccccctgagcggcaagaacctgagcgaggtggtgaacagcatcgtgtgggtgagacagctggagctgaaggtggacgacaccatcaagatcgccgaggccctgctgagcgacctgcccggcttcagatgcttccaccagagcgccaaggacctgctggaccagctgaagctgtacgagcaggagcagttcgacgactggagcagagacatccagagcggcctgagcgacagcagaagcggcctgtgcatcgaggccagcagcagaatcatggagctggacagcaacgacggcctgctgaaggtgcactacagcgacagactggtgatcctgctgagagaggtgagacagctgagcgccctgggcttcgtgatccccgccaagatccagcaggtggccaacatcgcccagaagttctgcaagcaggccatcatcctgaagcaggtggcccacttctacaacagcatcgaccagcagatgatccagagccagagacccatgatgctgcagagcgccctggccttcgagcagatcatcaagaacagcaaggccggcagcggcggcaagagccagatcacctgggacaaccccaaggagctggagggctacatccagaagctgcagaacgccgccgagagactggccaccgagaacagaaagctgagaaagtggcacaccaccttctgcgagaaggtggtggtgctgatgaacatcgacctgctgagacagcagcagagatggaaggacggcctgcaggagctgagaaccggcctggccaccgtggaggcccagtgccccctggcctggcagagcaagtgggagggccccgaggaccccctgcagtacctgagaggcctggtggccagagccctggccatccagaactgggtggacaaggccgagaagcaggccctgctgagcgagaccctggacctgagcgagctgttccaccccgacaccttcctgaacgccctgagacaggagaccgccagagccgtgggcagaagcgtggacagcctgaagttcgtggccagctggaagggcagactgcaggaggccaagctgcagatcaagatcagcggcctgctgctggagggctgcagcttcgacggcaaccagctgagcgagaaccagctggacagccccagcgtgagcagcgtgctgccctgcttcatgggctggatcccccaggacgcctgcggcccctacagccccgacgagtgcatcagcctgcccgtgtacaccagcgccgagagagacagagtggtgaccaacatcgacgtgccctgcggcggcaaccaggaccagtggatccagtgcggcgccgccctgttcctgaagaaccagtag

SEQ ID NO: 79891 - DNA, 12924 bp, synthetic construct
  misc_feature 1..12924: note = Description of Artificial Sequence: Synthetic coding sequence
  source 1..12924: mol_type = other DNA
atggccaacggcaccgccgacgtgagaaagctgttcatcttcaccaccacccagaactacttcggcctgatgagcgagctgtgggaccagcccctgctgtgcaactgcctggagatcaacaacttcctggacgacggcaaccagatgctgctgagagtgcagagaagcgacgccggcatcagcttcagcaacaccatcgagttcggcgacaccaaggacaaggtgctggtgttcttcaagctgagacccgaggtgatcaccgacgagaacctgcacgacaacatcctggtgagcagcatgctggagagccccatcagcagcctgtaccaggccgtgagacaggtgttcgcccccatgctgctgaaggaccaggagtggagcagaaacttcgaccccaagctgcagaacctgctgagcgagctggaggccggcctgggcatcgtgctgagaagaagcgacaccaacctgaccaagctgaagttcaaggaggacgacaccagaggcatcctgacccccagcgacgagttccagttctggatcgagcaggcccacagaggcaacaagcagatcagcaaggagagagccaactacttcaaggagctgttcgagaccatcgccagagagttctacaacctggacagcctgagcctgctggaggtggtggacctggtggagaccacccaggacgtggtggacgacgtgtggagacagaccgagcacgaccactaccccgagagcagaatgctgcacctgctggacatcatcggcggcagcttcggcagattcgtgcagaagaagctgggcaccctgaacctgtgggaggacccctactacctggtgaaggagagcctgaaggccggcatcagcatctgcgagcagtgggtgatcgtgtgcaaccacctgaccggccaggtgtggcagagatacgtgccccacccctggaagaacgagaagtacttccccgagaccctggacaagctgggcaagagactggaggaggtgctggccatcagaaccatccacgagaagttcctgtacttcctgcccgccagcgaggagaagatcatctgcctgaccagagtgttcgagcccttcaccggcctgaaccccgtgcagtacaacccctacaccgagcccctgtggaaggccgccgtgagccagtacgagaagatcatcgcccccgccgagcagaagatcgccggcaagctgaagaactacatcagcgagatccaggacagcccccagcagctgctgcaggccttcctgaagtacaaggagctggtgaagagacccaccatcagcaaggagctgatgctggagagagagaccctgctggccagactggtggacagcatcaaggacttcagactggacttcgagaacagatgcagaggcatccccggcgacgccagcggccccctgagcggcaagaacctgagcgaggtggtgaacagcatcgtgtgggtgagacagctggagctgaaggtggacgacaccatcaagatcgccgaggccctgctgagcgacctgcccggcttcagatgcttccaccagagcgccaaggacctgctggaccagctgaagctgtacgagcaggagcagttcgacgactggagcagagacatccagagcggcctgagcgacagcagaagcggcctgtgcatcgaggccagcagcagaatcatggagctggacagcaacgacggcctgctgaaggtgcactacagcgacagactggtgatcctgctgagagaggtgagacagctgagcgccctgggcttcgtgatccccgccaagatccagcaggtggccaacatcgcccagaagttctgcaagcaggccatcatcctgaagcaggtggcccacttctacaacagcatcgaccagcagatgatccagagccagagacccatgatgctgcagagcgccctggccttcgagcagatcatcaagaacagcaaggccggcagcggcggcaagagccagatcacctgggacaaccccaaggagctggagggctacatccagaagctgcagaacgccgccgagagactggccaccgagaacagaaagctgagaaagtggcacaccaccttctgcgagaaggtggtggtgctgatgaacatcgacctgctgagacagcagcagagatggaaggacggcctgcaggagctgagaaccggcctggccaccgtggaggcccagggcttccaggccagcgacatgcacgcctggaagcagcactggaaccaccagctgtacaaggccctggagcaccagtaccagatgggcctggaggccctgaacgagaacctgcccgagatcaacatcgacctgacctacaagcagggcagactgcagttcagaccccccttcgaggagatcagagccaagtactacagagagatgaagagattcatcggcatccccaaccagttcaagggcgtgggcgaggccggcgacgagagcatcttcagcatcatgatcgacagaaacgccagcggcttcctgaccatcttcagcaaggccgaggacctgttcagaagactgagcgccgtgctgcaccagcacaaggagtggatcgtgatcggccaggtggacatggaggccctggtggagaagcacctgttcaccgtgcacgactgggagaagaacttcaaggccctgaagatcaagggcaaggaggtggagagactgcccagcgccgtgaaggtggactgcctgaacatcaactgcaaccccgtgaagaccgtgatcgacgacctgatccagaagctgttcgacctgctggtgctgagcctgaagaagagcatccaggcccacctgcacgagatcgacaccttcgtgaccgaggccatggaggtgctgaccatcatgccccagagcgtggaggagatcggcgacgccaacctgcagtacagcaagctgcaggagagaaagcccgagatcctgcccctgttccaggaggccgaggacaagaacagactgctgagaaccgtggccggcggcggcctggagaccatcagcaacctgaaggccaagtgggacaagttcgagctgatgatggagagccaccagctgatgatcaaggaccagatcgaggtgatgaagggcaacgtgaagagcagactgcagatctactaccaggagctggagaagttcaaggccagatgggaccagctgaagcccggcgacgacgtgatcgagaccggccagcacaacaccctggacaagagcgccaagctgatcaaggagaagaagatcgagttcgacgacctggaggtgaccagaaagaagctggtggacgactgccaccacttcagactggaggagcccaacttcagcctggccagcagcatcagcaaggacatcgagagctgcgcccagatctgggccttctacgaggagttccagcagggcttccaggagatggccaacgaggactggatcaccttcagaaccaagacctacctgttcgaggagttcctgatgaactggcacgacagactgagaaaggtggaggagcacagcgtgatgaccgtgaagctgcagagcgaggtggacaagtacaagatcgtgatccccatcctgaagtacgtgagaggcgagcacctgagccccgaccactggctggacctgttcagactgctgggcctgcccagaggcaccagcctggagaagctgctgttcggcgacctgctgagagtggccgacaccatcgtggccaaggccgccgacctgaaggacctgaacagcagagcccagggcgaggtgaccatcagagaggccctgagagagctggacctgtggggcgtgggcgccgtgttcaccctgatcgactacgaggacagccagagcagaaccatgaagctgatcaaggactggaaggacatcgtgaaccaggtgggcgacaacagatgcctgctgcagagcctgaaggacagcccctactacaagggcttcgaggacaaggtgagcatctgggagagaaagctggccgagctggacgagtacctgcagaacctgaaccacatccagagaaagtgggtgtacctggagcccatcttcggcagaggcgccctgcccaaggagcagaccagattcaacagagtggacgaggacttcagaagcatcatgaccgacatcaagaaggacaacagagtgaccaccctgaccacccacgccggcatcagaaacagcctgctgaccatcctggaccagctgcagagatgccagaagagcctgaacgagttcctggaggagaagagaagcgccttccccagattctacttcatcggcgacgacgacctgctggagatcctgggccagagcaccaaccccagcgtgatccagagccacctgaagaagctgttcgccggcatcaacagcgtgtgcttcgacgagaagagcaagcacatcaccgccatgaagagcctggagggcgaggtggtgcccttcaagaacaaggtgcccctgagcaacaacgtggagacctggctgaacgacctggccctggagatgaagaagaccctggagcagctgctgaaggagtgcgtgaccaccggcagaagcagccagggcgccgtggaccccagcctgttccccagccagatcctgtgcctggccgagcagatcaagttcaccgaggacgtggagaacgccatcaaggaccacagcctgcaccagatcgagacccagctggtgaacaagctggagcagtacaccaacatcgacaccagcagcgaggaccccggcaacaccgagagcggcatcctggagctgaagctgaaggccctgatcctggacatcatccacaacatcgacgtggtgaagcagctgaaccagatccaggtgcacaccaccgaggactgggcctggaagaagcagctgagattctacatgaagagcgaccacacctgctgcgtgcagatggtggacagcgagttccagtacacctacgagtaccagggcaacgccagcaagctggtgtacacccccctgaccgacaagtgctacctgaccctgacccaggccatgaagatgggcctgggcggcaacccctacggccccgccggcaccggcaagaccgagagcgtgaaggccctgggcggcctgctgggcagacaggtgctggtgttcaactgcgacgagggcatcgacgtgaagagcatgggcagaatcttcgtgggcctggtgaagtgcggcgcctggggctgcttcgacgagttcaacagactggaggagagcgtgctgagcgccgtgagcatgcagatccagaccatccaggacgccctgaagaaccacagaaccgtgtgcgagctgctgggcaaggaggtggaggtgaacagcaacagcggcatcttcatcaccatgaaccccgccggcaagggctacggcggcagacagaagctgcccgacaacctgaagcagctgttcagacccgtggccatgagccaccccgacaacgagctgatcgccgaggtgatcctgtacagcgagggcttcaaggacgccaaggtgctgagcagaaagctggtggccatcttcaacctgagcagagagctgctgaccccccagcagcactacgactggggcctgagagccctgaagaccgtgctgagaggcagcggcaacctgctgagacagctgaacaagagcggcaccacccagaacgccaacgagagccacatcgtggtgcaggccctgagactgaacaccatgagcaagttcaccttcaccgactgcaccagattcgacgccctgatcaaggacgtgttccccggcatcgagctgaaggaggtggagtacgacgagctgagcgccgccctgaagcaggtgttcgaggaggccaactacgagatcatccccaaccagatcaagaaggccctggagctgtacgagcagctgtgccagagaatgggcgtggtgatcgtgggccccagcggcgccggcaagagcaccctgtggagaatgctgagagccgccctgtgcaagaccggcaaggtggtgaagcagtacaccatgaaccccaaggccatgcccagataccagctgctgggccacatcgacatggacaccagagagtggagcgacggcgtgctgaccaacagcgccagacaggtggtgagagagccccaggacgtgagcagctggatcatctgcgacggcgacatcgaccccgagtggatcgagagcctgaacagcgtgctggacgacaacagactgctgaccatgcccagcggcgagagaatccagttcggccccaacgtgaacttcgtgttcgagacccacgacctgagctgcgccagccccgccaccatcagcagaatgggcatgatcttcctgagcgacgaggagaccgacctgaacagcctgatcaagagctggctgagaaaccagcccgccgagtacagaaacaacctggagaactggatcggcgactacttcgagaaggccctgcagtgggtgctgaagcagaacgactacgtggtggagaccagcctggtgggcaccgtgatgaacggcctgagccacctgcacggctgcagagaccacgacgagttcatcatcaacctgatcagaggcctgggcggcaacctgaacatgaagagcagactggagttcaccaaggaggtgttccactgggccagagagagcccccccgacttccacaagcccatggacacctactacgacagcaccagaggcagactggccacctacgtgctgaagaagcccgaggacctgaccgccgacgacttcagcaacggcctgaccctgcccgtgatccagacccccgacatgcagagaggcctggactacttcaagccctggctgagcagcgacaccaagcagcccttcatcctggtgggccccgagggctgcggcaagggcatgctgctgagatacgccttcagccagctgagaagcacccagatcgccaccgtgcactgcagcgcccagaccaccagcagacacctgctgcagaagctgagccagacctgcatggtgatcagcaccaacaccggcagagtgtacagacccaaggactgcgagagactggtgctgtacctgaaggacatcaacctgcccaagctggacaagtggggcaccagcaccctggtggccttcctgcagcaggtgctgacctaccagggcttctacgacgagaacctggagtgggtgggcctggagaacatccagatcgtggccagcatgagcgccggcggcagactgggcagacacaagctgaccaccagattcaccagcatcgtgagactgtgcagcatcgactaccccgagagagagcagctgcagaccatctacggcgcctacctggagcccgtgctgcacaagaacctgaagaaccacagcatctggggcagcagcagcaagatctacctgctggccggcagcatggtgcaggtgtacgagcaggtgagagccaagttcaccgtggacgactacagccactacttcttcaccccctgcatcctgacccagtgggtgctgggcctgttcagatacgacctggagggcggcagcagcaaccaccccctggactacgtgctggagatcgtggcctacgaggccagaagactgttcagagacaagatcgtgggcgccaaggagctgcacctgttcgacatcatcctgaccagcgtgttccagggcgactggggcagcgacatcctggacaacatgagcgacagcttctacgtgacctggggcgccagacacaacagcggcgccagagccgcccccggccagcccctgcccccccacggcaagcccctgggcaagctgaacagcaccgacctgaaggacgtgatcaagaagggcctgatccactacggcagagacaaccagaacctggacatcctgctgttccacgaggtgctggagtacatgagcagaatcgacagagtgctgagcttccccggcggcagcctgctgctggccggcagaagcggcgtgggcagaagaaccatcaccagcctggtgagccacatgcacggcgccgtgctgttcagccccaagatcagcagaggctacgagctgaagcagttcaagaacgacctgaagcacgtgctgcagctggccggcatcgaggcccagcaggtggtgctgctgctggaggactaccagttcgtgcaccccaccttcctggagatgatcaacagcctgctgagcagcggcgaggtgcccggcctgtacaccctggaggagctggagcccctgctgctgcccctgaaggaccaggccagccaggacggcttcttcggccccgtgttcaactacttcacctacagaatccagcagaacctgcacatcgtgctgatcatggacagcgccaacagcaacttcatgatcaactgcgagagcaaccccgccctgcacaagaagtgccaggtgctgtggatggagggctggagcaacagcagcatgaagaagatccccgagatgctgttcagcgagaccggcggcggcgagaagtacaacgacaagaagagaaaggaggagaagaagaagaacagcgtggaccccgacttcctgaagagcttcctgctgatccacgagagctgcaaggcctacggcgccacccccagcagatacatgaccttcctgcacgtgtacagcgccatcagcagcagcaagaagaaggagctgctgaagagacagagccacctgcaggccggcgtgagcaagctgaacgaggccaaggccctggtggacgagctgaacagaaaggccggcgagcagagcgtgctgctgaagaccaagcaggacgaggccgacgccgccctgcagatgatcaccgtgagcatgcaggacgccagcgagcagaagaccgagctggagagactgaagcacagaatcgccgaggaggtggtgaagatcgaggagagaaagaacaagatcgacgacgagctgaaggaggtgcagcccctggtgaacgaggccaagctggccgtgggcaacatcaagcccgagagcctgagcgagatcagaagcctgagaatgccccccgacgtgatcagagacatcctggagggcgtgctgagactgatgggcatcttcgacaccagctgggtgagcatgaagagcttcctggccaagagaggcgtgagagaggacatcgccaccttcgacgccagaaacatcagcaaggagatcagagagagcgtggaggagctgctgttcaagaacaagggcagcttcgaccccaagaacgccaagagagccagcaccgccgccgcccccctggccgcctgggtgaaggccaacatccagtacagccacgtgctggagagaatccaccccctggagaccgagcaggccggcctggagagcaacctgaagaagaccgaggacagaaagagaaagctggaggagctgctgaacagcgtgggccagaaggtgagcgagctgaaggagaagttccagagcagaaccagcgaggccgccaagctggaggccgaggtgagcaaggcccaggagaccatcaaggccgccgaggtgctgatcaaccagctggacagagagcacaagagatggaacgcccaggtggtggagatcaccgaggagctggccaccctgcccaagagagcccagctggccgccgccttcatcacctacctgagcgccgcccccgagagcctgagaaagacctgcctggaggagtggaccaagagcgccggcctggagaagttcgacctgagaagattcctgtgcaccgagagcgagcagctgatctggaagagcgagggcctgcccagcgacgacctgagcatcgagaacgccctggtgatcctgcagagcagagtgtgccccttcctgatcgaccccagcagccaggccaccgagtggctgaagacccacctgaaggacagcagactggaggtgatcaaccagcaggacagcaacttcatcaccgccctggagctggccgtgagattcggcaagaccctgatcatccaggagatggacggcgtggagcccgtgctgtaccccctgctgagaagagacctggtggcccagggccccagatacgtggtgcagatcggcgacaagatcatcgactacaacgaggagttcagactgttcctgagcaccagaaaccccaaccccttcatcccccccgacgccgccagcatcgtgaccgaggtgaacttcaccaccaccagaagcggcctgagaggccagctgctggccctgaccatccagcacgagaagcccgacctggaggagcagaagaccaagctgctgcagcaggaggaggacaagaagatccagctggccaagctggaggagagcctgctggagaccctggccaccagccagggcaacatcctggagaacaaggacctgatcgagagcctgaaccagaccaaggccagcagcgccctgatccaggagagcctgaaggagagctacaagctgcagatcagcctggaccaggagagagacgcctacctgcccctggccgagagcgccagcaagatgtacttcatcatcagcgacctgagcaagatcaacaacatgtacagattcagcctggccgccttcctgagactgttccagagagccctgcagaacaagcaggacagcgagaacaccgagcagagaatccagagcctgatcagcagcctgcagcacatggtgtacgagtacatctgcagatgcctgttcaaggccgaccagctgatgttcgccctgcacttcgtgagaggcatgcaccccgagctgttccaggagaacgagtgggacaccttcaccggcgtggtggtgggcgacatgctgagaaaggccgacagccagcagaagatcagagaccagctgcccagctggatcgaccaggagagaagctgggccgtggccaccctgaagatcgccctgcccagcctgtaccagaccctgtgcttcgaggacgccgccctgtggagaacctactacaacaacagcatgtgcgagcaggagttccccagcatcctggccaagaaggtgagcctgttccagcagatcctggtggtgcaggccctgagacccgacagactgcagagcgccatggccctgttcgcctgcaagaccctgggcctgaaggaggtgagccccctgcccctgaacctgaagagactgtacaaggagaccctggagatcgagcccatcctgatcatcatcagccccggcgccgaccccagccaggagctgcaggagctggccaacgccgagagaagcggcgagtgctaccaccaggtggccatgggccagggccaggccgacctggccatccagatgctgaaggagtgcgccagaaacggcgactggctgtgcctgaagaacctgcacctggtggtgagctggctgcccgtgctggagaaggagctgaacaccctgcagcccaaggacaccttcagactgtggctgaccgccgaggtgcaccccaacttcacccccatcctgctgcagagcagcctgaagatcacctacgagagcccccccggcctgaagaagaacctgatgagaacctacgagagctggacccccgagcagatcagcaagaaggacaacacccacagagcccacgccctgttcagcctggcctggttccacgccgcctgccaggagagaagaaactacatcccccagggctggaccaagttctacgagttcagcctgagcgacctgagagccggctacaacatcatcgacagactgttcgacggcgccaaggacgtgcagtgggagttcgtgcacggcctgctggagaacgccatctacggcggcagaatcgacaactacttcgacctgagagtgctgcagagctacctgaagcagttcttcaacagcagcgtgatcgacgtgttcaaccagagaaacaagaagagcatcttcccctacagcgtgagcctgccccagagctgcagcatcctggactacagagccgtgatcgagaagatccccgaggacgacaagcccagcttcttcggcctgcccgccaacatcgccagaagcagccagagaatgatcagcagccaggtgatcagccagctgagaatcctgggcagaagcatcaccgccggcagcaagttcgacagagagatctggagcaacgagctgagccccgtgctgaacctgtggaagaagctgaaccagaacagcaacctgatccaccagaaggtgcccccccccaacgacagacagggcagccccatcctgagcttcatcatcctggagcagttcaacgccatcagactggtgcagagcgtgcaccagagcctggccgccctgagcaaggtgatcagaggcaccaccctgctgagcagcgaggtgcagaagctggccagcgccctgctgaaccagaagtgccccctggcctggcagagcaagtgggagggccccgaggaccccctgcagtacctgagaggcctggtggccagagccctggccatccagaactgggtggacaaggccgagaagcaggccctgctgagcgagaccctggacctgagcgagctgttccaccccgacaccttcctgaacgccctgagacaggagaccgccagagccgtgggcagaagcgtggacagcctgaagttcgtggccagctggaagggcagactgcaggaggccaagctgcagatcaagatcagcggcctgctgctggagggctgcagcttcgacggcaaccagctgagcgagaaccagctggacagccccagcgtgagcagcgtgctgccctgcttcatgggctggatcccccaggacgcctgcggcccctacagccccgacgagtgcatcagcctgcccgtgtacaccagcgccgagagagacagagtggtgaccaacatcgacgtgccctgcggcggcaaccaggaccagtggatccagtgcggcgccgccctgttcctgaagaaccagtag

SEQ ID NO: 79892 - DNA, 12945 bp, synthetic construct
  misc_feature 1..12945: note = Description of Artificial Sequence: Synthetic coding sequence
  source 1..12945: mol_type = other DNA
atggccaacggcaccgccgacgtgagaaagctgttcatcttcaccaccacccagaactacttcggcctgatgagcgagctgtgggaccagcccctgctgtgcaactgcctggagatcaacaacttcctggacgacggcaaccagatgctgctgagagtgcagagaagcgacgccggcatcagcttcagcaacaccatcgagttcggcgacaccaaggacaaggtgctggtgttcttcaagctgagacccgaggtgatcaccgacgagaacctgcacgacaacatcctggtgagcagcatgctggagagccccatcagcagcctgtaccaggccgtgagacaggtgttcgcccccatgctgctgaaggaccaggagtggagcagaaacttcgaccccaagctgcagaacctgctgagcgagctggaggccggcctgggcatcgtgctgagaagaagcgacaccaacctgaccaagctgaagttcaaggaggacgacaccagaggcatcctgacccccagcgacgagttccagttctggatcgagcaggcccacagaggcaacaagcagatcagcaaggagagagccaactacttcaaggagctgttcgagaccatcgccagagagttctacaacctggacagcctgagcctgctggaggtggtggacctggtggagaccacccaggacgtggtggacgacgtgtggagacagaccgagcacgaccactaccccgagagcagaatgctgcacctgctggacatcatcggcggcagcttcggcagattcgtgcagaagaagctgggcaccctgaacctgtgggaggacccctactacctggtgaaggagagcctgaaggccggcatcagcatctgcgagcagtgggtgatcgtgtgcaaccacctgaccggccaggtgtggcagagatacgtgccccacccctggaagaacgagaagtacttccccgagaccctggacaagctgggcaagagactggaggaggtgctggccatcagaaccatccacgagaagttcctgtacttcctgcccgccagcgaggagaagatcatctgcctgaccagagtgttcgagcccttcaccggcctgaaccccgtgcagtacaacccctacaccgagcccctgtggaaggccgccgtgagccagtacgagaagatcatcgcccccgccgagcagaagatcgccggcaagctgaagaactacatcagcgagatccaggacagcccccagcagctgctgcaggccttcctgaagtacaaggagctggtgaagagacccaccatcagcaaggagctgatgctggagagagagaccctgctggccagactggtggacagcatcaaggacttcagactggacttcgagaacagatgcagaggcatccccggcgacgccagcggccccctgagcggcaagaacctgagcgaggtggtgaacagcatcgtgtgggtgagacagctggagctgaaggtggacgacaccatcaagatcgccgaggccctgctgagcgacctgcccggcttcagatgcttccaccagagcgccaaggacctgctggaccagctgaagctgtacgagcaggagcagttcgacgactggagcagagacatccagagcggcctgagcgacagcagaagcggcctgtgcatcgaggccagcagcagaatcatggagctggacagcaacgacggcctgctgaaggtgcactacagcgacagactggtgatcctgctgagagaggtgagacagctgagcgccctgggcttcgtgatccccgccaagatccagcaggtggccaacatcgcccagaagttctgcaagcaggccatcatcctgaagcaggtggcccacttctacaacagcatcgaccagcagatgatccagagccagagacccatgatgctgcagagcgccctggccttcgagcagatcatcaagaacagcaaggccggcagcggcggcaagagccagatcacctgggacaaccccaaggagctggagggctacatccagaagctgcagaacgccgccgagagactggccaccgagaacagaaagctgagaaagtggcacaccaccttctgcgagaaggtggtggtgctgatgaacatcgacctgctgagacagcagcagagatggaaggacggcctgcaggagctgagaaccggcctggccaccgtggaggcccagggcttccaggccagcgacatgcacgcctggaagcagcactggaaccaccagctgtacaaggccctggagcaccagtaccagatgggcctggaggccctgaacgagaacctgcccgagatcaacatcgacctgacctacaagcagggcagactgcagttcagaccccccttcgaggagatcagagccaagtactacagagagatgaagagattcatcggcatccccaaccagttcaagggcgtgggcgaggccggcgacgagagcatcttcagcatcatgatcgacagaaacgccagcggcttcctgaccatcttcagcaaggccgaggacctgttcagaagactgagcgccgtgctgcaccagcacaaggagtggatcgtgatcggccaggtggacatggaggccctggtggagaagcacctgttcaccgtgcacgactgggagaagaacttcaaggccctgaagatcaagggcaaggaggtggagagactgcccagcgccgtgaaggtggactgcctgaacatcaactgcaaccccgtgaagaccgtgatcgacgacctgatccagaagctgttcgacctgctggtgctgagcctgaagaagagcatccaggcccacctgcacgagatcgacaccttcgtgaccgaggccatggaggtgctgaccatcatgccccagagcgtggaggagatcggcgacgccaacctgcagtacagcaagctgcaggagagaaagcccgagatcctgcccctgttccaggaggccgaggacaagaacagactgctgagaaccgtggccggcggcggcctggagaccatcagcaacctgaaggccaagtgggacaagttcgagctgatgatggagagccaccagctgatgatcaaggaccagatcgaggtgatgaagggcaacgtgaagagcagactgcagatctactaccaggagctggagaagttcaaggccagatgggaccagctgaagcccggcgacgacgtgatcgagaccggccagcacaacaccctggacaagagcgccaagctgatcaaggagaagaagatcgagttcgacgacctggaggtgaccagaaagaagctggtggacgactgccaccacttcagactggaggagcccaacttcagcctggccagcagcatcagcaaggacatcgagagctgcgcccagatctgggccttctacgaggagttccagcagggcttccaggagatggccaacgaggactggatcaccttcagaaccaagacctacctgttcgaggagttcctgatgaactggcacgacagactgagaaaggtggaggagcacagcgtgatgaccgtgaagctgcagagcgaggtggacaagtacaagatcgtgatccccatcctgaagtacgtgagaggcgagcacctgagccccgaccactggctggacctgttcagactgctgggcctgcccagaggcaccagcctggagaagctgctgttcggcgacctgctgagagtggccgacaccatcgtggccaaggccgccgacctgaaggacctgaacagcagagcccagggcgaggtgaccatcagagaggccctgagagagctggacctgtggggcgtgggcgccgtgttcaccctgatcgactacgaggacagccagagcagaaccatgaagctgatcaaggactggaaggacatcgtgaaccaggtgggcgacaacagatgcctgctgcagagcctgaaggacagcccctactacaagggcttcgaggacaaggtgagcatctgggagagaaagctggccgagctggacgagtacctgcagaacctgaaccacatccagagaaagtgggtgtacctggagcccatcttcggcagaggcgccctgcccaaggagcagaccagattcaacagagtggacgaggacttcagaagcatcatgaccgacatcaagaaggacaacagagtgaccaccctgaccacccacgccggcatcagaaacagcctgctgaccatcctggaccagctgcagagatgccagaagagcctgaacgagttcctggaggagaagagaagcgccttccccagattctacttcatcggcgacgacgacctgctggagatcctgggccagagcaccaaccccagcgtgatccagagccacctgaagaagctgttcgccggcatcaacagcgtgtgcttcgacgagaagagcaagcacatcaccgccatgaagagcctggagggcgaggtggtgcccttcaagaacaaggtgcccctgagcaacaacgtggagacctggctgaacgacctggccctggagatgaagaagaccctggagcagctgctgaaggagtgcgtgaccaccggcagaagcagccagggcgccgtggaccccagcctgttccccagccagatcctgtgcctggccgagcagatcaagttcaccgaggacgtggagaacgccatcaaggaccacagcctgcaccagatcgagacccagctggtgaacaagctggagcagtacaccaacatcgacaccagcagcgaggaccccggcaacaccgagagcggcatcctggagctgaagctgaaggccctgatcctggacatcatccacaacatcgacgtggtgaagcagctgaaccagatccaggtgcacaccaccgaggactgggcctggaagaagcagctgagattctacatgaagagcgaccacacctgctgcgtgcagatggtggacagcgagttccagtacacctacgagtaccagggcaacgccagcaagctggtgtacacccccctgaccgacaagtgctacctgaccctgacccaggccatgaagatgggcctgggcggcaacccctacggccccgccggcaccggcaagaccgagagcgtgaaggccctgggcggcctgctgggcagacaggtgctggtgttcaactgcgacgagggcatcgacgtgaagagcatgggcagaatcttcgtgggcctggtgaagtgcggcgcctggggctgcttcgacgagttcaacagactggaggagagcgtgctgagcgccgtgagcatgcagatccagaccatccaggacgccctgaagaaccacagaaccgtgtgcgagctgctgggcaaggaggtggaggtgaacagcaacagcggcatcttcatcaccatgaaccccgccggcaagggctacggcggcagacagaagctgcccgacaacctgaagcagctgttcagacccgtggccatgagccaccccgacaacgagctgatcgccgaggtgatcctgtacagcgagggcttcaaggacgccaaggtgctgagcagaaagctggtggccatcttcaacctgagcagagagctgctgaccccccagcagcactacgactggggcctgagagccctgaagaccgtgctgagaggcagcggcaacctgctgagacagctgaacaagagcggcaccacccagaacgccaacgagagccacatcgtggtgcaggccctgagactgaacaccatgagcaagttcaccttcaccgactgcaccagattcgacgccctgatcaaggacgtgttccccggcatcgagctgaaggaggtggagtacgacgagctgagcgccgccctgaagcaggtgttcgaggaggccaactacgagatcatccccaaccagatcaagaaggccctggagctgtacgagcagctgtgccagagaatgggcgtggtgatcgtgggccccagcggcgccggcaagagcaccctgtggagaatgctgagagccgccctgtgcaagaccggcaaggtggtgaagcagtacaccatgaaccccaaggccatgcccagataccagctgctgggccacatcgacatggacaccagagagtggagcgacggcgtgctgaccaacagcgccagacaggtggtgagagagccccaggacgtgagcagctggatcatctgcgacggcgacatcgaccccgagtggatcgagagcctgaacagcgtgctggacgacaacagactgctgaccatgcccagcggcgagagaatccagttcggccccaacgtgaacttcgtgttcgagacccacgacctgagctgcgccagccccgccaccatcagcagaatgggcatgatcttcctgagcgacgaggagaccgacctgaacagcctgatcaagagctggctgagaaaccagcccgccgagtacagaaacaacctggagaactggatcggcgactacttcgagaaggccctgcagtgggtgctgaagcagaacgactacgtggtggagaccagcctggtgggcaccgtgatgaacggcctgagccacctgcacggctgcagagaccacgacgagttcatcatcaacctgatcagaggcctgggcggcaacctgaacatgaagagcagactggagttcaccaaggaggtgttccactgggccagagagagcccccccgacttccacaagcccatggacacctactacgacagcaccagaggcagactggccacctacgtgctgaagaagcccgaggacctgaccgccgacgacttcagcaacggcctgaccctgcccgtgatccagacccccgacatgcagagaggcctggactacttcaagccctggctgagcagcgacaccaagcagcccttcatcctggtgggccccgagggctgcggcaagggcatgctgctgagatacgccttcagccagctgagaagcacccagatcgccaccgtgcactgcagcgcccagaccaccagcagacacctgctgcagaagctgagccagacctgcatggtgatcagcaccaacaccggcagagtgtacagacccaaggactgcgagagactggtgctgtacctgaaggacatcaacctgcccaagctggacaagtggggcaccagcaccctggtggccttcctgcagcaggtgctgacctaccagggcttctacgacgagaacctggagtgggtgggcctggagaacatccagatcgtggccagcatgagcgccggcggcagactgggcagacacaagctgaccaccagattcaccagcatcgtgagactgtgcagcatcgactaccccgagagagagcagctgcagaccatctacggcgcctacctggagcccgtgctgcacaagaacctgaagaaccacagcatctggggcagcagcagcaagatctacctgctggccggcagcatggtgcaggtgtacgagcaggtgagagccaagttcaccgtggacgactacagccactacttcttcaccccctgcatcctgacccagtgggtgctgggcctgttcagatacgacctggagggcggcagcagcaaccaccccctggactacgtgctggagatcgtggcctacgaggccagaagactgttcagagacaagatcgtgggcgccaaggagctgcacctgttcgacatcatcctgaccagcgtgttccagggcgactggggcagcgacatcctggacaacatgagcgacagcttctacgtgacctggggcgccagacacaacagcggcgccagagccgcccccggccagcccctgcccccccacggcaagcccctgggcaagctgaacagcaccgacctgaaggacgtgatcaagaagggcctgatccactacggcagagacaaccagaacctggacatcctgctgttccacgaggtgctggagtacatgagcagaatcgacagagtgctgagcttccccggcggcagcctgctgctggccggcagaagcggcgtgggcagaagaaccatcaccagcctggtgagccacatgcacggcgccgtgctgttcagccccaagatcagcagaggctacgagctgaagcagttcaagaacgacctgaagcacgtgctgcagctggccggcatcgaggcccagcaggtggtgctgctgctggaggactaccagttcgtgcaccccaccttcctggagatgatcaacagcctgctgagcagcggcgaggtgcccggcctgtacaccctggaggagctggagcccctgctgctgcccctgaaggaccaggccagccaggacggcttcttcggccccgtgttcaactacttcacctacagaatccagcagaacctgcacatcgtgctgatcatggacagcgccaacagcaacttcatgatcaactgcgagagcaaccccgccctgcacaagaagtgccaggtgctgtggatggagggctggagcaacagcagcatgaagaagatccccgagatgctgttcagcgagaccggcggcggcgagaagtacaacgacaagaagagaaaggaggagaagaagaagaacagcgtggaccccgacttcctgaagagcttcctgctgatccacgagagctgcaaggcctacggcgccacccccagcagatacatgaccttcctgcacgtgtacagcgccatcagcagcagcaagaagaaggagctgctgaagagacagagccacctgcaggccggcgtgagcaagctgaacgaggccaaggccctggtggacgagctgaacagaaaggccggcgagcagagcgtgctgctgaagaccaagcaggacgaggccgacgccgccctgcagatgatcaccgtgagcatgcaggacgccagcgagcagaagaccgagctggagagactgaagcacagaatcgccgaggaggtggtgaagatcgaggagagaaagaacaagatcgacgacgagctgaaggaggtgcagcccctggtgaacgaggccaagctggccgtgggcaacatcaagcccgagagcctgagcgagatcagaagcctgagaatgccccccgacgtgatcagagacatcctggagggcgtgctgagactgatgggcatcttcgacaccagctgggtgagcatgaagagcttcctggccaagagaggcgtgagagaggacatcgccaccttcgacgccagaaacatcagcaaggagatcagagagagcgtggaggagctgctgttcaagaacaagggcagcttcgaccccaagaacgccaagagagccagcaccgccgccgcccccctggccgcctgggtgaaggccaacatccagtacagccacgtgctggagagaatccaccccctggagaccgagcaggccggcctggagagcaacctgaagaagaccgaggacagaaagagaaagctggaggagctgctgaacagcgtgggccagaaggtgagcgagctgaaggagaagttccagagcagaaccagcgaggccgccaagctggaggccgaggtgagcaaggcccaggagaccatcaaggccgccgaggtgctgatcaaccagctggacagagagcacaagagatggaacgcccaggtggtggagatcaccgaggagctggccaccctgcccaagagagcccagctggccgccgccttcatcacctacctgagcgccgcccccgagagcctgagaaagacctgcctggaggagtggaccaagagcgccggcctggagaagttcgacctgagaagattcctgtgcaccgagagcgagcagctgatctggaagagcgagggcctgcccagcgacgacctgagcatcgagaacgccctggtgatcctgcagatcatcggcctgaagagctggagcagagtgtgccccttcctgatcgaccccagcagccaggccaccgagtggctgaagacccacctgaaggacagcagactggaggtgatcaaccagcaggacagcaacttcatcaccgccctggagctggccgtgagattcggcaagaccctgatcatccaggagatggacggcgtggagcccgtgctgtaccccctgctgagaagagacctggtggcccagggccccagatacgtggtgcagatcggcgacaagatcatcgactacaacgaggagttcagactgttcctgagcaccagaaaccccaaccccttcatcccccccgacgccgccagcatcgtgaccgaggtgaacttcaccaccaccagaagcggcctgagaggccagctgctggccctgaccatccagcacgagaagcccgacctggaggagcagaagaccaagctgctgcagcaggaggaggacaagaagatccagctggccaagctggaggagagcctgctggagaccctggccaccagccagggcaacatcctggagaacaaggacctgatcgagagcctgaaccagaccaaggccagcagcgccctgatccaggagagcctgaaggagagctacaagctgcagatcagcctggaccaggagagagacgcctacctgcccctggccgagagcgccagcaagatgtacttcatcatcagcgacctgagcaagatcaacaacatgtacagattcagcctggccgccttcctgagactgttccagagagccctgcagaacaagcaggacagcgagaacaccgagcagagaatccagagcctgatcagcagcctgcagcacatggtgtacgagtacatctgcagatgcctgttcaaggccgaccagctgatgttcgccctgcacttcgtgagaggcatgcaccccgagctgttccaggagaacgagtgggacaccttcaccggcgtggtggtgggcgacatgctgagaaaggccgacagccagcagaagatcagagaccagctgcccagctggatcgaccaggagagaagctgggccgtggccaccctgaagatcgccctgcccagcctgtaccagaccctgtgcttcgaggacgccgccctgtggagaacctactacaacaacagcatgtgcgagcaggagttccccagcatcctggccaagaaggtgagcctgttccagcagatcctggtggtgcaggccctgagacccgacagactgcagagcgccatggccctgttcgcctgcaagaccctgggcctgaaggaggtgagccccctgcccctgaacctgaagagactgtacaaggagaccctggagatcgagcccatcctgatcatcatcagccccggcgccgaccccagccaggagctgcaggagctggccaacgccgagagaagcggcgagtgctaccaccaggtggccatgggccagggccaggccgacctggccatccagatgctgaaggagtgcgccagaaacggcgactggctgtgcctgaagaacctgcacctggtggtgagctggctgcccgtgctggagaaggagctgaacaccctgcagcccaaggacaccttcagactgtggctgaccgccgaggtgcaccccaacttcacccccatcctgctgcagagcagcctgaagatcacctacgagagcccccccggcctgaagaagaacctgatgagaacctacgagagctggacccccgagcagatcagcaagaaggacaacacccacagagcccacgccctgttcagcctggcctggttccacgccgcctgccaggagagaagaaactacatcccccagggctggaccaagttctacgagttcagcctgagcgacctgagagccggctacaacatcatcgacagactgttcgacggcgccaaggacgtgcagtgggagttcgtgcacggcctgctggagaacgccatctacggcggcagaatcgacaactacttcgacctgagagtgctgcagagctacctgaagcagttcttcaacagcagcgtgatcgacgtgttcaaccagagaaacaagaagagcatcttcccctacagcgtgagcctgccccagagctgcagcatcctggactacagagccgtgatcgagaagatccccgaggacgacaagcccagcttcttcggcctgcccgccaacatcgccagaagcagccagagaatgatcagcagccaggtgatcagccagctgagaatcctgggcagaagcatcaccgccggcagcaagttcgacagagagatctggagcaacgagctgagccccgtgctgaacctgtggaagaagctgaaccagaacagcaacctgatccaccagaaggtgcccccccccaacgacagacagggcagccccatcctgagcttcatcatcctggagcagttcaacgccatcagactggtgcagagcgtgcaccagagcctggccgccctgagcaaggtgatcagaggcaccaccctgctgagcagcgaggtgcagaagctggccagcgccctgctgaaccagaagtgccccctggcctggcagagcaagtgggagggccccgaggaccccctgcagtacctgagaggcctggtggccagagccctggccatccagaactgggtggacaaggccgagaagcaggccctgctgagcgagaccctggacctgagcgagctgttccaccccgacaccttcctgaacgccctgagacaggagaccgccagagccgtgggcagaagcgtggacagcctgaagttcgtggccagctggaagggcagactgcaggaggccaagctgcagatcaagatcagcggcctgctgctggagggctgcagcttcgacggcaaccagctgagcgagaaccagctggacagccccagcgtgagcagcgtgctgccctgcttcatgggctggatcccccaggacgcctgcggcccctacagccccgacgagtgcatcagcctgcccgtgtacaccagcgccgagagagacagagtggtgaccaacatcgacgtgccctgcggcggcaaccaggaccagtggatccagtgcggcgccgccctgttcctgaagaaccagtag

SEQ ID NO: 79893 - DNA, 1515 bp, synthetic construct
  misc_feature 1..1515: note = Description of Artificial Sequence: Synthetic coding sequence
  source 1..1515: mol_type = other DNA
atgggccagggccaggccgacctggccatccagatgctgaaggagtgcgccagaaacggcgactggctgtgcctgaagaacctgcacctggtggtgagctggctgcccgtgctggagaaggagctgaacaccctgcagcccaaggacaccttcagactgtggctgaccgccgaggtgcaccccaacttcacccccatcctgctgcagagcagcctgaagatcacctacgagagcccccccggcctgaagaagaacctgatgagaacctacgagagctggacccccgagcagatcagcaagaaggacaacacccacagagcccacgccctgttcagcctggcctggttccacgccgcctgccaggagagaagaaactacatcccccagggctggaccaagttctacgagttcagcctgagcgacctgagagccggctacaacatcatcgacagactgttcgacggcgccaaggacgtgcagtgggagttcgtgcacggcctgctggagaacgccatctacggcggcagaatcgacaactacttcgacctgagagtgctgcagagctacctgaagcagttcttcaacagcagcgtgatcgacgtgttcaaccagagaaacaagaagagcatcttcccctacagcgtgagcctgccccagagctgcagcatcctggactacagagccgtgatcgagaagatccccgaggacgacaagcccagcttcttcggcctgcccgccaacatcgccagaagcagccagagaatgatcagcagccaggtgatcagccagctgagaatcctgggcagaagcatcaccgccggcagcaagttcgacagagagatctggagcaacgagctgagccccgtgctgaacctgtggaagaagctgaaccagaacagcaacctgatccaccagaaggtgcccccccccaacgacagacagggcagccccatcctgagcttcatcatcctggagcagttcaacgccatcagactggtgcagagcgtgcaccagagcctggccgccctgagcaaggtgatcagaggcaccaccctgctgagcagcgaggtgcagaagctggccagcgccctgctgaaccagaagtgccccctggcctggcagagcaagtgggagggccccgaggaccccctgcagtacctgagaggcctggtggccagagccctggccatccagaactgggtggacaaggccgagaagcaggccctgctgagcgagaccctggacctgagcgagctgttccaccccgacaccttcctgaacgccctgagacaggagaccgccagagccgtgggcagaagcgtggacagcctgaagttcgtggccagctggaagggcagactgcaggaggccaagctgcagatcaagatcagcggcctgctgctggagggctgcagcttcgacggcaaccagctgagcgagaaccagctggacagccccagcgtgagcagcgtgctgccctgcttcatgggctggatcccccaggacctgctgtag

SEQ ID NO: 79894 - DNA, 270 bp, synthetic construct
  misc_feature 1..270: note = Description of Artificial Sequence: Synthetic coding sequence
  source 1..270: mol_type = other DNA
atgtgcgacagaaaggccgtgatcaagaacgccgacatgagcgaggagatgcagcaggacagcgtggagtgcgccacccaggccctggagaagtacaacatcgagaaggacatcgccgcccacatcaagaaggagttcgacaagaagtacaaccccacctggcactgcatcgtgggcagaaacttcggcagctacgtgacccacgagaccaagcacttcatctacttctacctgggccaggtggccatcctgctgttcaagagcggctag

SEQ ID NO: 79895 - DNA, 270 bp, synthetic construct; identical to SEQ ID NO: 79894
  misc_feature 1..270: note = Description of Artificial Sequence: Synthetic coding sequence
  source 1..270: mol_type = other DNA

SEQ ID NO: 79896 - DNA, 270 bp, synthetic construct; identical to SEQ ID NO: 79894
  misc_feature 1..270: note = Description of Artificial Sequence: Synthetic coding sequence
  source 1..270: mol_type = other DNA

SEQ ID NO: 79897 - DNA, 270 bp, synthetic construct; identical to SEQ ID NO: 79894
  misc_feature 1..270: note = Description of Artificial Sequence: Synthetic coding sequence
  source 1..270: mol_type = other DNA

SEQ ID NO: 79898 - DNA, 129 bp, synthetic construct
  misc_feature 1..129: note = Description of Artificial Sequence: Synthetic coding sequence
  source 1..129: mol_type = other DNA
atgtgcgacagaaaggccgtgatcaagaacgccgacatgagcgaggagatgcagcaggacagcgtggagtgcgccacccaggccctggagaagtacaacatcgagaaggacatcgccgcccacatctag

SEQ ID NO: 79899 - DNA, 270 bp, synthetic construct; identical to SEQ ID NO: 79894
  misc_feature 1..270: note = Description of Artificial Sequence: Synthetic coding sequence
  source 1..270: mol_type = other DNA

SEQ ID NO: 79900 - DNA, 270 bp, synthetic construct
  misc_feature 1..270: note = Description of Artificial Sequence: Synthetic coding sequence
  source 1..270: mol_type = other DNA
atgagcgacagaaaggccgtgatcaagaacgccgacatgagcgaggacatgcagcaggacgccgtggactgcgccacccaggccatggagaagtacaacatcgagaaggacatcgccgcctacatcaagaaggagttcgacaagaagtacaaccccacctggcactgcatcgtgggcagaaacttcggcagctacgtgacccacgagaccaagcacttcatctacttctacctgggccaggtggccatcctgctgttcaagagcggctag

SEQ ID NO: 79901 - DNA, 144 bp, synthetic construct
  misc_feature 1..144: note = Description of Artificial Sequence: Synthetic coding sequence
  source 1..144: mol_type = other DNA
atggccgaggtggaggagaccctgaagagactgcagagccagaagggcgtgcagggcatcatcgtggtgaacaccgagggcggctgggagcccctgggccactgcggcgacagaagcagaccccccgcccagggctgcccctag

SEQ ID NO: 79902 - DNA, 291 bp, synthetic construct
  misc_feature 1..291: note = Description of Artificial Sequence: Synthetic coding sequence
  source 1..291: mol_type = other DNA
atggccgaggtggaggagaccctgaagagactgcagagccagaagggcgtgcagggcatcatcgtggtgaacaccgagggcatccccatcaagagcaccatggacaaccccaccaccacccagtacgccagcctgatgcacagcttcatcctgaaggccagaagcaccgtgagagacatcgacccccagaacgacctgaccttcctgagaatcagaagcaagaagaacgagatcatggtggcccccgacaaggactacttcctgatcgtgatccagaaccccaccgagtag

SEQ ID NO: 79903 - DNA, 366 bp, synthetic construct
  misc_feature 1..366: note = Description of Artificial Sequence: Synthetic coding sequence
  source 1..366: mol_type = other DNA
atggccgaggtggaggagaccctgaagagactgcagagccagaagggcgtgcagggcatcatcgtggtgaacaccgagggcatccccatcaagagcaccatggacaaccccaccaccacccagtacgccagcctgatgcacagcttcatcctgaaggccagaagcaccgtgagagacatcgacccccagaacgacctgaccttcctgagaatcagaagcaagaagaacgagatcatggtggcccccggcaagggcagcagcaccagcccctgcagaaacagaccccacggcaccttcagcgtggcccaccaggagagctggcacagcggcgtgagcagaggcagcaagcagggccccagaagctag

SEQ ID NO: 79904 - DNA, 291 bp, synthetic construct
  misc_feature 1..291: note = Description of Artificial Sequence: Synthetic coding sequence
  source 1..291: mol_type = other DNA
atggccgaggtggaggagaccctgaagagaatccagagccacaagggcgtgatcggcaccatggtggtgaacgccgagggcatccccatcagaaccaccctggacaacagcaccaccgtgcagtacgccggcctgctgcaccacctgaccatgaaggccaagagcaccgtgagagacatcgacccccagaacgacctgaccttcctgagaatcagaagcaagaagcacgagatcatggtggcccccgacaaggagtacctgctgatcgtgatccagaacccctgcgagtag

SEQ ID NO: 79905 - DNA, 165 bp, synthetic construct
  misc_feature 1..165: note = Description of Artificial Sequence: Synthetic coding sequence
  source 1..165: mol_type = other DNA
atggccgaggtggaggagaccctgaagagaatccagagccacaagggcgtgatcggcaccatggtggtgaacgccgaggaccccagattcgtgaccttcaagtacgccagacagctgaccgccttccagagaaagagcggccagcagatcaccatcaaggactag

SEQ ID NO: 79906 - DNA, 486 bp, synthetic construct
  misc_feature 1..486: note = Description of Artificial Sequence: Synthetic coding sequence
  source 1..486: mol_type = other DNA
atggaccccaaccccagagccgccctggagagacagcagctgagactgagagagagacagaagttcttcgaggacatcctgcagcccgagaccgagttcgtgttccccctgagccacctgcacctggagagccagagaccccccatcggcagcatcagcagcatggaggtgaacgtggacaccctggagcaggtggagctgatcgacctgggcgaccccgacgccgccgacgtgttcctgccctgcgaggaccccccccccaccccccagagcagcggcatggacaaccacctggaggagctgagcctgcccgtgcccaccagcgacagaaccaccagcagaaccagcagcagcagcagcagcgacagcagcaccaacctgcacagccccaaccccagcgacgacggcgccgacacccccctggcccagagcgacgaggaggaggagagaggcgacggcggcgccgagcccggcgcctgcagctag

SEQ ID NO: 79907 - DNA, 486 bp, synthetic construct; identical to SEQ ID NO: 79906
  misc_feature 1..486: note = Description of Artificial Sequence: Synthetic coding sequence
  source 1..486: mol_type = other DNA

SEQ ID NO: 79908 - DNA, 792 bp, synthetic construct
  misc_feature 1..792: note = Description of Artificial Sequence: Synthetic coding sequence
  source 1..792: mol_type = other DNA
atggagagctgggccctggccgtgttccccgagtacagagtgagcctgctgtggtgcctggagctggccagccccctgtggagcctgggccaggccccccccctgcacgagacctggttcgtgggccacacctggttccagggcagaggcaagagaagccccagagccgaggtgagcagacccgagcccggcgcccccctgctgggctgctggctgcagtggggcgcccccagccccggccccctgtgcctgctgttcagactgtgcagctgcacctgcttcgcccccctgcccgccggcgccgacatggaccccaaccccagagccgccctggagagacagcagctgagactgagagagagacagaagttcttcgaggacatcctgcagcccgagaccgagttcgtgttccccctgagccacctgcacctggagagccagagaccccccatcggcagcatcagcagcatggaggtgaacgtggacaccctggagcaggtggagctgatcgacctgggcgaccccgacgccgccgacgtgttcctgccctgcgaggaccccccccccaccccccagagcagcggcatggacaaccacctggaggagctgagcctgcccgtgcccaccagcgacagaaccaccagcagaaccagcagcagcagcagcagcgacagcagcaccaacctgcacagccccaaccccagcgacgacggcgccgacacccccctggcccagagcgacgaggaggaggagagaggcgacggcggcgccgagcccggcgcctgcagctag

SEQ ID NO: 79909 - DNA, 486 bp, synthetic construct; identical to SEQ ID NO: 79906
  misc_feature 1..486: note = Description of Artificial Sequence: Synthetic coding sequence
  source 1..486: mol_type = other DNA

SEQ ID NO: 79910 - DNA, 339 bp, synthetic construct
  misc_feature 1..339: note = Description of Artificial Sequence: Synthetic coding sequence
  source 1..339: mol_type = other DNA
atggaccccaaccccagagccgccctggagagacagcagctgagactgagagagagacagaagttcttcgaggacatcctgcagcccgagaccgagttcgtgttccccctgagccacctgcacctggagagccagagaccccccatcggcagcatcagcagcatggaggtgaacgtggacaccctggagcaggtggagctgatcgacctgggcgaccccgacgccgccgacgtgttcctgccctgcgaggaccccccccccaccccccagagcagcggcatgcccctgtgcttcggcgacttcagcgccagccagcccgagcccgacgtgagactgtag

SEQ ID NO: 79911 - DNA, 780 bp, synthetic construct
  misc_feature 1..780: note = Description of Artificial Sequence: Synthetic coding sequence
  source 1..780: mol_type = other DNA
atgggcgccggcaacttcctgaccgccctggaggtgcccgtggccgccctggccggcgccgccagcgacagaagagccagctgcgagagagtgagcccccccccccccctgccccacttcagactgccccccctgcccagaagcagactgcccggccccgtgagcagacccgagcccggcgcccccctgctgggctgctggctgcagtggggcgcccccagccccggccccctgtgcctgctgttcagactgtgcagctgcacctgcttcgcccccctgcccgccggcgccgacatggaccccaaccccagagccgccctggagagacagcagctgagactgagagagagacagaagttcttcgaggacatcctgcagcccgagaccgagttcgtgttccccctgagccacctgcacctggagagccagagaccccccatcggcagcatcagcagcatggaggtgaacgtggacaccctggagcaggtggagctgatcgacctgggcgaccccgacgccgccgacgtgttcctgccctgcgaggaccccccccccaccccccagagcagcggcatggacaaccacctggaggagctgagcctgcccgtgcccaccagcgacagaaccaccagcagaaccagcagcagcagcagcagcgacagcagcaccaacctgcacagccccaaccccagcgacgacggcgccgacacccccctggcccagagcgacgaggaggaggagagaggcgacggcggcgccgagcccggcgcctgcagctag

SEQ ID NO: 79912 - DNA, 339 bp, synthetic construct; identical to SEQ ID NO: 79910
  misc_feature 1..339: note = Description of Artificial Sequence: Synthetic coding sequence
  source 1..339: mol_type = other DNA

SEQ ID NO: 79913 - DNA, 486 bp, synthetic construct; identical to SEQ ID NO: 79906
  misc_feature 1..486: note = Description of Artificial Sequence: Synthetic coding sequence
  source 1..486: mol_type = other DNA

SEQ ID NO: 79914 - DNA, 519 bp, synthetic construct
  misc_feature 1..519: note = Description of Artificial Sequence: Synthetic coding sequence
  source 1..519: mol_type = other DNA
tgaacctggttccagggcagaggcaagagaagccccagagccgaggtgagcagacccgagcccggcgcccccctgctgggctgctggctgcagtggggcgcccccagccccggccccctgtgcctgctgttcagactgtgcagctgcacctgcttcgcccccctgcccgccggcgccgacatggaccccaaccccagagccgccctggagagacagcagctgagactgagagagagacagaagttcttcgaggacatcctgcagcccgagaccgagttcgtgttccccctgagccacctgcacctggagagccagagaccccccatcggcagcatcagcagcatggaggtgaacgtggacaccctggagcaggtggagctgatcgacctgggcgaccccgacgccgccgacgtgttcctgccctgcgaggaccccccccccaccccccagagcagcggcatgcccctgtgcttcggcgacttcagcgccagccagcccgagcccgacgtgagactgtag

SEQ ID NO: 79915 - DNA, 15516 bp, synthetic construct
  misc_feature 1..15516: note = Description of Artificial Sequence: Synthetic coding sequence
  source 1..15516: mol_type = other DNA
atgcacagcagcagctacagctacagaagcagcgacagcgtgttcagcaacaccaccagcaccagaaccagcctggacagcaacgagaacctgctgctggtgcactgcggccccaccctgatcaacagctgcatcagcttcggcagcgagagcttcgacggccacagactggagatgctgcagcagatcgccaacagagtgcagagagacagcgtgatctgcgaggacaagctgatcctggccggcaacgccctgcagagcgacagcaagagactggagagcggcgtgcagttccagaacgaggccgagatcgccggctacatcctggagtgcgagaacctgctgagacagcacgtgatcgacgtgcagatcctgatcgacggcaagtactaccaggccgaccagctggtgcagagagtggccaagctgagagacgagatcatggccctgagaaacgagtgcagcagcgtgtacagcaagggcagaatcctgaccaccgagcagaccaagctgatgatcagcggcatcacccagagcctgaacagcggcttcgcccagaccctgcaccccagcctgaccagcggcctgacccagagcctgacccccagcctgaccagcagcagcatgaccagcggcctgagcagcggcatgaccagcagactgacccccagcgtgacccccgcctacacccccggcttccccagcggcctggtgcccaacttcagcagcggcgtggagcccaacagcctgcagaccctgaagctgatgcagatcagaaagcccctgctgaagagcagcctgctggaccagaacctgaccgaggaggagatcaacatgaagttcgtgcaggacctgctgaactgggtggacgagatgcaggtgcagctggacagaaccgagtggggcagcgacctgcccagcgtggagagccacctggagaaccacaagaacgtgcacagagccatcgaggagttcgagagcagcctgaaggaggccaagatcagcgagatccagatgaccgcccccctgaagctgacctacgccgagaagctgcacagactggagagccagtacgccaagctgctgaacaccagcagaaaccaggagagacacctggacaccctgcacaacttcgtgagcagagccaccaacgagctgatctggctgaacgagaaggaggaggaggaggtggcctacgactggagcgagagaaacaccaacatcgccagaaagaaggactaccacgccgagctgatgagagagctggaccagaaggaggagaacatcaagagcgtgcaggagatcgccgagcagctgctgctggagaaccaccccgccagactgaccatcgaggcctacagagccgccatgcagacccagtggagctggatcctgcagctgtgccagtgcgtggagcagcacatcaaggagaacaccgcctacttcgagttcttcaacgacgccaaggaggccaccgactacctgagaaacctgaaggacgccatccagagaaagtacagctgcgacagaagcagcagcatccacaagctggaggacctggtgcaggagagcatggaggagaaggaggagctgctgcagtacaagagcaccatcgccaacctgatgggcaaggccaagaccatcatccagctgaagcccagaaacagcgactgccccctgaagaccagcatccccatcaaggccatctgcgactacagacagatcgagatcaccatctacaaggacgacgagtgcgtgctggccaacaacagccacagagccaagtggaaggtgatcagccccaccggcaacgaggccatggtgcccagcgtgtgcttcaccgtgcccccccccaacaaggaggccgtggacctggccaacagaatcgagcagcagtaccagaacgtgctgaccctgtggcacgagagccacatcaacatgaagagcgtggtgagctggcactacctgatcaacgagatcgacagaatcagagccagcaacgtggccagcatcaagaccatgctgcccggcgagcaccagcaggtgctgagcaacctgcagagcagattcgaggacttcctggaggacagccaggagagccaggtgttcagcggcagcgacatcacccagctggagaaggaggtgaacgtgtgcaagcagtactaccaggagctgctgaagagcgccgagagagaggagcaggaggagagcgtgtacaacctgtacatcagcgaggtgagaaacatcagactgagactggagaactgcgaggacagactgatcagacagatcagaacccccctggagagagacgacctgcacgagagcgtgttcagaatcaccgagcaggagaagctgaagaaggagctggagagactgaaggacgacctgggcaccatcaccaacaagtgcgaggagttcttcagccaggccgccgccagcagcagcgtgcccaccctgagaagcgagctgaacgtggtgctgcagaacatgaaccaggtgtacagcatgagcagcacctacatcgacaagctgaagaccgtgaacctggtgctgaagaacacccaggccgccgaggccctggtgaagctgtacgagaccaagctgtgcgaggaggaggccgtgatcgccgacaagaacaacatcgagaacctgatcagcaccctgaagcagtggagaagcgaggtggacgagaagagacaggtgttccacgccctggaggacgagctgcagaaggccaaggccatcagcgacgagatgttcaagacctacaaggagagagacctggacttcgactggcacaaggagaaggccgaccagctggtggagagatggcagaacgtgcacgtgcagatcgacaacagactgagagacctggagggcatcggcaagagcctgaagtactacagagacacctaccaccccctggacgactggatccagcaggtggagaccacccagagaaagatccaggagaaccagcccgagaacagcaagaccctggccacccagctgaaccagcagaagatgctggtgagcgagatcgagatgaagcagagcaagatggacgagtgccagaagtacgccgagcagtacagcgccaccgtgaaggactacgagctgcagaccatgacctacagagccatggtggacagccagcagaagagccccgtgaagagaagaagaatgcagagcagcgccgacctgatcatccaggagttcatggacctgagaaccagatacaccgccctggtgaccctgatgacccagtacatcaagttcgccggcgacagcctgaagagactggaggaggaggagaagagcctggaggaggagaagaaggagcacgtggagaaggccaaggagctgcagaagtgggtgagcaacatcagcaagaccctgaaggacgccgagaaggccggcaagccccccttcagcaagcagaagatcagcagcgaggagatcagcaccaagaaggagcagctgagcgaggccctgcagaccatccagctgttcctggccaagcacggcgacaagatgaccgacgaggagagaaacgagctggagaagcaggtgaagaccctgcaggagagctacaacctgctgttcagcgagagcctgaagcagctgcaggagagccagaccagcggcgacgtgaaggtggaggagaagatcgtggccgagagacagcaggagtacaaggagaagctgcagggcatctgcgacctgctgacccagaccgagaacagactgatcggccaccaggaggccttcatgatcggcgacggcaccgtggagctgaagaagtaccagagcaagcaggaggagctgcagaaggacatgcagggcagcgcccaggccctggccgaggtggtgaagaacaccgagaacttcctgaaggagaacggcgagaagctgagccaggaggacaaggccctgatcgagcagaagctgaacgaggccaagatcaagtgcgagcagctgaacctgaaggccgagcagagcaagaaggagctggacaaggtggtgaccaccgccatcaaggaggagaccgagaaggtggccgccgtgaagcagctggaggagagcaagaccaagatcgagaacctgctggactggctgagcaacgtggacaaggacagcgagagagccggcaccaagcacaagcaggtgatcgagcagaacggcacccacttccaggagggcgacggcaagagcgccatcggcgaggaggacgaggtgaacggcaacctgctggagaccgacgtggacggccaggtgggcaccacccaggagaacctgaaccagcagtaccagaaggtgaaggcccagcacgagaagatcatcagccagcaccaggccgtgatcatcgccacccagagcgcccaggtgctgctggagaagcagggccagtacctgagccccgaggagaaggagaagctgcagaagaacatgaaggagctgaaggtgcactacgagaccgccctggccgagagcgagaagaagatgaagctgacccacagcctgcaggaggagctggagaagttcgacgccgactacaccgagttcgagcactggctgcagcagagcgagcaggagctggagaacctggaggccggcgccgacgacatcaacggcctgatgaccaagctgaagagacagaagagcttcagcgaggacgtgatcagccacaagggcgacctgagatacatcaccatcagcggcaacagagtgctggaggccgccaagagctgcagcaagagagacggcggcaaggtggacaccagcgccacccacagagaggtgcagagaaagctggaccacgccaccgacagattcagaagcctgtacagcaagtgcaacgtgctgggcaacaacctgaaggacctggtggacaagtaccagcactacgaggacgccagctgcggcctgctggccggcctgcaggcctgcgaggccaccgccagcaagcacctgagcgagcccatcgccgtggaccccaagaacctgcagagacagctggaggagaccaaggccctgcagggccagatcagcagccagcaggtggccgtggagaagctgaagaagaccgccgaggtgctgctggacgccagaggcagcctgctgcccgccaagaacgacatccagaagaccctggacgacatcgtgggcagatacgaggacctgagcaagagcgtgaacgagagaaacgagaagctgcagatcaccctgaccagaagcctgagcgtgcaggacggcctggacgagatgctggactggatgggcaacgtggagagcagcctgaaggagcagggccaggtgcccctgaacagcaccgccctgcaggacatcatcagcaagaacatcatgctggagcaggacatcgccggcagacagagcagcatcaacgccatgaacgagaaggtgaagaagttcatggagaccaccgaccccagcaccgccagcagcctgcaggccaagatgaaggacctgagcgccagattcagcgaggccagccacaagcacaaggagaccctggccaagatggaggagctgaagaccaaggtggagctgttcgagaacctgagcgagaagctgcagaccttcctggagaccaagacccaggccctgaccgaggtggacgtgcccggcaaggacgtgaccgagctgagccagtacatgcaggagagcaccagcgagttcctggagcacaagaagcacctggaggtgctgcacagcctgctgaaggagatcagcagccacggcctgcccagcgacaaggccctggtgctggagaagaccaacaacctgagcaagaagttcaaggagatggaggacaccatcaaggagaagaaggaggccgtgaccagctgccaggagcagctggacgccttccaggtgctggtgaagagcctgaagagctggatcaaggagaccaccaagaaggtgcccatcgtgcagcccagcttcggcgccgaggacctgggcaagagcctggaggacaccaagaagctgcaggagaagtggagcctgaagacccccgagatccagaaggtgaacaacagcggcatcagcctgtgcaacctgatcagcgccgtgaccacccccgccaaggccatcgccgccgtgaagagcggcggcgccgtgctgaacggcgagggcaccgccaccaacaccgaggagttctgggccaacaagggcctgaccagcatcaagaaggacatgaccgacatcagccacggctacgaggacctgggcctgctgctgaaggacaagatcgccgagctgaacaccaagctgagcaagctgcagaaggcccaggaggagagcagcgccatgatgcagtggctgcagaagatgaacaagaccgccaccaagtggcagcagacccccgcccccaccgacaccgaggccgtgaagacccaggtggagcagaacaagagcttcgaggccgagctgaagcagaacgtgaacaaggtgcaggagctgaaggacaagctgaccgagctgctggaggagaaccccgacacccccgaggcccccagatggaagcagatgctgaccgagatcgacagcaagtggcaggagctgaaccagctgaccatcgacagacagcagaagctggaggagagcagcaacaacctgacccagttccagaccgtggaggcccagctgaagcagtggctggtggagaaggagctgatggtgagcgtgctgggccccctgagcatcgaccccaacatgctgaacacccagagacagcaggtgcagatcctgctgcaggagttcgccaccagaaagccccagtacgagcagctgaccgccgccggccagggcatcctgagcagacccggcgaggaccccagcctgagaggcatcgtgaaggagcagctggccgccgtgacccagaagtgggacagcctgaccggccagctgagcgacagatgcgactggatcgaccaggccatcgtgaagagcacccagtaccagagcctgctgagaagcctgagcgacaagctgagcgacctggacaacaagctgagcagcagcctggccgtgagcacccaccccgacgccatgaaccagcagctggagaccgcccagaagatgaagcaggagatccagcaggagaagaagcagatcaaggtggcccaggccctgtgcgaggacctgagcgccctggtgaaggaggagtacctgaaggccgagctgagcagacagctggagggcatcctgaagagcttcaaggacgtggagcagaaggccgagaaccacgtgcagcacctgcagagcgcctgcgccagcagccaccagttccagcagatgagcagagacttccaggcctggctggacaccaagaaggaggagcagaacaagagccaccccatcagcgccaagctggacgtgctggagagcctgatcaaggaccacaaggacttcagcaagaccctgaccgcccagagccacatgtacgagaagaccatcgccgagggcgagaacctgctgctgaagacccagggcagcgagaaggccgccctgcagctgcagctgaacaccatcaagaccaactgggacaccttcaacaagcaggtgaaggagagagagaacaagctgaaggagagcctggagaaggccctgaagtacaaggagcaggtggagaccctgtggccctggatcgacaagtgccagaacaacctggaggagatcaagttctgcctggaccccgccgagggcgagaacagcatcgccaagctgaagagcctgcagaaggagatggaccagcacttcggcatggtggagctgctgaacaacaccgccaacagcctgctgagcgtgtgcgagatcgacaaggaggtggtgaccgacgagaacaagagcctgatccagaaggtggacatggtgaccgagcagctgcacagcaagaagttctgcctggagaacatgacccagaagttcaaggagttccaggaggtgagcaaggagagcaagagacagctgcagtgcgccaaggagcagctggacatccacgacagcctgggcagccaggcctacagcaacaagtacctgaccatgctgcagacccagcagaagagcctgcaggccctgaagcaccaggtggacctggccaagagactggcccaggacctggtggtggaggccagcgacagcaagggcaccagcgacgtgctgctgcaggtggagaccatcgcccaggagcacagcaccctgagccagcaggtggacgagaagtgcagcttcctggagaccaagctgcagggcatcggccacttccagaacaccatcagagagatgttcagccagttcgccgagttcgacgacgagctggacagcatggcccccgtgggcagagacgccgagaccctgcagaagcagaaggagaccatcaaggccttcctgaagaagctggaggccctgatggccagcaacgacaacgccaacaagacctgcaagatgatgctggccaccgaggagaccagccccgacctggtgggcatcaagagagacctggaggccctgagcaagcagtgcaacaagctgctggacagagcccaggccagagaggagcaggtggagggcaccatcaagagactggaggagttctacagcaagctgaaggagttcagcatcctgctgcagaaggccgaggagcacgaggagagccagggccccgtgggcatggagaccgagaccatcaaccagcagctgaacatgttcaaggtgttccagaaggaggagatcgagcccctgcagggcaagcagcaggacgtgaactggctgggccagggcctgatccagagcgccgccaagagcaccagcacccagggcctggagcacgacctggacgacgtgaacgccagatggaagaccctgaacaagaaggtggcccagagagccgcccagctgcaggaggccctgctgcactgcggcagattccaggacgccctggagagcctgctgagctggatggtggacaccgaggagctggtggccaaccagaagccccccagcgccgagttcaaggtggtgaaggcccagatccaggagcagaagctgctgcagagactgctggacgacagaaagagcaccgtggaggtgatcaagagagagggcgagaagatcgccaccaccgccgagcccgccgacaaggtgaagatcctgaagcagctgagcctgctggacagcagatgggaggccctgctgaacaaggccgagaccagaaacagacagctggagggcatcagcgtggtggcccagcagttccacgagaccctggagcccctgaacgagtggctgaccaccatcgagaagagactggtgaactgcgagcccatcggcacccaggccagcaagctggaggagcagatcgcccagcacaaggccctggaggacgacatcatcaaccacaacaagcacctgcaccaggccgtgagcatcggccagagcctgaaggtgctgagcagcagagaggacaaggacatggtgcagagcaagctggacttcagccaggtgtggtacatcgagatccaggagaagagccacagcagaagcgagctgctgcagcaggccctgtgcaacgccaagatcttcggcgaggacgaggtggagctgatgaactggctgaacgaggtgcacgacaagctgagcaagctgagcgtgcaggactacagcaccgagggcctgtggaagcagcagagcgagctgagagtgctgcaggaggacatcctgctgagaaagcagaacgtggaccaggccctgctgaacggcctggagctgctgaagcagaccaccggcgacgaggtgctgatcatccaggacaagctggaggccatcaaggccagatacaaggacatcaccaagctgagcaccgacgtggccaagaccctggagcaggccctgcagctggccagaagactgcacagcacccacgaggagctgtgcacctggctggacaaggtggaggtggagctgctgagctacgagacccaggtgctgaagggcgaggaggccagccaggcccagatgagacccaaggagctgaagaaggaggccaagaacaacaaggccctgctggacagcctgaacgaggtgagcagcgccctgctggagctggtgccctggagagccagagagggcctggagaagatggtggccgaggacaacgagagatacagactggtgagcgacaccatcacccagaaggtggaggagatcgacgccgccatcctgagaagccagcagttcgaccaggccgccgacgccgagctgagctggatcaccgagaccgagaagaagctgatgagcctgggcgacatcagactggagcaggaccagaccagcgcccagctgcaggtgcagaagaccttcaccatggagatcctgagacacaaggacatcatcgacgacctggtgaagagcggccacaagatcatgaccgcctgcagcgaggaggagaagcagagcatgaagaagaagctggacaaggtgctgaagaactacgacaccatctgccagatcaacagcgagagatacctgcagctggagagagcccagagcctggtgaaccagttctgggagacctacgaggagctgtggccctggctgaccgagacccagagcatcatcagccagctgcccgcccccgccctggagtacgagaccctgagacagcagcaggaggagcacagacagctgagagagctgatcgccgagcacaagccccacatcgacaagatgaacaagaccggcccccagctgctggagctgagccccggcgagggcttcagcatccaggagaagtacgtggccgccgacaccctgtacagccagatcaaggaggacgtgaagaagagagccgtggccctggacgaggccatcagccagagcacccagttccacgacaagatcgaccagatcctggagagcctggagagaatcgtggagagactgagacagccccccagcatcagcgccgaggtggagaagatcaaggagcagatcagcgagaacaagaacgtgagcgtggacatggagaagctgcagcccctgtacgagaccctgaagcagagaggcgaggagatgatcgccagaagcggcggcaccgacaaggacatcagcgccaaggccgtgcaggacaagctggaccagatggtgttcatctgggagaacatccacaccctggtggaggagagagaggccaagctgctggacgtgatggagctggccgagaagttctggtgcgaccacatgagcctgatcgtgaccatcaaggacacccaggacttcatcagagacctggaggaccccggcatcgaccccagcgtggtgaagcagcagcaggaggccgccgagaccatcagagaggagatcgacggcctgcaggaggagctggacatcgtgatcaacctgggcagcgagctgatcgccgcctgcggcgagcccgacaagcccatcgtgaagaagagcatcgacgagctgaacagcgcctgggacagcctgaacaaggcctggaaggacagaatcgacaagctggaggaggccatgcaggccgccgtgcagtaccaggacggcctgcaggccgtgttcgactgggtggacatcgccggcggcaagctggccagcatgagccccatcggcaccgacctggagaccgtgaagcagcagatcgaggagctgaagcagttcaagagcgaggcctaccagcagcagatcgagatggagagactgaaccaccaggccgagctgctgctgaagaaggtgaccgaggagagcgacaagcacaccgtgcaggaccccctgatggagctgaagctgatctgggacagcctggaggagagaatcatcaacagacagcacaagctggagggcgccctgctggccctgggccagttccagcacgccctggacgagctgctggcctggctgacccacaccgagggcctgctgagcgagcagaagcccgtgggcggcgaccccaaggccatcgagatcgagctggccaagcaccacgtgctgcagaacgacgtgctggcccaccagagcaccgtggaggccgtgaacaaggccggcaacgacctgatcgagagcagcgccggcgaggaggccagcaacctgcagaacaagctggaggtgctgaaccagagatggcagaacgtgctggagaagaccgagcagagaaagcagcagctggacggcgccctgagacaggccaagggcttccacggcgagatcgaggacctgcagcagtggctgaccgacaccgagagacacctgctggccagcaagcccctgggcggcctgcccgagaccgccaaggagcagctgaacgtgcacatggaggtgtgcgccgccttcgaggccaaggaggagacctacaagagcctgatgcagaagggccagcagatgctggccagatgccccaagagcgccgagaccaacatcgaccaggacatcaacaacctgaaggagaagtgggagagcgtggagaccaagctgaacgagagaaagaccaagctggaggaggccctgaacctggccatggagttccacaacagcctgcaggacttcatcaactggctgacccaggccgagcagaccctgaacgtggccagcagacccagcctgatcctggacaccgtgctgttccagatcgacgagcacaaggtgttcgccaacgaggtgaacagccacagagagcagatcatcgagctggacaagaccggcacccacctgaagtacttcagccagaagcaggacgtggtgctgatcaagaacctgctgatcagcgtgcagagcagatgggagaaggtggtgcagagactggtggagagaggcagaagcctggacgacgccagaaagagagccaagcagttccacgaggcctggagcaagctgatggagtggctggaggagagcgagaagagcctggacagcgagctggagatcgccaacgaccccgacaagatcaagacccagctggcccagcacaaggagttccagaagagcctgggcgccaagcacagcgtgtacgacaccaccaacagaaccggcagaagcctgaaggagaagaccagcctggccgacgacaacctgaagctggacgacatgctgagcgagctgagagacaagtgggacaccatctgcggcaagagcgtggagagacagaacaagctggaggaggccctgctgttcagcggccagttcaccgacgccctgcaggccctgatcgactggctgtacagagtggagccccagctggccgaggaccagcccgtgcacggcgacatcgacctggtgatgaacctgatcgacaaccacaaggccttccagaaggagctgggcaagagaaccagcagcgtgcaggccctgaagagaagcgccagagagctgatcgagggcagcagagacgacagcagctgggtgaaggtgcagatgcaggagctgagcaccagatgggagaccgtgtgcgccctgagcatcagcaagcagaccagactggaggccgccctgagacaggccgaggagttccacagcgtggtgcacgccctgctggagtggctggccgaggccgagcagaccctgagattccacggcgtgctgcccgacgacgaggacgccctgagaaccctgatcgaccagcacaaggagttcatgaagaagctggaggagaagagagccgagctgaacaaggccaccaccatgggcgacaccgtgctggccatctgccaccccgacagcatcaccaccatcaagcactggatcaccatcatcagagccagattcgaggaggtgctggcctgggccaagcagcaccagcagagactggccagcgccctggccggcctgatcgccaagcaggagctgctggaggccctgctggcctggctgcagtgggccgagaccaccctgaccgacaaggacaaggaggtgatcccccaggagatcgaggaggtgaaggccctgatcgccgagcaccagaccttcatggaggagatgaccagaaagcagcccgacgtggacaaggtgaccaagacctacaagagaagagccgccgaccccagcagcctgcagagccacatccccgtgctggacaagggcagagccggcagaaagagattccccgccagcagcctgtaccccagcggcagccagacccagatcgagaccaagaaccccagagtgaacctgctggtgagcaagtggcagcaggtgtggctgctggccctggagagaagaagaaagctgaacgacgccctggacagactggaggagctgagagagttcgccaacttcgacttcgacatctggagaaagaagtacatgagatggatgaaccacaagaagagcagagtgatggacttcttcagaagaatcgacaaggaccaggacggcaagatcaccagacaggagttcatcgacggcatcctgagcagcaagttccccaccagcagactggagatgagcgccgtggccgacatcttcgacagagacggcgacggctacatcgactactacgagttcgtggccgccctgcaccccaacaaggacgcctacaagcccatcaccgacgccgacaagatcgaggacgaggtgaccagacaggtggccaagtgcaagtgcgccaagagattccaggtggagcagatcggcgacaacaagtacagattcttcctgggcaaccagttcggcgacagccagcagctgagactggtgagaatcctgagaagcaccgtgatggtgagagtgggcggcggctggatggccctggacgagttcctggtgaagaacgacccctgcagagccaagggcagaaccaacatggagctgagagagaagttcatcctggccgacggcgccagccagggcatggccgccttcagacccagaggcagaagaagcagacccagcagcagaggcgccagccccaacagaagcaccagcgtgagcagccaggccgcccaggccgccagcccccaggtgcccgccaccaccacccccaagatcctgcaccccctgaccagaaactacggcaagccctggctgaccaacagcaagatgagcaccccctgcaaggccgccgagtgcagcgacttccccgtgcccagcgccgagggcacccccatccagggcagcaagctgagactgcccggctacctgagcggcaagggcttccacagcggcgaggacagcggcctgatcaccaccgccgccgccagagtgagaacccagttcgccgacagcaagaagacccccagcagacccggcagcagagccggcagcaaggccggcagcagagccagcagcagaagaggcagcgacgccagcgacttcgacatcagcgagatccagagcgtgtgcagcgacgtggagaccgtgccccagacccacagacccacccccagagccggcagcagacccagcaccgccaagcccagcaagatccccaccccccagagaaagagccccgccagcaagctggacaagagcagcaagagatag

SEQ ID NO: 79916 - DNA, 12603 bp, synthetic construct
  misc_feature 1..12603: note = Description of Artificial Sequence: Synthetic coding sequence
  source 1..12603: mol_type = other DNA
atggccggctacctgagccccgccgcctacctgtacgtggaggagcaggagtacctgcaggcctacgaggacgtgctggagagatacaaggacgagagagacaaggtgcagaagaagaccttcaccaagtggatcaaccagcacctgatgaaggtgagaaagcacgtgaacgacctgtacgaggacctgagagacggccacaacctgatcagcctgctggaggtgctgagcggcgacaccctgcccagagagaagggcagaatgagattccacagactgcagaacgtgcagatcgccctggactacctgaagagaagacaggtgaagctggtgaacatcagaaacgacgacatcaccgacggcaaccccaagctgaccctgggcctgatctggaccatcatcctgcacttccagatcagcgacatccacgtgaccggcgagagcgaggacatgagcgccaaggagagactgctgctgtggacccagcaggccaccgagggctacgccggcatcagatgcgagaacttcaccacctgctggagagacggcaagctgttcaacgccatcatccacaagtacagacccgacctgatcgacatgaacaccgtggccgtgcagagcaacctggccaacctggagcacgccttctacgtggccgagaagatcggcgtgatcagactgctggaccccgaggacgtggacgtgagcagccccgacgagaagagcgtgatcacctacgtgagcagcctgtacgacgccttccccaaggtgcccgagggcggcgagggcatcggcgccaacgacgtggaggtgaagtggatcgagtaccagaacatggtgaactacctgatccagtggatcagacaccacgtgaccaccatgagcgagagaaccttccccaacaaccccgtggagctgaaggccctgtacaaccagtacctgcagttcaaggagaccgagatcccccccaaggagaccgagaagagcaagatcaagagactgtacaagctgctggagatctggatcgagttcggcagaatcaagctgctgcagggctaccaccccaacgacatcgagaaggagtggggcaagctgatcatcgccatgctggagagagagaaggccctgagacccgaggtggagagactggagatgctgcagcagatcgccaacagagtgcagagagacagcgtgatctgcgaggacaagctgatcctggccggcaacgccctgcagagcgacagcaagagactggagagcggcgtgcagttccagaacgaggccgagatcgccggctacatcctggagtgcgagaacctgctgagacagcacgtgatcgacgtgcagatcctgatcgacggcaagtactaccaggccgaccagctggtgcagagagtggccaagctgagagacgagatcatggccctgagaaacgagtgcagcagcgtgtacagcaagggcagaatcctgaccaccgagcagaccaagctgatgatcagcggcatcacccagagcctgaacagcggcttcgcccagaccctgcaccccagcctgaccagcggcctgacccagagcctgacccccagcctgaccagcagcagcatgaccagcggcctgagcagcggcatgaccagcagactgacccccagcgtgacccccgcctacacccccggcttccccagcggcctggtgcccaacttcagcagcggcgtggagcccaacagcctgcagaccctgaagctgatgcagatcagaaagcccctgctgaagagcagcctgctggaccagaacctgaccgaggaggagatcaacatgaagttcgtgcaggacctgctgaactgggtggacgagatgcaggtgcagctggacagaaccgagtggggcagcgacctgcccagcgtggagagccacctggagaaccacaagaacgtgcacagagccatcgaggagttcgagagcagcctgaaggaggccaagatcagcgagatccagatgaccgcccccctgaagctgacctacgccgagaagctgcacagactggagagccagtacgccaagctgctgaacaccagcagaaaccaggagagacacctggacaccctgcacaacttcgtgagcagagccaccaacgagctgatctggctgaacgagaaggaggaggaggaggtggcctacgactggagcgagagaaacaccaacatcgccagaaagaaggactaccacgccgagctgatgagagagctggaccagaaggaggagaacatcaagagcgtgcaggagatcgccgagcagctgctgctggagaaccaccccgccagactgaccatcgaggcctacagagccgccatgcagacccagtggagctggatcctgcagctgtgccagtgcgtggagcagcacatcaaggagaacaccgcctacttcgagttcttcaacgacgccaaggaggccaccgactacctgagaaacctgaaggacgccatccagagaaagtacagctgcgacagaagcagcagcatccacaagctggaggacctggtgcaggagagcatggaggagaaggaggagctgctgcagtacaagagcaccatcgccaacctgatgggcaaggccaagaccatcatccagctgaagcccagaaacagcgactgccccctgaagaccagcatccccatcaaggccatctgcgactacagacagatcgagatcaccatctacaaggacgacgagtgcgtgctggccaacaacagccacagagccaagtggaaggtgatcagccccaccggcaacgaggccatggtgcccagcgtgtgcttcaccgtgcccccccccaacaaggaggccgtggacctggccaacagaatcgagcagcagtaccagaacgtgctgaccctgtggcacgagagccacatcaacatgaagagcgtggtgagctggcactacctgatcaacgagatcgacagaatcagagccagcaacgtggccagcatcaagaccatgctgcccggcgagcaccagcaggtgctgagcaacctgcagagcagattcgaggacttcctggaggacagccaggagagccaggtgttcagcggcagcgacatcacccagctggagaaggaggtgaacgtgtgcaagcagtactaccaggagctgctgaagagcgccgagagagaggagcaggaggagagcgtgtacaacctgtacatcagcgaggtgagaaacatcagactgagactggagaactgcgaggacagactgatcagacagatcagaacccccctggagagagacgacctgcacgagagcgtgttcagaatcaccgagcaggagaagctgaagaaggagctggagagactgaaggacgacctgggcaccatcaccaacaagtgcgaggagttcttcagccaggccgccgccagcagcagcgtgcccaccctgagaagcgagctgaacgtggtgctgcagaacatgaaccaggtgtacagcatgagcagcacctacatcgacaagctgaagaccgtgaacctggtgctgaagaacacccaggccgccgaggccctggtgaagctgtacgagaccaagctgtgcgaggaggaggccgtgatcgccgacaagaacaacatcgagaacctgatcagcaccctgaagcagtggagaagcgaggtggacgagaagagacaggtgttccacgccctggaggacgagctgcagaaggccaaggccatcagcgacgagatgttcaagacctacaaggagagagacctggacttcgactggcacaaggagaaggccgaccagctggtggagagatggcagaacgtgcacgtgcagatcgacaacagactgagagacctggagggcatcggcaagagcctgaagtactacagagacacctaccaccccctggacgactggatccagcaggtggagaccacccagagaaagatccaggagaaccagcccgagaacagcaagaccctggccacccagctgaaccagcagaagatgctggtgagcgagatcgagatgaagcagagcaagatggacgagtgccagaagtacgccgagcagtacagcgccaccgtgaaggactacgagctgcagaccatgacctacagagccatggtggacagccagcagaagagccccgtgaagagaagaagaatgcagagcagcgccgacctgatcatccaggagttcatggacctgagaaccagatacaccgccctggtgaccctgatgacccagtacatcaagttcgccggcgacagcctgaagagactggaggaggaggagaagagcctggaggaggagaagaaggagcacgtggagaaggccaaggagctgcagaagtgggtgagcaacatcagcaagaccctgaaggacgccgagaaggccggcaagccccccttcagcaagcagaagatcagcagcgaggagatcagcaccaagaaggagcagctgagcgaggccctgcagaccatccagctgttcctggccaagcacggcgacaagatgaccgacgaggagagaaacgagctggagaagcaggtgaagaccctgcaggagagctacaacctgctgttcagcgagagcctgaagcagctgcaggagagccagaccagcggcgacgtgaaggtggaggagaagctggacaaggtgatcgccggcaccatcgaccagaccaccggcgaggtgctgagcgtgttccaggccgtgctgagaggcctgatcgactacgacaccggcatcagactgctggagacccagctgatgatcagcggcctgatcagccccgagctgagaaagtgcttcgacctgaaggacgccaagagccacggcctgatcgacgagcagatcctgtgccagctgaaggagctgagcaaggccaaggagatcatcagcgccgccagccccaccaccatccccgtgctggacgccctggcccagagcatgatcaccgagagcatggccatcaaggtgctggagatcctgctgagcaccggcagcctggtgatccccgccaccggcgagcagctgaccctgcagaaggccttccagcagaacctggtgagcagcgccctgttcagcaaggtgctggagagacagaacatgtgcaaggacctgatcgacccctgcaccagcgagaaggtgagcctgatcgacatggtgcagagaagcaccctgcaggagaacaccggcatgtggctgctgcccgtgagaccccaggagggcggcagaatcaccctgaagtgcggcagaaacatcagcatcctgagagccgcccacgagggcctgatcgacagagagaccatgttcagactgctgagcgcccagctgctgagcggcggcctgatcaacagcaacagcggccagagaatgaccgtggaggaggccgtgagagagggcgtgatcgacagagacaccgccagcagcatcctgacctaccaggtgcagaccggcggcatcatccagagcaaccccgccaagagactgaccgtggacgaggccgtgcagtgcgacctgatcaccagcagcagcgccctgctggtgctggaggcccagagaggctacgtgggcctgatctggccccacagcggcgagatcttccccaccagcagcagcctgcagcaggagctgatcaccaacgagctggcctacaagatcctgaacggcagacagaagatcgccgccctgtacatccccgagagcagccaggtgatcggcctggacgccgccaagcagctgggcatcatcgacaacaacaccgccagcatcctgaagaacatcaccctgcccgacaagatgcccgacctgggcgacctggaggcctgcaagaacgccagaagatggctgagcttctgcaagttccagcccagcaccgtgcacgactacagacaggaggaggacgtgttcgacggcgaggagcccgtgaccacccagaccagcgaggagaccaagaagctgttcctgagctacctgatgatcaacagctacatggacgccaacaccggccagagactgctgctgtacgacggcgacctggacgaggccgtgggcatgctgctggagggctgccacgccgagttcgacggcaacaccgccatcaaggagtgcctggacgtgctgagcagcagcggcgtgttcctgaacaacgccagcggcagagagaaggacgagtgcaccgccacccccagcagcttcaacaagtgccactgcggcgagcccgagcacgaggagacccccgagaacagaaagtgcgccatcgacgaggagttcaacgagatgagaaacaccgtgatcaacagcgagttcagccagagcggcaagctggccagcaccatcagcatcgaccccaaggtgaacagcagccccagcgtgtgcgtgcccagcctgatcagctacctgacccagaccgagctggccgacatcagcatgctgagaagcgacagcgagaacatcctgaccaactacgagaaccagagcagagtggagaccaacgagagagccaacgagtgcagccacagcaagaacatccagaacttccccagcgacctgatcgagaaccccatcatgaagagcaagatgagcaagttctgcggcgtgaacgagaccgagaacgaggacaacaccaacagagacagccccatcttcgactacagccccagactgagcgccctgctgagccacgacaagctgatgcacagccagggcagcttcaacgacacccacacccccgagagcaacggcaacaagtgcgaggcccccgccctgagcttcagcgacaagaccatgctgagcggccagagaatcggcgagaagttccaggaccagttcctgggcatcgccgccatcaacatcagcctgcccggcgagcagtacggccagaagagcctgaacatgatcagcagcaacccccaggtgcagtaccacaacgacaagtacatcagcaacaccagcggcgaggacgagaagacccaccccggcttccagcagatgcccgaggacaaggaggacgagagcgagatcgaggagtacagctgcgccgtgacccccggcggcgacaccgacaacgccatcgtgagcctgacctgcgccacccccctgctggacgagaccatcagcgccagcgactacgagaccagcctgctgaacgaccagcagaacaacaccggcaccgacaccgacagcgacgacgacttctacgacacccccctgttcgaggacgacgaccacgacagcctgctgctggacggcgacgacagagactgcctgcaccccgaggactacgacaccctgcaggaggagaacgacgagaccgccagccccgccgacgtgttctacgacgtgagcaaggagaacgagaacagcatggtgccccagggcgcccccgtgggcagcctgagcgtgaagaacaaggcccactgcctgcaggacttcctgatggacgtggagaaggacgagctggacagcggcgagaagatccacctgaaccccgtgggcagcgacaaggtgaacggccagagcctggagaccggcagcgagagagagtgcaccaacatcctggagggcgacgagagcgacagcctgaccgactacgacatcgtgggcggcaaggagagcttcaccgccagcctgaagttcgacgacagcggcagctggagaggcagaaaggaggagtacgtgaccggccaggagttccacagcgacaccgaccacctggacagcatgcagagcgaggagagctacggcgactacatctacgacagcaacgaccaggacgacgacgacgacgacggcatcgacgaggagggcggcggcatcagagacgagaacggcaagcccagatgccagaacgtggccgaggacatggacatccagctgtgcgccagcatcctgaacgagaacagcgacgagaacgagaacatcaacaccatgatcctgctggacaagatgcacagctgcagcagcctggagaagcagcagagagtgaacgtggtgcagctggccagccccagcgagaacaacctggtgaccgagaagagcaacctgcccgagtacaccaccgagatcgccggcaagagcaaggagaacctgctgaaccacgagatggtgctgaaggacgtgctgccccccatcatcaaggacaccgagagcgagaagaccttcggccccgccagcatcagccacgacaacaacaacatcagcagcaccagcgagctgggcaccgacctggccaacaccaaggtgaagctgatccagggcagcgagctgcccgagctgaccgacagcgtgaagggcaaggacgagtacttcaagaacatgacccccaaggtggacagcagcctggaccacatcatctgcaccgagcccgacctgatcggcaagcccgccgaggagagccacctgagcctgatcgccagcgtgaccgacaaggacccccagggcaacggcagcgacctgatcaagggcagagacggcaagagcgacatcctgatcgaggacgagaccagcatccagaagatgtacctgggcgagggcgaggtgctggtggagggcctggtggaggaggagaacagacacctgaagctgctgcccggcaagaacaccagagacagcttcaagctgatcaacagccagttccccttcccccagatcaccaacaacgaggagctgaaccagaagggcagcctgaagaaggccaccgtgaccctgaaggacgagcccaacaacctgcagatcatcgtgagcaagagccccgtgcagttcgagaacctggaggagatcttcgacaccagcgtgagcaaggagatcagcgacgacatcaccagcgacatcaccagctgggagggcaacacccacttcgaggagagcttcaccgacggccccgagaaggagctggacctgttcacctacctgaagcactgcgccaagaacatcaaggccaaggacgtggccaagcccaacgaggacgtgcccagccacgtgctgatcaccgccccccccatgaaggagcacctgcagctgggcgtgaacaacaccaaggagaagagcaccagcacccagaaggacagccccctgaacgacatgatccagagcaacgacctgtgcagcaaggagagcatcagcggcggcggcaccgagatcagccagttcacccccgagagcatcgaggccaccctgagcatcctgagcagaaagcacgtggaggacgtgggcaagaacgacttcctgcagagcgagagatgcgccaacggcctgggcaacgacaacagcagcaacaccctgaacaccgactacagcttcctggagatcaacaacaagaaggagagaatcgagcagcagctgcccaaggagcaggccctgagccccagaagccaggagaaggaggtgcagatccccgagctgagccaggtgttcgtggaggacgtgaaggacatcctgaagagcagactgaaggagggccacatgaacccccaggaggtggaggagcccagcgcctgcgccgacaccaagatcctgatccagaacctgatcaagagaatcaccaccagccagctggtgaacgaggccagcaccgtgcccagcgacagccagatgagcgacagcagcggcgtgagccccatgaccaacagcagcgagctgaagcccgagagcagagacgaccccttctgcatcggcaacctgaagagcgagctgctgctgaacatcctgaagcaggaccagcacagccagaagatcaccggcgtgttcgagctgatgagagagctgacccacatggagtacgacctggagaagagaggcatcaccagcaaggtgctgcccctgcagctggagaacatcttctacaagctgctggccgacggctacagcgagaagatcgagcacgtgggcgacttcaaccagaaggcctgcagcaccagcgagatgatggaggagaagccccacatcctgggcgacatcaagagcaaggagggcaactactacagccccaacctggagaccgtgaaggagatcggcctggagagcagcaccgtgtgggccagcaccctgcccagagacgagaagctgaaggacctgtgcaacgacttccccagccacctggagtgcaccagcggcagcaaggagatggccagcggcgacagcagcaccgagcagttcagcagcgagctgcagcagtgcctgcagcacaccgagaagatgcacgagtacctgaccctgctgcaggacatgaagccccccctggacaaccaggagagcctggacaacaacctggaggccctgaagaaccagctgagacagctggagaccttcgagctgggcctggcccccatcgccgtgatcctgagaaaggacatgaagctggccgaggagttcctgaagagcctgcccagcgacttccccagaggccacgtggaggagctgagcatcagccaccagagcctgaagaccgccttcagcagcctgagcaacgtgagcagcgagagaaccaagcagatcatgctggccatcgacagcgagatgagcaagctggccgtgagccacgaggagttcctgcacaagctgaagagcttcagcgactgggtgagcgagaagagcaagagcgtgaaggacatcgagatcgtgaacgtgcaggacagcgagtacgtgaagaagagactggagttcctgaagaacgtgctgaaggacctgggccacaccaagatgcagctggagaccaccgccttcgacgtgcagttcttcatcagcgagtacgcccaggacctgagccccaaccagagcaagcagctgctgagactgctgaacaccacccagaagtgcttcctggacgtgcaggagagcgtgaccacccaggtggagagactggagacccagctgcacctggagcaggacctggacgaccagaagatcgtggccgagagacagcaggagtacaaggagaagctgcagggcatctgcgacctgctgacccagaccgagaacagactgatcggccaccaggaggccttcatgatcggcgacggcaccgtggagctgaagaagtaccagagcaagcaggaggagctgcagaaggacatgcagggcagcgcccaggccctggccgaggtggtgaagaacaccgagaacttcctgaaggagaacggcgagaagctgagccaggaggacaaggccctgatcgagcagaagctgaacgaggccaagatcaagtgcgagcagctgaacctgaaggccgagcagagcaagaaggagctggacaaggtggtgaccaccgccatcaaggaggagaccgagaaggtggccgccgtgaagcagctggaggagagcaagaccaagatcgagaacctgctggactggctgagcaacgtggacaaggacagcgagagagccggcaccaagcacaagcaggtgatcgagcagaacggcacccacttccaggagggcgacggcaagagcgccatcggcgaggaggacgaggtgaacggcaacctgctggagaccgacgtggacggccaggtgggcaccacccaggagaacctgaaccagcagtaccagaaggtgaaggcccagcacgagaagatcatcagccagcaccaggccgtgatcatcgccacccagagcgcccaggtgctgctggagaagcagggccagtacctgagccccgaggagaaggagaagctgcagaagaacatgaaggagctgaaggtgcactacgagaccgccctggccgagagcgagaagaagatgaagctgacccacagcctgcaggaggagctggagaagttcgacgccgactacaccgagttcgagcactggctgcagcagagcgagcaggagctggagaacctggaggccggcgccgacgacatcaacggcctgatgaccaagctgaagagacagaagagcttcagcgaggacgtgatcagccacaagggcgacctgagatacatcaccatcagcggcaacagagtgctggaggccgccaagagctgcagcaagagagacggcggcaaggtggacaccagcgccacccacagagaggtgcagagaaagctggaccacgccaccgacagattcagaagcctgtacagcaagtgcaacgtgctgggcaacaacctgaaggacctggtggacaagtaccagcactacgaggacgccagctgcggcctgctggccggcctgcaggcctgcgaggccaccgccagcaagcacctgagcgagcccatcgccgtggaccccaagaacctgcagagacagctggaggagaccaaggccctgcagggccagatcagcagccagcaggtggccgtggagaagctgaagaagaccgccgaggtgctgctggacgccagaggcagcctgctgcccgccaagaacgacatccagaagaccctggacgacatcgtgggcagatacgaggacctgagcaagagcgtgaacgagagaaacgagaagctgcagatcaccctgaccagaagcctgagcgtgcaggacggcctggacgagatgctggactggatgggcaacgtggagagcagcctgaaggagcaggacgtgggcaccggctactgcagaagcagcgagcagtacaagtgccacgagtag

SEQ ID NO: 79917 - DNA, 22386 bp, synthetic construct
  misc_feature 1..22386: note = Description of Artificial Sequence: Synthetic coding sequence
  source 1..22386: mol_type = other DNA
atggccggctacctgagccccgccgcctacctgtacgtggaggagcaggagtacctgcaggcctacgaggacgtgctggagagatacaaggacgagagagacaaggtgcagaagaagaccttcaccaagtggatcaaccagcacctgatgaaggtgagaaagcacgtgaacgacctgtacgaggacctgagagacggccacaacctgatcagcctgctggaggtgctgagcggcgacaccctgcccagagagaagggcagaatgagattccacagactgcagaacgtgcagatcgccctggactacctgaagagaagacaggtgaagctggtgaacatcagaaacgacgacatcaccgacggcaaccccaagctgaccctgggcctgatctggaccatcatcctgcacttccagatcagcgacatccacgtgaccggcgagagcgaggacatgagcgccaaggagagactgctgctgtggacccagcaggccaccgagggctacgccggcatcagatgcgagaacttcaccacctgctggagagacggcaagctgttcaacgccatcatccacaagtacagacccgacctgatcgacatgaacaccgtggccgtgcagagcaacctggccaacctggagcacgccttctacgtggccgagaagatcggcgtgatcagactgctggaccccgaggacgtggacgtgagcagccccgacgagaagagcgtgatcacctacgtgagcagcctgtacgacgccttccccaaggtgcccgagggcggcgagggcatcggcgccaacgacgtggaggtgaagtggatcgagtaccagaacatggtgaactacctgatccagtggatcagacaccacgtgaccaccatgagcgagagaaccttccccaacaaccccgtggagctgaaggccctgtacaaccagtacctgcagttcaaggagaccgagatcccccccaaggagaccgagaagagcaagatcaagagactgtacaagctgctggagatctggatcgagttcggcagaatcaagctgctgcagggctaccaccccaacgacatcgagaaggagtggggcaagctgatcatcgccatgctggagagagagaaggccctgagacccgaggtggagagactggagatgctgcagcagatcgccaacagagtgcagagagacagcgtgatctgcgaggacaagctgatcctggccggcaacgccctgcagagcgacagcaagagactggagagcggcgtgcagttccagaacgaggccgagatcgccggctacatcctggagtgcgagaacctgctgagacagcacgtgatcgacgtgcagatcctgatcgacggcaagtactaccaggccgaccagctggtgcagagagtggccaagctgagagacgagatcatggccctgagaaacgagtgcagcagcgtgtacagcaagggcagaatcctgaccaccgagcagaccaagctgatgatcagcggcatcacccagagcctgaacagcggcttcgcccagaccctgcaccccagcctgaccagcggcctgacccagagcctgacccccagcctgaccagcagcagcatgaccagcggcctgagcagcggcatgaccagcagactgacccccagcgtgacccccgcctacacccccggcttccccagcggcctggtgcccaacttcagcagcggcgtggagcccaacagcctgcagaccctgaagctgatgcagatcagaaagcccctgctgaagagcagcctgctggaccagaacctgaccgaggaggagatcaacatgaagttcgtgcaggacctgctgaactgggtggacgagatgcaggtgcagctggacagaaccgagtggggcagcgacctgcccagcgtggagagccacctggagaaccacaagaacgtgcacagagccatcgaggagttcgagagcagcctgaaggaggccaagatcagcgagatccagatgaccgcccccctgaagctgacctacgccgagaagctgcacagactggagagccagtacgccaagctgctgaacaccagcagaaaccaggagagacacctggacaccctgcacaacttcgtgagcagagccaccaacgagctgatctggctgaacgagaaggaggaggaggaggtggcctacgactggagcgagagaaacaccaacatcgccagaaagaaggactaccacgccgagctgatgagagagctggaccagaaggaggagaacatcaagagcgtgcaggagatcgccgagcagctgctgctggagaaccaccccgccagactgaccatcgaggcctacagagccgccatgcagacccagtggagctggatcctgcagctgtgccagtgcgtggagcagcacatcaaggagaacaccgcctacttcgagttcttcaacgacgccaaggaggccaccgactacctgagaaacctgaaggacgccatccagagaaagtacagctgcgacagaagcagcagcatccacaagctggaggacctggtgcaggagagcatggaggagaaggaggagctgctgcagtacaagagcaccatcgccaacctgatgggcaaggccaagaccatcatccagctgaagcccagaaacagcgactgccccctgaagaccagcatccccatcaaggccatctgcgactacagacagatcgagatcaccatctacaaggacgacgagtgcgtgctggccaacaacagccacagagccaagtggaaggtgatcagccccaccggcaacgaggccatggtgcccagcgtgtgcttcaccgtgcccccccccaacaaggaggccgtggacctggccaacagaatcgagcagcagtaccagaacgtgctgaccctgtggcacgagagccacatcaacatgaagagcgtggtgagctggcactacctgatcaacgagatcgacagaatcagagccagcaacgtggccagcatcaagaccatgctgcccggcgagcaccagcaggtgctgagcaacctgcagagcagattcgaggacttcctggaggacagccaggagagccaggtgttcagcggcagcgacatcacccagctggagaaggaggtgaacgtgtgcaagcagtactaccaggagctgctgaagagcgccgagagagaggagcaggaggagagcgtgtacaacctgtacatcagcgaggtgagaaacatcagactgagactggagaactgcgaggacagactgatcagacagatcagaacccccctggagagagacgacctgcacgagagcgtgttcagaatcaccgagcaggagaagctgaagaaggagctggagagactgaaggacgacctgggcaccatcaccaacaagtgcgaggagttcttcagccaggccgccgccagcagcagcgtgcccaccctgagaagcgagctgaacgtggtgctgcagaacatgaaccaggtgtacagcatgagcagcacctacatcgacaagctgaagaccgtgaacctggtgctgaagaacacccaggccgccgaggccctggtgaagctgtacgagaccaagctgtgcgaggaggaggccgtgatcgccgacaagaacaacatcgagaacctgatcagcaccctgaagcagtggagaagcgaggtggacgagaagagacaggtgttccacgccctggaggacgagctgcagaaggccaaggccatcagcgacgagatgttcaagacctacaaggagagagacctggacttcgactggcacaaggagaaggccgaccagctggtggagagatggcagaacgtgcacgtgcagatcgacaacagactgagagacctggagggcatcggcaagagcctgaagtactacagagacacctaccaccccctggacgactggatccagcaggtggagaccacccagagaaagatccaggagaaccagcccgagaacagcaagaccctggccacccagctgaaccagcagaagatgctggtgagcgagatcgagatgaagcagagcaagatggacgagtgccagaagtacgccgagcagtacagcgccaccgtgaaggactacgagctgcagaccatgacctacagagccatggtggacagccagcagaagagccccgtgaagagaagaagaatgcagagcagcgccgacctgatcatccaggagttcatggacctgagaaccagatacaccgccctggtgaccctgatgacccagtacatcaagttcgccggcgacagcctgaagagactggaggaggaggagaagagcctggaggaggagaagaaggagcacgtggagaaggccaaggagctgcagaagtgggtgagcaacatcagcaagaccctgaaggacgccgagaaggccggcaagccccccttcagcaagcagaagatcagcagcgaggagatcagcaccaagaaggagcagctgagcgaggccctgcagaccatccagctgttcctggccaagcacggcgacaagatgaccgacgaggagagaaacgagctggagaagcaggtgaagaccctgcaggagagctacaacctgctgttcagcgagagcctgaagcagctgcaggagagccagaccagcggcgacgtgaaggtggaggagaagctggacaaggtgatcgccggcaccatcgaccagaccaccggcgaggtgctgagcgtgttccaggccgtgctgagaggcctgatcgactacgacaccggcatcagactgctggagacccagctgatgatcagcggcctgatcagccccgagctgagaaagtgcttcgacctgaaggacgccaagagccacggcctgatcgacgagcagatcctgtgccagctgaaggagctgagcaaggccaaggagatcatcagcgccgccagccccaccaccatccccgtgctggacgccctggcccagagcatgatcaccgagagcatggccatcaaggtgctggagatcctgctgagcaccggcagcctggtgatccccgccaccggcgagcagctgaccctgcagaaggccttccagcagaacctggtgagcagcgccctgttcagcaaggtgctggagagacagaacatgtgcaaggacctgatcgacccctgcaccagcgagaaggtgagcctgatcgacatggtgcagagaagcaccctgcaggagaacaccggcatgtggctgctgcccgtgagaccccaggagggcggcagaatcaccctgaagtgcggcagaaacatcagcatcctgagagccgcccacgagggcctgatcgacagagagaccatgttcagactgctgagcgcccagctgctgagcggcggcctgatcaacagcaacagcggccagagaatgaccgtggaggaggccgtgagagagggcgtgatcgacagagacaccgccagcagcatcctgacctaccaggtgcagaccggcggcatcatccagagcaaccccgccaagagactgaccgtggacgaggccgtgcagtgcgacctgatcaccagcagcagcgccctgctggtgctggaggcccagagaggctacgtgggcctgatctggccccacagcggcgagatcttccccaccagcagcagcctgcagcaggagctgatcaccaacgagctggcctacaagatcctgaacggcagacagaagatcgccgccctgtacatccccgagagcagccaggtgatcggcctggacgccgccaagcagctgggcatcatcgacaacaacaccgccagcatcctgaagaacatcaccctgcccgacaagatgcccgacctgggcgacctggaggcctgcaagaacgccagaagatggctgagcttctgcaagttccagcccagcaccgtgcacgactacagacaggaggaggacgtgttcgacggcgaggagcccgtgaccacccagaccagcgaggagaccaagaagctgttcctgagctacctgatgatcaacagctacatggacgccaacaccggccagagactgctgctgtacgacggcgacctggacgaggccgtgggcatgctgctggagggctgccacgccgagttcgacggcaacaccgccatcaaggagtgcctggacgtgctgagcagcagcggcgtgttcctgaacaacgccagcggcagagagaaggacgagtgcaccgccacccccagcagcttcaacaagtgccactgcggcgagcccgagcacgaggagacccccgagaacagaaagtgcgccatcgacgaggagttcaacgagatgagaaacaccgtgatcaacagcgagttcagccagagcggcaagctggccagcaccatcagcatcgaccccaaggtgaacagcagccccagcgtgtgcgtgcccagcctgatcagctacctgacccagaccgagctggccgacatcagcatgctgagaagcgacagcgagaacatcctgaccaactacgagaaccagagcagagtggagaccaacgagagagccaacgagtgcagccacagcaagaacatccagaacttccccagcgacctgatcgagaaccccatcatgaagagcaagatgagcaagttctgcggcgtgaacgagaccgagaacgaggacaacaccaacagagacagccccatcttcgactacagccccagactgagcgccctgctgagccacgacaagctgatgcacagccagggcagcttcaacgacacccacacccccgagagcaacggcaacaagtgcgaggcccccgccctgagcttcagcgacaagaccatgctgagcggccagagaatcggcgagaagttccaggaccagttcctgggcatcgccgccatcaacatcagcctgcccggcgagcagtacggccagaagagcctgaacatgatcagcagcaacccccaggtgcagtaccacaacgacaagtacatcagcaacaccagcggcgaggacgagaagacccaccccggcttccagcagatgcccgaggacaaggaggacgagagcgagatcgaggagtacagctgcgccgtgacccccggcggcgacaccgacaacgccatcgtgagcctgacctgcgccacccccctgctggacgagaccatcagcgccagcgactacgagaccagcctgctgaacgaccagcagaacaacaccggcaccgacaccgacagcgacgacgacttctacgacacccccctgttcgaggacgacgaccacgacagcctgctgctggacggcgacgacagagactgcctgcaccccgaggactacgacaccctgcaggaggagaacgacgagaccgccagccccgccgacgtgttctacgacgtgagcaaggagaacgagaacagcatggtgccccagggcgcccccgtgggcagcctgagcgtgaagaacaaggcccactgcctgcaggacttcctgatggacgtggagaaggacgagctggacagcggcgagaagatccacctgaaccccgtgggcagcgacaaggtgaacggccagagcctggagaccggcagcgagagagagtgcaccaacatcctggagggcgacgagagcgacagcctgaccgactacgacatcgtgggcggcaaggagagcttcaccgccagcctgaagttcgacgacagcggcagctggagaggcagaaaggaggagtacgtgaccggccaggagttccacagcgacaccgaccacctggacagcatgcagagcgaggagagctacggcgactacatctacgacagcaacgaccaggacgacgacgacgacgacggcatcgacgaggagggcggcggcatcagagacgagaacggcaagcccagatgccagaacgtggccgaggacatggacatccagctgtgcgccagcatcctgaacgagaacagcgacgagaacgagaacatcaacaccatgatcctgctggacaagatgcacagctgcagcagcctggagaagcagcagagagtgaacgtggtgcagctggccagccccagcgagaacaacctggtgaccgagaagagcaacctgcccgagtacaccaccgagatcgccggcaagagcaaggagaacctgctgaaccacgagatggtgctgaaggacgtgctgccccccatcatcaaggacaccgagagcgagaagaccttcggccccgccagcatcagccacgacaacaacaacatcagcagcaccagcgagctgggcaccgacctggccaacaccaaggtgaagctgatccagggcagcgagctgcccgagctgaccgacagcgtgaagggcaaggacgagtacttcaagaacatgacccccaaggtggacagcagcctggaccacatcatctgcaccgagcccgacctgatcggcaagcccgccgaggagagccacctgagcctgatcgccagcgtgaccgacaaggacccccagggcaacggcagcgacctgatcaagggcagagacggcaagagcgacatcctgatcgaggacgagaccagcatccagaagatgtacctgggcgagggcgaggtgctggtggagggcctggtggaggaggagaacagacacctgaagctgctgcccggcaagaacaccagagacagcttcaagctgatcaacagccagttccccttcccccagatcaccaacaacgaggagctgaaccagaagggcagcctgaagaaggccaccgtgaccctgaaggacgagcccaacaacctgcagatcatcgtgagcaagagccccgtgcagttcgagaacctggaggagatcttcgacaccagcgtgagcaaggagatcagcgacgacatcaccagcgacatcaccagctgggagggcaacacccacttcgaggagagcttcaccgacggccccgagaaggagctggacctgttcacctacctgaagcactgcgccaagaacatcaaggccaaggacgtggccaagcccaacgaggacgtgcccagccacgtgctgatcaccgccccccccatgaaggagcacctgcagctgggcgtgaacaacaccaaggagaagagcaccagcacccagaaggacagccccctgaacgacatgatccagagcaacgacctgtgcagcaaggagagcatcagcggcggcggcaccgagatcagccagttcacccccgagagcatcgaggccaccctgagcatcctgagcagaaagcacgtggaggacgtgggcaagaacgacttcctgcagagcgagagatgcgccaacggcctgggcaacgacaacagcagcaacaccctgaacaccgactacagcttcctggagatcaacaacaagaaggagagaatcgagcagcagctgcccaaggagcaggccctgagccccagaagccaggagaaggaggtgcagatccccgagctgagccaggtgttcgtggaggacgtgaaggacatcctgaagagcagactgaaggagggccacatgaacccccaggaggtggaggagcccagcgcctgcgccgacaccaagatcctgatccagaacctgatcaagagaatcaccaccagccagctggtgaacgaggccagcaccgtgcccagcgacagccagatgagcgacagcagcggcgtgagccccatgaccaacagcagcgagctgaagcccgagagcagagacgaccccttctgcatcggcaacctgaagagcgagctgctgctgaacatcctgaagcaggaccagcacagccagaagatcaccggcgtgttcgagctgatgagagagctgacccacatggagtacgacctggagaagagaggcatcaccagcaaggtgctgcccctgcagctggagaacatcttctacaagctgctggccgacggctacagcgagaagatcgagcacgtgggcgacttcaaccagaaggcctgcagcaccagcgagatgatggaggagaagccccacatcctgggcgacatcaagagcaaggagggcaactactacagccccaacctggagaccgtgaaggagatcggcctggagagcagcaccgtgtgggccagcaccctgcccagagacgagaagctgaaggacctgtgcaacgacttccccagccacctggagtgcaccagcggcagcaaggagatggccagcggcgacagcagcaccgagcagttcagcagcgagctgcagcagtgcctgcagcacaccgagaagatgcacgagtacctgaccctgctgcaggacatgaagccccccctggacaaccaggagagcctggacaacaacctggaggccctgaagaaccagctgagacagctggagaccttcgagctgggcctggcccccatcgccgtgatcctgagaaaggacatgaagctggccgaggagttcctgaagagcctgcccagcgacttccccagaggccacgtggaggagctgagcatcagccaccagagcctgaagaccgccttcagcagcctgagcaacgtgagcagcgagagaaccaagcagatcatgctggccatcgacagcgagatgagcaagctggccgtgagccacgaggagttcctgcacaagctgaagagcttcagcgactgggtgagcgagaagagcaagagcgtgaaggacatcgagatcgtgaacgtgcaggacagcgagtacgtgaagaagagactggagttcctgaagaacgtgctgaaggacctgggccacaccaagatgcagctggagaccaccgccttcgacgtgcagttcttcatcagcgagtacgcccaggacctgagccccaaccagagcaagcagctgctgagactgctgaacaccacccagaagtgcttcctggacgtgcaggagagcgtgaccacccaggtggagagactggagacccagctgcacctggagcaggacctggacgaccagaagatcgtggccgagagacagcaggagtacaaggagaagctgcagggcatctgcgacctgctgacccagaccgagaacagactgatcggccaccaggaggccttcatgatcggcgacggcaccgtggagctgaagaagtaccagagcaagcaggaggagctgcagaaggacatgcagggcagcgcccaggccctggccgaggtggtgaagaacaccgagaacttcctgaaggagaacggcgagaagctgagccaggaggacaaggccctgatcgagcagaagctgaacgaggccaagatcaagtgcgagcagctgaacctgaaggccgagcagagcaagaaggagctggacaaggtggtgaccaccgccatcaaggaggagaccgagaaggtggccgccgtgaagcagctggaggagagcaagaccaagatcgagaacctgctggactggctgagcaacgtggacaaggacagcgagagagccggcaccaagcacaagcaggtgatcgagcagaacggcacccacttccaggagggcgacggcaagagcgccatcggcgaggaggacgaggtgaacggcaacctgctggagaccgacgtggacggccaggtgggcaccacccaggagaacctgaaccagcagtaccagaaggtgaaggcccagcacgagaagatcatcagccagcaccaggccgtgatcatcgccacccagagcgcccaggtgctgctggagaagcagggccagtacctgagccccgaggagaaggagaagctgcagaagaacatgaaggagctgaaggtgcactacgagaccgccctggccgagagcgagaagaagatgaagctgacccacagcctgcaggaggagctggagaagttcgacgccgactacaccgagttcgagcactggctgcagcagagcgagcaggagctggagaacctggaggccggcgccgacgacatcaacggcctgatgaccaagctgaagagacagaagagcttcagcgaggacgtgatcagccacaagggcgacctgagatacatcaccatcagcggcaacagagtgctggaggccgccaagagctgcagcaagagagacggcggcaaggtggacaccagcgccacccacagagaggtgcagagaaagctggaccacgccaccgacagattcagaagcctgtacagcaagtgcaacgtgctgggcaacaacctgaaggacctggtggacaagtaccagcactacgaggacgccagctgcggcctgctggccggcctgcaggcctgcgaggccaccgccagcaagcacctgagcgagcccatcgccgtggaccccaagaacctgcagagacagctggaggagaccaaggccctgcagggccagatcagcagccagcaggtggccgtggagaagctgaagaagaccgccgaggtgctgctggacgccagaggcagcctgctgcccgccaagaacgacatccagaagaccctggacgacatcgtgggcagatacgaggacctgagcaagagcgtgaacgagagaaacgagaagctgcagatcaccctgaccagaagcctgagcgtgcaggacggcctggacgagatgctggactggatgggcaacgtggagagcagcctgaaggagcagggccaggtgcccctgaacagcaccgccctgcaggacatcatcagcaagaacatcatgctggagcaggacatcgccggcagacagagcagcatcaacgccatgaacgagaaggtgaagaagttcatggagaccaccgaccccagcaccgccagcagcctgcaggccaagatgaaggacctgagcgccagattcagcgaggccagccacaagcacaaggagaccctggccaagatggaggagctgaagaccaaggtggagctgttcgagaacctgagcgagaagctgcagaccttcctggagaccaagacccaggccctgaccgaggtggacgtgcccggcaaggacgtgaccgagctgagccagtacatgcaggagagcaccagcgagttcctggagcacaagaagcacctggaggtgctgcacagcctgctgaaggagatcagcagccacggcctgcccagcgacaaggccctggtgctggagaagaccaacaacctgagcaagaagttcaaggagatggaggacaccatcaaggagaagaaggaggccgtgaccagctgccaggagcagctggacgccttccaggtgctggtgaagagcctgaagagctggatcaaggagaccaccaagaaggtgcccatcgtgcagcccagcttcggcgccgaggacctgggcaagagcctggaggacaccaagaagctgcaggagaagtggagcctgaagacccccgagatccagaaggtgaacaacagcggcatcagcctgtgcaacctgatcagcgccgtgaccacccccgccaaggccatcgccgccgtgaagagcggcggcgccgtgctgaacggcgagggcaccgccaccaacaccgaggagttctgggccaacaagggcctgaccagcatcaagaaggacatgaccgacatcagccacggctacgaggacctgggcctgctgctgaaggacaagatcgccgagctgaacaccaagctgagcaagctgcagaaggcccaggaggagagcagcgccatgatgcagtggctgcagaagatgaacaagaccgccaccaagtggcagcagacccccgcccccaccgacaccgaggccgtgaagacccaggtggagcagaacaagagcttcgaggccgagctgaagcagaacgtgaacaaggtgcaggagctgaaggacaagctgaccgagctgctggaggagaaccccgacacccccgaggcccccagatggaagcagatgctgaccgagatcgacagcaagtggcaggagctgaaccagctgaccatcgacagacagcagaagctggaggagagcagcaacaacctgacccagttccagaccgtggaggcccagctgaagcagtggctggtggagaaggagctgatggtgagcgtgctgggccccctgagcatcgaccccaacatgctgaacacccagagacagcaggtgcagatcctgctgcaggagttcgccaccagaaagccccagtacgagcagctgaccgccgccggccagggcatcctgagcagacccggcgaggaccccagcctgagaggcatcgtgaaggagcagctggccgccgtgacccagaagtgggacagcctgaccggccagctgagcgacagatgcgactggatcgaccaggccatcgtgaagagcacccagtaccagagcctgctgagaagcctgagcgacaagctgagcgacctggacaacaagctgagcagcagcctggccgtgagcacccaccccgacgccatgaaccagcagctggagaccgcccagaagatgaagcaggagatccagcaggagaagaagcagatcaaggtggcccaggccctgtgcgaggacctgagcgccctggtgaaggaggagtacctgaaggccgagctgagcagacagctggagggcatcctgaagagcttcaaggacgtggagcagaaggccgagaaccacgtgcagcacctgcagagcgcctgcgccagcagccaccagttccagcagatgagcagagacttccaggcctggctggacaccaagaaggaggagcagaacaagagccaccccatcagcgccaagctggacgtgctggagagcctgatcaaggaccacaaggacttcagcaagaccctgaccgcccagagccacatgtacgagaagaccatcgccgagggcgagaacctgctgctgaagacccagggcagcgagaaggccgccctgcagctgcagctgaacaccatcaagaccaactgggacaccttcaacaagcaggtgaaggagagagagaacaagctgaaggagagcctggagaaggccctgaagtacaaggagcaggtggagaccctgtggccctggatcgacaagtgccagaacaacctggaggagatcaagttctgcctggaccccgccgagggcgagaacagcatcgccaagctgaagagcctgcagaaggagatggaccagcacttcggcatggtggagctgctgaacaacaccgccaacagcctgctgagcgtgtgcgagatcgacaaggaggtggtgaccgacgagaacaagagcctgatccagaaggtggacatggtgaccgagcagctgcacagcaagaagttctgcctggagaacatgacccagaagttcaaggagttccaggaggtgagcaaggagagcaagagacagctgcagtgcgccaaggagcagctggacatccacgacagcctgggcagccaggcctacagcaacaagtacctgaccatgctgcagacccagcagaagagcctgcaggccctgaagcaccaggtggacctggccaagagactggcccaggacctggtggtggaggccagcgacagcaagggcaccagcgacgtgctgctgcaggtggagaccatcgcccaggagcacagcaccctgagccagcaggtggacgagaagtgcagcttcctggagaccaagctgcagggcatcggccacttccagaacaccatcagagagatgttcagccagttcgccgagttcgacgacgagctggacagcatggcccccgtgggcagagacgccgagaccctgcagaagcagaaggagaccatcaaggccttcctgaagaagctggaggccctgatggccagcaacgacaacgccaacaagacctgcaagatgatgctggccaccgaggagaccagccccgacctggtgggcatcaagagagacctggaggccctgagcaagcagtgcaacaagctgctggacagagcccaggccagagaggagcaggtggagggcaccatcaagagactggaggagttctacagcaagctgaaggagttcagcatcctgctgcagaaggccgaggagcacgaggagagccagggccccgtgggcatggagaccgagaccatcaaccagcagctgaacatgttcaaggtgttccagaaggaggagatcgagcccctgcagggcaagcagcaggacgtgaactggctgggccagggcctgatccagagcgccgccaagagcaccagcacccagggcctggagcacgacctggacgacgtgaacgccagatggaagaccctgaacaagaaggtggcccagagagccgcccagctgcaggaggccctgctgcactgcggcagattccaggacgccctggagagcctgctgagctggatggtggacaccgaggagctggtggccaaccagaagccccccagcgccgagttcaaggtggtgaaggcccagatccaggagcagaagctgctgcagagactgctggacgacagaaagagcaccgtggaggtgatcaagagagagggcgagaagatcgccaccaccgccgagcccgccgacaaggtgaagatcctgaagcagctgagcctgctggacagcagatgggaggccctgctgaacaaggccgagaccagaaacagacagctggagggcatcagcgtggtggcccagcagttccacgagaccctggagcccctgaacgagtggctgaccaccatcgagaagagactggtgaactgcgagcccatcggcacccaggccagcaagctggaggagcagatcgcccagcacaaggtgctgcaggaggacatcctgctgagaaagcagaacgtggaccaggccctgctgaacggcctggagctgctgaagcagaccaccggcgacgaggtgctgatcatccaggacaagctggaggccatcaaggccagatacaaggacatcaccaagctgagcaccgacgtggccaagaccctggagcaggccctgcagctggccagaagactgcacagcacccacgaggagctgtgcacctggctggacaaggtggaggtggagctgctgagctacgagacccaggtgctgaagggcgaggaggccagccaggcccagatgagacccaaggagctgaagaaggaggccaagaacaacaaggccctgctggacagcctgaacgaggtgagcagcgccctgctggagctggtgccctggagagccagagagggcctggagaagatggtggccgaggacaacgagagatacagactggtgagcgacaccatcacccagaaggtggaggagatcgacgccgccatcctgagaagccagcagttcgaccaggccgccgacgccgagctgagctggatcaccgagaccgagaagaagctgatgagcctgggcgacatcagactggagcaggaccagaccagcgcccagctgcaggtgcagaagaccttcaccatggagatcctgagacacaaggacatcatcgacgacctggtgaagagcggccacaagatcatgaccgcctgcagcgaggaggagaagcagagcatgaagaagaagctggacaaggtgctgaagaactacgacaccatctgccagatcaacagcgagagatacctgcagctggagagagcccagagcctggtgaaccagttctgggagacctacgaggagctgtggccctggctgaccgagacccagagcatcatcagccagctgcccgcccccgccctggagtacgagaccctgagacagcagcaggaggagcacagacagctgagagagctgatcgccgagcacaagccccacatcgacaagatgaacaagaccggcccccagctgctggagctgagccccggcgagggcttcagcatccaggagaagtacgtggccgccgacaccctgtacagccagatcaaggaggacgtgaagaagagagccgtggccctggacgaggccatcagccagagcacccagttccacgacaagatcgaccagatcctggagagcctggagagaatcgtggagagactgagacagccccccagcatcagcgccgaggtggagaagatcaaggagcagatcagcgagaacaagaacgtgagcgtggacatggagaagctgcagcccctgtacgagaccctgaagcagagaggcgaggagatgatcgccagaagcggcggcaccgacaaggacatcagcgccaaggccgtgcaggacaagctggaccagatggtgttcatctgggagaacatccacaccctggtggaggagagagaggccaagctgctggacgtgatggagctggccgagaagttctggtgcgaccacatgagcctgatcgtgaccatcaaggacacccaggacttcatcagagacctggaggaccccggcatcgaccccagcgtggtgaagcagcagcaggaggccgccgagaccatcagagaggagatcgacggcctgcaggaggagctggacatcgtgatcaacctgggcagcgagctgatcgccgcctgcggcgagcccgacaagcccatcgtgaagaagagcatcgacgagctgaacagcgcctgggacagcctgaacaaggcctggaaggacagaatcgacaagctggaggaggccatgcaggccgccgtgcagtaccaggacggcctgcaggccgtgttcgactgggtggacatcgccggcggcaagctggccagcatgagccccatcggcaccgacctggagaccgtgaagcagcagatcgaggagctgaagcagttcaagagcgaggcctaccagcagcagatcgagatggagagactgaaccaccaggccgagctgctgctgaagaaggtgaccgaggagagcgacaagcacaccgtgcaggaccccctgatggagctgaagctgatctgggacagcctggaggagagaatcatcaacagacagcacaagctggagggcgccctgctggccctgggccagttccagcacgccctggacgagctgctggcctggctgacccacaccgagggcctgctgagcgagcagaagcccgtgggcggcgaccccaaggccatcgagatcgagctggccaagcaccacgtgctgcagaacgacgtgctggcccaccagagcaccgtggaggccgtgaacaaggccggcaacgacctgatcgagagcagcgccggcgaggaggccagcaacctgcagaacaagctggaggtgctgaaccagagatggcagaacgtgctggagaagaccgagcagagaaagcagcagctggacggcgccctgagacaggccaagggcttccacggcgagatcgaggacctgcagcagtggctgaccgacaccgagagacacctgctggccagcaagcccctgggcggcctgcccgagaccgccaaggagcagctgaacgtgcacatggaggtgtgcgccgccttcgaggccaaggaggagacctacaagagcctgatgcagaagggccagcagatgctggccagatgccccaagagcgccgagaccaacatcgaccaggacatcaacaacctgaaggagaagtgggagagcgtggagaccaagctgaacgagagaaagaccaagctggaggaggccctgaacctggccatggagttccacaacagcctgcaggacttcatcaactggctgacccaggccgagcagaccctgaacgtggccagcagacccagcctgatcctggacaccgtgctgttccagatcgacgagcacaaggtgttcgccaacgaggtgaacagccacagagagcagatcatcgagctggacaagaccggcacccacctgaagtacttcagccagaagcaggacgtggtgctgatcaagaacctgctgatcagcgtgcagagcagatgggagaaggtggtgcagagactggtggagagaggcagaagcctggacgacgccagaaagagagccaagcagttccacgaggcctggagcaagctgatggagtggctggaggagagcgagaagagcctggacagcgagctggagatcgccaacgaccccgacaagatcaagacccagctggcccagcacaaggagttccagaagagcctgggcgccaagcacagcgtgtacgacaccaccaacagaaccggcagaagcctgaaggagaagaccagcctggccgacgacaacctgaagctggacgacatgctgagcgagctgagagacaagtgggacaccatctgcggcaagagcgtggagagacagaacaagctggaggaggccctgctgttcagcggccagttcaccgacgccctgcaggccctgatcgactggctgtacagagtggagccccagctggccgaggaccagcccgtgcacggcgacatcgacctggtgatgaacctgatcgacaaccacaaggccttccagaaggagctgggcaagagaaccagcagcgtgcaggccctgaagagaagcgccagagagctgatcgagggcagcagagacgacagcagctgggtgaaggtgcagatgcaggagctgagcaccagatgggagaccgtgtgcgccctgagcatcagcaagcagaccagactggaggccgccctgagacaggccgaggagttccacagcgtggtgcacgccctgctggagtggctggccgaggccgagcagaccctgagattccacggcgtgctgcccgacgacgaggacgccctgagaaccctgatcgaccagcacaaggagttcatgaagaagctggaggagaagagagccgagctgaacaaggccaccaccatgggcgacaccgtgctggccatctgccaccccgacagcatcaccaccatcaagcactggatcaccatcatcagagccagattcgaggaggtgctggcctgggccaagcagcaccagcagagactggccagcgccctggccggcctgatcgccaagcaggagctgctggaggccctgctggcctggctgcagtgggccgagaccaccctgaccgacaaggacaaggaggtgatcccccaggagatcgaggaggtgaaggccctgatcgccgagcaccagaccttcatggaggagatgaccagaaagcagcccgacgtggacaaggtgaccaagacctacaagagaagagccgccgaccccagcagcctgcagagccacatccccgtgctggacaagggcagagccggcagaaagagattccccgccagcagcctgtaccccagcggcagccagacccagatcgagaccaagaaccccagagtgaacctgctggtgagcaagtggcagcaggtgtggctgctggccctggagagaagaagaaagctgaacgacgccctggacagactggaggagctgagagagttcgccaacttcgacttcgacatctggagaaagaagtacatgagatggatgaaccacaagaagagcagagtgatggacttcttcagaagaatcgacaaggaccaggacggcaagatcaccagacaggagttcatcgacggcatcctgagcagcaagttccccaccagcagactggagatgagcgccgtggccgacatcttcgacagagacggcgacggctacatcgactactacgagttcgtggccgccctgcaccccaacaaggacgcctacaagcccatcaccgacgccgacaagatcgaggacgaggtgaccagacaggtggccaagtgcaagtgcgccaagagattccaggtggagcagatcggcgacaacaagtacagattcttcctgggcaaccagttcggcgacagccagcagctgagactggtgagaatcctgagaagcaccgtgatggtgagagtgggcggcggctggatggccctggacgagttcctggtgaagaacgacccctgcagagtgcaccaccacggcagcaagatgctgagaagcgagagcaacagcagcatcaccaccacccagcccaccatcgccaagggcagaaccaacatggagctgagagagaagttcatcctggccgacggcgccagccagggcatggccgccttcagacccagaggcagaagaagcagacccagcagcagaggcgccagccccaacagaagcaccagcgtgagcagccaggccgcccaggccgccagcccccaggtgcccgccaccaccacccccaagggcacccccatccagggcagcaagctgagactgcccggctacctgagcggcaagggcttccacagcggcgaggacagcggcctgatcaccaccgccgccgccagagtgagaacccagttcgccgacagcaagaagacccccagcagacccggcagcagagccggcagcaaggccggcagcagagccagcagcagaagaggcagcgacgccagcgacttcgacatcagcgagatccagagcgtgtgcagcgacgtggagaccgtgccccagacccacagacccacccccagagccggcagcagacccagcaccgccaagcccagcaagatccccaccccccagagaaagagccccgccagcaagctggacaagagcagcaagagatag

SEQ ID NO: 79918 - DNA, 23253 bp, synthetic construct
  misc_feature 1..23253: note = Description of Artificial Sequence: Synthetic coding sequence
  source 1..23253: mol_type = other DNA
atgatcgccgccgccttcctggtgctgctgagaccctacagcatccagtgcgccctgttcctgctgctgctgctgctgggcaccatcgccaccatcgtgttcttctgctgctggcacagaaagctgcagaagggcagacaccccatgaagagcgtgttcagcggcagaagcagaagcagagacgccgtgctgagaagccaccacttcagaagcgagggcttcagagccagccccagacacctgagaagaagagtggccgccgccgccgccgccagactggaggaggtgaagcccgtggtggaggtgcaccaccagagcgagcaggagaccagcgtgagaaagagaagaatcaagaagagcagcagagtgcagcccgagttctaccacagcgtgcagggcgccagcatcagaagacccagcagcggcaacgccagctacagatgcagcatgagcagcagcgccgacttcagcgacgaggacgacttcagccagaagagcggcagcgccagccccgcccccggcgacaccctgccctggaacctgcccaagcacgagagaagcaagagaaagatccagggcggcagcgtgctggaccccgccgagagagccgtgctgagaatcgccgacgagagagacaaggtgcagaagaagaccttcaccaagtggatcaaccagcacctgatgaaggtgagaaagcacgtgaacgacctgtacgaggacctgagagacggccacaacctgatcagcctgctggaggtgctgagcggcgacaccctgcccagagagaagggcagaatgagattccacagactgcagaacgtgcagatcgccctggactacctgaagagaagacaggtgaagctggtgaacatcagaaacgacgacatcaccgacggcaaccccaagctgaccctgggcctgatctggaccatcatcctgcacttccagatcagcgacatccacgtgaccggcgagagcgaggacatgagcgccaaggagagactgctgctgtggacccagcaggccaccgagggctacgccggcatcagatgcgagaacttcaccacctgctggagagacggcaagctgttcaacgccatcatccacaagtacagacccgacctgatcgacatgaacaccgtggccgtgcagagcaacctggccaacctggagcacgccttctacgtggccgagaagatcggcgtgatcagactgctggaccccgaggacgtggacgtgagcagccccgacgagaagagcgtgatcacctacgtgagcagcctgtacgacgccttccccaaggtgcccgagggcggcgagggcatcggcgccaacgacgtggaggtgaagtggatcgagtaccagaacatggtgaactacctgatccagtggatcagacaccacgtgaccaccatgagcgagagaaccttccccaacaaccccgtggagctgaaggccctgtacaaccagtacctgcagttcaaggagaccgagatcccccccaaggagaccgagaagagcaagatcaagagactgtacaagctgctggagatctggatcgagttcggcagaatcaagctgctgcagggctaccaccccaacgacatcgagaaggagtggggcaagctgatcatcgccatgctggagagagagaaggccctgagacccgaggtggagagactggagatgctgcagcagatcgccaacagagtgcagagagacagcgtgatctgcgaggacaagctgatcctggccggcaacgccctgcagagcgacagcaagagactggagagcggcgtgcagttccagaacgaggccgagatcgccggctacatcctggagtgcgagaacctgctgagacagcacgtgatcgacgtgcagatcctgatcgacggcaagtactaccaggccgaccagctggtgcagagagtggccaagctgagagacgagatcatggccctgagaaacgagtgcagcagcgtgtacagcaagggcagaatcctgaccaccgagcagaccaagctgatgatcagcggcatcacccagagcctgaacagcggcttcgcccagaccctgcaccccagcctgaccagcggcctgacccagagcctgacccccagcctgaccagcagcagcatgaccagcggcctgagcagcggcatgaccagcagactgacccccagcgtgacccccgcctacacccccggcttccccagcggcctggtgcccaacttcagcagcggcgtggagcccaacagcctgcagaccctgaagctgatgcagatcagaaagcccctgctgaagagcagcctgctggaccagaacctgaccgaggaggagatcaacatgaagttcgtgcaggacctgctgaactgggtggacgagatgcaggtgcagctggacagaaccgagtggggcagcgacctgcccagcgtggagagccacctggagaaccacaagaacgtgcacagagccatcgaggagttcgagagcagcctgaaggaggccaagatcagcgagatccagatgaccgcccccctgaagctgacctacgccgagaagctgcacagactggagagccagtacgccaagctgctgaacaccagcagaaaccaggagagacacctggacaccctgcacaacttcgtgagcagagccaccaacgagctgatctggctgaacgagaaggaggaggaggaggtggcctacgactggagcgagagaaacaccaacatcgccagaaagaaggactaccacgccgagctgatgagagagctggaccagaaggaggagaacatcaagagcgtgcaggagatcgccgagcagctgctgctggagaaccaccccgccagactgaccatcgaggcctacagagccgccatgcagacccagtggagctggatcctgcagctgtgccagtgcgtggagcagcacatcaaggagaacaccgcctacttcgagttcttcaacgacgccaaggaggccaccgactacctgagaaacctgaaggacgccatccagagaaagtacagctgcgacagaagcagcagcatccacaagctggaggacctggtgcaggagagcatggaggagaaggaggagctgctgcagtacaagagcaccatcgccaacctgatgggcaaggccaagaccatcatccagctgaagcccagaaacagcgactgccccctgaagaccagcatccccatcaaggccatctgcgactacagacagatcgagatcaccatctacaaggacgacgagtgcgtgctggccaacaacagccacagagccaagtggaaggtgatcagccccaccggcaacgaggccatggtgcccagcgtgtgcttcaccgtgcccccccccaacaaggaggccgtggacctggccaacagaatcgagcagcagtaccagaacgtgctgaccctgtggcacgagagccacatcaacatgaagagcgtggtgagctggcactacctgatcaacgagatcgacagaatcagagccagcaacgtggccagcatcaagaccatgctgcccggcgagcaccagcaggtgctgagcaacctgcagagcagattcgaggacttcctggaggacagccaggagagccaggtgttcagcggcagcgacatcacccagctggagaaggaggtgaacgtgtgcaagcagtactaccaggagctgctgaagagcgccgagagagaggagcaggaggagagcgtgtacaacctgtacatcagcgaggtgagaaacatcagactgagactggagaactgcgaggacagactgatcagacagatcagaacccccctggagagagacgacctgcacgagagcgtgttcagaatcaccgagcaggagaagctgaagaaggagctggagagactgaaggacgacctgggcaccatcaccaacaagtgcgaggagttcttcagccaggccgccgccagcagcagcgtgcccaccctgagaagcgagctgaacgtggtgctgcagaacatgaaccaggtgtacagcatgagcagcacctacatcgacaagctgaagaccgtgaacctggtgctgaagaacacccaggccgccgaggccctggtgaagctgtacgagaccaagctgtgcgaggaggaggccgtgatcgccgacaagaacaacatcgagaacctgatcagcaccctgaagcagtggagaagcgaggtggacgagaagagacaggtgttccacgccctggaggacgagctgcagaaggccaaggccatcagcgacgagatgttcaagacctacaaggagagagacctggacttcgactggcacaaggagaaggccgaccagctggtggagagatggcagaacgtgcacgtgcagatcgacaacagactgagagacctggagggcatcggcaagagcctgaagtactacagagacacctaccaccccctggacgactggatccagcaggtggagaccacccagagaaagatccaggagaaccagcccgagaacagcaagaccctggccacccagctgaaccagcagaagatgctggtgagcgagatcgagatgaagcagagcaagatggacgagtgccagaagtacgccgagcagtacagcgccaccgtgaaggactacgagctgcagaccatgacctacagagccatggtggacagccagcagaagagccccgtgaagagaagaagaatgcagagcagcgccgacctgatcatccaggagttcatggacctgagaaccagatacaccgccctggtgaccctgatgacccagtacatcaagttcgccggcgacagcctgaagagactggaggaggaggagaagagcctggaggaggagaagaaggagcacgtggagaaggccaaggagctgcagaagtgggtgagcaacatcagcaagaccctgaaggacgccgagaaggccggcaagccccccttcagcaagcagaagatcagcagcgaggagatcagcaccaagaaggagcagctgagcgaggccctgcagaccatccagctgttcctggccaagcacggcgacaagatgaccgacgaggagagaaacgagctggagaagcaggtgaagaccctgcaggagagctacaacctgctgttcagcgagagcctgaagcagctgcaggagagccagaccagcggcgacgtgaaggtggaggagaagctggacaaggtgatcgccggcaccatcgaccagaccaccggcgaggtgctgagcgtgttccaggccgtgctgagaggcctgatcgactacgacaccggcatcagactgctggagacccagctgatgatcagcggcctgatcagccccgagctgagaaagtgcttcgacctgaaggacgccaagagccacggcctgatcgacgagcagatcctgtgccagctgaaggagctgagcaaggccaaggagatcatcagcgccgccagccccaccaccatccccgtgctggacgccctggcccagagcatgatcaccgagagcatggccatcaaggtgctggagatcctgctgagcaccggcagcctggtgatccccgccaccggcgagcagctgaccctgcagaaggccttccagcagaacctggtgagcagcgccctgttcagcaaggtgctggagagacagaacatgtgcaaggacctgatcgacccctgcaccagcgagaaggtgagcctgatcgacatggtgcagagaagcaccctgcaggagaacaccggcatgtggctgctgcccgtgagaccccaggagggcggcagaatcaccctgaagtgcggcagaaacatcagcatcctgagagccgcccacgagggcctgatcgacagagagaccatgttcagactgctgagcgcccagctgctgagcggcggcctgatcaacagcaacagcggccagagaatgaccgtggaggaggccgtgagagagggcgtgatcgacagagacaccgccagcagcatcctgacctaccaggtgcagaccggcggcatcatccagagcaaccccgccaagagactgaccgtggacgaggccgtgcagtgcgacctgatcaccagcagcagcgccctgctggtgctggaggcccagagaggctacgtgggcctgatctggccccacagcggcgagatcttccccaccagcagcagcctgcagcaggagctgatcaccaacgagctggcctacaagatcctgaacggcagacagaagatcgccgccctgtacatccccgagagcagccaggtgatcggcctggacgccgccaagcagctgggcatcatcgacaacaacaccgccagcatcctgaagaacatcaccctgcccgacaagatgcccgacctgggcgacctggaggcctgcaagaacgccagaagatggctgagcttctgcaagttccagcccagcaccgtgcacgactacagacaggaggaggacgtgttcgacggcgaggagcccgtgaccacccagaccagcgaggagaccaagaagctgttcctgagctacctgatgatcaacagctacatggacgccaacaccggccagagactgctgctgtacgacggcgacctggacgaggccgtgggcatgctgctggagggctgccacgccgagttcgacggcaacaccgccatcaaggagtgcctggacgtgctgagcagcagcggcgtgttcctgaacaacgccagcggcagagagaaggacgagtgcaccgccacccccagcagcttcaacaagtgccactgcggcgagcccgagcacgaggagacccccgagaacagaaagtgcgccatcgacgaggagttcaacgagatgagaaacaccgtgatcaacagcgagttcagccagagcggcaagctggccagcaccatcagcatcgaccccaaggtgaacagcagccccagcgtgtgcgtgcccagcctgatcagctacctgacccagaccgagctggccgacatcagcatgctgagaagcgacagcgagaacatcctgaccaactacgagaaccagagcagagtggagaccaacgagagagccaacgagtgcagccacagcaagaacatccagaacttccccagcgacctgatcgagaaccccatcatgaagagcaagatgagcaagttctgcggcgtgaacgagaccgagaacgaggacaacaccaacagagacagccccatcttcgactacagccccagactgagcgccctgctgagccacgacaagctgatgcacagccagggcagcttcaacgacacccacacccccgagagcaacggcaacaagtgcgaggcccccgccctgagcttcagcgacaagaccatgctgagcggccagagaatcggcgagaagttccaggaccagttcctgggcatcgccgccatcaacatcagcctgcccggcgagcagtacggccagaagagcctgaacatgatcagcagcaacccccaggtgcagtaccacaacgacaagtacatcagcaacaccagcggcgaggacgagaagacccaccccggcttccagcagatgcccgaggacaaggaggacgagagcgagatcgaggagtacagctgcgccgtgacccccggcggcgacaccgacaacgccatcgtgagcctgacctgcgccacccccctgctggacgagaccatcagcgccagcgactacgagaccagcctgctgaacgaccagcagaacaacaccggcaccgacaccgacagcgacgacgacttctacgacacccccctgttcgaggacgacgaccacgacagcctgctgctggacggcgacgacagagactgcctgcaccccgaggactacgacaccctgcaggaggagaacgacgagaccgccagccccgccgacgtgttctacgacgtgagcaaggagaacgagaacagcatggtgccccagggcgcccccgtgggcagcctgagcgtgaagaacaaggcccactgcctgcaggacttcctgatggacgtggagaaggacgagctggacagcggcgagaagatccacctgaaccccgtgggcagcgacaaggtgaacggccagagcctggagaccggcagcgagagagagtgcaccaacatcctggagggcgacgagagcgacagcctgaccgactacgacatcgtgggcggcaaggagagcttcaccgccagcctgaagttcgacgacagcggcagctggagaggcagaaaggaggagtacgtgaccggccaggagttccacagcgacaccgaccacctggacagcatgcagagcgaggagagctacggcgactacatctacgacagcaacgaccaggacgacgacgacgacgacggcatcgacgaggagggcggcggcatcagagacgagaacggcaagcccagatgccagaacgtggccgaggacatggacatccagctgtgcgccagcatcctgaacgagaacagcgacgagaacgagaacatcaacaccatgatcctgctggacaagatgcacagctgcagcagcctggagaagcagcagagagtgaacgtggtgcagctggccagccccagcgagaacaacctggtgaccgagaagagcaacctgcccgagtacaccaccgagatcgccggcaagagcaaggagaacctgctgaaccacgagatggtgctgaaggacgtgctgccccccatcatcaaggacaccgagagcgagaagaccttcggccccgccagcatcagccacgacaacaacaacatcagcagcaccagcgagctgggcaccgacctggccaacaccaaggtgaagctgatccagggcagcgagctgcccgagctgaccgacagcgtgaagggcaaggacgagtacttcaagaacatgacccccaaggtggacagcagcctggaccacatcatctgcaccgagcccgacctgatcggcaagcccgccgaggagagccacctgagcctgatcgccagcgtgaccgacaaggacccccagggcaacggcagcgacctgatcaagggcagagacggcaagagcgacatcctgatcgaggacgagaccagcatccagaagatgtacctgggcgagggcgaggtgctggtggagggcctggtggaggaggagaacagacacctgaagctgctgcccggcaagaacaccagagacagcttcaagctgatcaacagccagttccccttcccccagatcaccaacaacgaggagctgaaccagaagggcagcctgaagaaggccaccgtgaccctgaaggacgagcccaacaacctgcagatcatcgtgagcaagagccccgtgcagttcgagaacctggaggagatcttcgacaccagcgtgagcaaggagatcagcgacgacatcaccagcgacatcaccagctgggagggcaacacccacttcgaggagagcttcaccgacggccccgagaaggagctggacctgttcacctacctgaagcactgcgccaagaacatcaaggccaaggacgtggccaagcccaacgaggacgtgcccagccacgtgctgatcaccgccccccccatgaaggagcacctgcagctgggcgtgaacaacaccaaggagaagagcaccagcacccagaaggacagccccctgaacgacatgatccagagcaacgacctgtgcagcaaggagagcatcagcggcggcggcaccgagatcagccagttcacccccgagagcatcgaggccaccctgagcatcctgagcagaaagcacgtggaggacgtgggcaagaacgacttcctgcagagcgagagatgcgccaacggcctgggcaacgacaacagcagcaacaccctgaacaccgactacagcttcctggagatcaacaacaagaaggagagaatcgagcagcagctgcccaaggagcaggccctgagccccagaagccaggagaaggaggtgcagatccccgagctgagccaggtgttcgtggaggacgtgaaggacatcctgaagagcagactgaaggagggccacatgaacccccaggaggtggaggagcccagcgcctgcgccgacaccaagatcctgatccagaacctgatcaagagaatcaccaccagccagctggtgaacgaggccagcaccgtgcccagcgacagccagatgagcgacagcagcggcgtgagccccatgaccaacagcagcgagctgaagcccgagagcagagacgaccccttctgcatcggcaacctgaagagcgagctgctgctgaacatcctgaagcaggaccagcacagccagaagatcaccggcgtgttcgagctgatgagagagctgacccacatggagtacgacctggagaagagaggcatcaccagcaaggtgctgcccctgcagctggagaacatcttctacaagctgctggccgacggctacagcgagaagatcgagcacgtgggcgacttcaaccagaaggcctgcagcaccagcgagatgatggaggagaagccccacatcctgggcgacatcaagagcaaggagggcaactactacagccccaacctggagaccgtgaaggagatcggcctggagagcagcaccgtgtgggccagcaccctgcccagagacgagaagctgaaggacctgtgcaacgacttccccagccacctggagtgcaccagcggcagcaaggagatggccagcggcgacagcagcaccgagcagttcagcagcgagctgcagcagtgcctgcagcacaccgagaagatgcacgagtacctgaccctgctgcaggacatgaagccccccctggacaaccaggagagcctggacaacaacctggaggccctgaagaaccagctgagacagctggagaccttcgagctgggcctggcccccatcgccgtgatcctgagaaaggacatgaagctggccgaggagttcctgaagagcctgcccagcgacttccccagaggccacgtggaggagctgagcatcagccaccagagcctgaagaccgccttcagcagcctgagcaacgtgagcagcgagagaaccaagcagatcatgctggccatcgacagcgagatgagcaagctggccgtgagccacgaggagttcctgcacaagctgaagagcttcagcgactgggtgagcgagaagagcaagagcgtgaaggacatcgagatcgtgaacgtgcaggacagcgagtacgtgaagaagagactggagttcctgaaggccaacaacgtgctgaaggacctgggccacaccaagatgcagctggagaccaccgccttcgacgtgcagttcttcatcagcgagtacgcccaggacctgagccccaaccagagcaagcagctgctgagactgctgaacaccacccagaagtgcttcctggacgtgcaggagagcgtgaccacccaggtggagagactggagacccagctgcacctggagcaggacctggacgaccagaagatcgtggccgagagacagcaggagtacaaggagaagctgcagggcatctgcgacctgctgacccagaccgagaacagactgatcggccaccaggaggccttcatgatcggcgacggcaccgtggagctgaagaagtaccagagcaagcaggaggagctgcagaaggacatgcagggcagcgcccaggccctggccgaggtggtgaagaacaccgagaacttcctgaaggagaacggcgagaagctgagccaggaggacaaggccctgatcgagcagaagctgaacgaggccaagatcaagtgcgagcagctgaacctgaaggccgagcagagcaagaaggagctggacaaggtggtgaccaccgccatcaaggaggagaccgagaaggtggccgccgtgaagcagctggaggagagcaagaccaagatcgagaacctgctggactggctgagcaacgtggacaaggacagcgagagagccggcaccaagcacaagcaggtgatcgagcagaacggcacccacttccaggagggcgacggcaagagcgccatcggcgaggaggacgaggtgaacggcaacctgctggagaccgacgtggacggccaggtgggcaccacccaggagaacctgaaccagcagtaccagaaggtgaaggcccagcacgagaagatcatcagccagcaccaggccgtgatcatcgccacccagagcgcccaggtgctgctggagaagcagggccagtacctgagccccgaggagaaggagaagctgcagaagaacatgaaggagctgaaggtgcactacgagaccgccctggccgagagcgagaagaagatgaagctgacccacagcctgcaggaggagctggagaagttcgacgccgactacaccgagttcgagcactggctgcagcagagcgagcaggagctggagaacctggaggccggcgccgacgacatcaacggcctgatgaccaagctgaagagacagaagagcttcagcgaggacgtgatcagccacaagggcgacctgagatacatcaccatcagcggcaacagagtgctggaggccgccaagagctgcagcaagagagacggcggcaaggtggacaccagcgccacccacagagaggtgcagagaaagctggaccacgccaccgacagattcagaagcctgtacagcaagtgcaacgtgctgggcaacaacctgaaggacctggtggacaagtaccagcactacgaggacgccagctgcggcctgctggccggcctgcaggcctgcgaggccaccgccagcaagcacctgagcgagcccatcgccgtggaccccaagaacctgcagagacagctggaggagaccaaggccctgcagggccagatcagcagccagcaggtggccgtggagaagctgaagaagaccgccgaggtgctgctggacgccagaggcagcctgctgcccgccaagaacgacatccagaagaccctggacgacatcgtgggcagatacgaggacctgagcaagagcgtgaacgagagaaacgagaagctgcagatcaccctgaccagaagcctgagcgtgcaggacggcctggacgagatgctggactggatgggcaacgtggagagcagcctgaaggagcagggccaggtgcccctgaacagcaccgccctgcaggacatcatcagcaagaacatcatgctggagcaggacatcgccggcagacagagcagcatcaacgccatgaacgagaaggtgaagaagttcatggagaccaccgaccccagcaccgccagcagcctgcaggccaagatgaaggacctgagcgccagattcagcgaggccagccacaagcacaaggagaccctggccaagatggaggagctgaagaccaaggtggagctgttcgagaacctgagcgagaagctgcagaccttcctggagaccaagacccaggccctgaccgaggtggacgtgcccggcaaggacgtgaccgagctgagccagtacatgcaggagagcaccagcgagttcctggagcacaagaagcacctggaggtgctgcacagcctgctgaaggagatcagcagccacggcctgcccagcgacaaggccctggtgctggagaagaccaacaacctgagcaagaagttcaaggagatggaggacaccatcaaggagaagaaggaggccgtgaccagctgccaggagcagctggacgccttccaggtgctggtgaagagcctgaagagctggatcaaggagaccaccaagaaggtgcccatcgtgcagcccagcttcggcgccgaggacctgggcaagagcctggaggacaccaagaagctgcaggagaagtggagcctgaagacccccgagatccagaaggtgaacaacagcggcatcagcctgtgcaacctgatcagcgccgtgaccacccccgccaaggccatcgccgccgtgaagagcggcggcgccgtgctgaacggcgagggcaccgccaccaacaccgaggagttctgggccaacaagggcctgaccagcatcaagaaggacatgaccgacatcagccacggctacgaggacctgggcctgctgctgaaggacaagatcgccgagctgaacaccaagctgagcaagctgcagaaggcccaggaggagagcagcgccatgatgcagtggctgcagaagatgaacaagaccgccaccaagtggcagcagacccccgcccccaccgacaccgaggccgtgaagacccaggtggagcagaacaagagcttcgaggccgagctgaagcagaacgtgaacaaggtgcaggagctgaaggacaagctgaccgagctgctggaggagaaccccgacacccccgaggcccccagatggaagcagatgctgaccgagatcgacagcaagtggcaggagctgaaccagctgaccatcgacagacagcagaagctggaggagagcagcaacaacctgacccagttccagaccgtggaggcccagctgaagcagtggctggtggagaaggagctgatggtgagcgtgctgggccccctgagcatcgaccccaacatgctgaacacccagagacagcaggtgcagatcctgctgcaggagttcgccaccagaaagccccagtacgagcagctgaccgccgccggccagggcatcctgagcagacccggcgaggaccccagcctgagaggcatcgtgaaggagcagctggccgccgtgacccagaagtgggacagcctgaccggccagctgagcgacagatgcgactggatcgaccaggccatcgtgaagagcacccagtaccagagcctgctgagaagcctgagcgacaagctgagcgacctggacaacaagctgagcagcagcctggccgtgagcacccaccccgacgccatgaaccagcagctggagaccgcccagaagatgaagcaggagatccagcaggagaagaagcagatcaaggtggcccaggccctgtgcgaggacctgagcgccctggtgaaggaggagtacctgaaggccgagctgagcagacagctggagggcatcctgaagagcttcaaggacgtggagcagaaggccgagaaccacgtgcagcacctgcagagcgcctgcgccagcagccaccagttccagcagatgagcagagacttccaggcctggctggacaccaagaaggaggagcagaacaagagccaccccatcagcgccaagctggacgtgctggagagcctgatcaaggaccacaaggacttcagcaagaccctgaccgcccagagccacatgtacgagaagaccatcgccgagggcgagaacctgctgctgaagacccagggcagcgagaaggccgccctgcagctgcagctgaacaccatcaagaccaactgggacaccttcaacaagcaggtgaaggagagagagaacaagctgaaggagagcctggagaaggccctgaagtacaaggagcaggtggagaccctgtggccctggatcgacaagtgccagaacaacctggaggagatcaagttctgcctggaccccgccgagggcgagaacagcatcgccaagctgaagagcctgcagaaggagatggaccagcacttcggcatggtggagctgctgaacaacaccgccaacagcctgctgagcgtgtgcgagatcgacaaggaggtggtgaccgacgagaacaagagcctgatccagaaggtggacatggtgaccgagcagctgcacagcaagaagttctgcctggagaacatgacccagaagttcaaggagttccaggaggtgagcaaggagagcaagagacagctgcagtgcgccaaggagcagctggacatccacgacagcctgggcagccaggcctacagcaacaagtacctgaccatgctgcagacccagcagaagagcctgcaggccctgaagcaccaggtggacctggccaagagactggcccaggacctggtggtggaggccagcgacagcaagggcaccagcgacgtgctgctgcaggtggagaccatcgcccaggagcacagcaccctgagccagcaggtggacgagaagtgcagcttcctggagaccaagctgcagggcatcggccacttccagaacaccatcagagagatgttcagccagttcgccgagttcgacgacgagctggacagcatggcccccgtgggcagagacgccgagaccctgcagaagcagaaggagaccatcaaggccttcctgaagaagctggaggccctgatggccagcaacgacaacgccaacaagacctgcaagatgatgctggccaccgaggagaccagccccgacctggtgggcatcaagagagacctggaggccctgagcaagcagtgcaacaagctgctggacagagcccaggccagagaggagcaggtggagggcaccatcaagagactggaggagttctacagcaagctgaaggagttcagcatcctgctgcagaaggccgaggagcacgaggagagccagggccccgtgggcatggagaccgagaccatcaaccagcagctgaacatgttcaaggtgttccagaaggaggagatcgagcccctgcagggcaagcagcaggacgtgaactggctgggccagggcctgatccagagcgccgccaagagcaccagcacccagggcctggagcacgacctggacgacgtgaacgccagatggaagaccctgaacaagaaggtggcccagagagccgcccagctgcaggaggccctgctgcactgcggcagattccaggacgccctggagagcctgctgagctggatggtggacaccgaggagctggtggccaaccagaagccccccagcgccgagttcaaggtggtgaaggcccagatccaggagcagaagctgctgcagagactgctggacgacagaaagagcaccgtggaggtgatcaagagagagggcgagaagatcgccaccaccgccgagcccgccgacaaggtgaagatcctgaagcagctgagcctgctggacagcagatgggaggccctgctgaacaaggccgagaccagaaacagacagctggagggcatcagcgtggtggcccagcagttccacgagaccctggagcccctgaacgagtggctgaccaccatcgagaagagactggtgaactgcgagcccatcggcacccaggccagcaagctggaggagcagatcgcccagcacaaggccctggaggacgacatcatcaaccacaacaagcacctgcaccaggccgtgagcatcggccagagcctgaaggtgctgagcagcagagaggacaaggacatggtgcagagcaagctggacttcagccaggtgtggtacatcgagatccaggagaagagccacagcagaagcgagctgctgcagcaggccctgtgcaacgccaagatcttcggcgaggacgaggtggagctgatgaactggctgaacgaggtgcacgacaagctgagcaagctgagcgtgcaggactacagcaccgagggcctgtggaagcagcagagcgagctgagagtgctgcaggaggacatcctgctgagaaagcagaacgtggaccaggccctgctgaacggcctggagctgctgaagcagaccaccggcgacgaggtgctgatcatccaggacaagctggaggccatcaaggccagatacaaggacatcaccaagctgagcaccgacgtggccaagaccctggagcaggccctgcagctggccagaagactgcacagcacccacgaggagctgtgcacctggctggacaaggtggaggtggagctgctgagctacgagacccaggtgctgaagggcgaggaggccagccaggcccagatgagacccaaggagctgaagaaggaggccaagaacaacaaggccctgctggacagcctgaacgaggtgagcagcgccctgctggagctggtgccctggagagccagagagggcctggagaagatggtggccgaggacaacgagagatacagactggtgagcgacaccatcacccagaaggtggaggagatcgacgccgccatcctgagaagccagcagttcgaccaggccgccgacgccgagctgagctggatcaccgagaccgagaagaagctgatgagcctgggcgacatcagactggagcaggaccagaccagcgcccagctgcaggtgcagaagaccttcaccatggagatcctgagacacaaggacatcatcgacgacctggtgaagagcggccacaagatcatgaccgcctgcagcgaggaggagaagcagagcatgaagaagaagctggacaaggtgctgaagaactacgacaccatctgccagatcaacagcgagagatacctgcagctggagagagcccagagcctggtgaaccagttctgggagacctacgaggagctgtggccctggctgaccgagacccagagcatcatcagccagctgcccgcccccgccctggagtacgagaccctgagacagcagcaggaggagcacagacagctgagagagctgatcgccgagcacaagccccacatcgacaagatgaacaagaccggcccccagctgctggagctgagccccggcgagggcttcagcatccaggagaagtacgtggccgccgacaccctgtacagccagatcaaggaggacgtgaagaagagagccgtggccctggacgaggccatcagccagagcacccagttccacgacaagatcgaccagatcctggagagcctggagagaatcgtggagagactgagacagccccccagcatcagcgccgaggtggagaagatcaaggagcagatcagcgagaacaagaacgtgagcgtggacatggagaagctgcagcccctgtacgagaccctgaagcagagaggcgaggagatgatcgccagaagcggcggcaccgacaaggacatcagcgccaaggccgtgcaggacaagctggaccagatggtgttcatctgggagaacatccacaccctggtggaggagagagaggccaagctgctggacgtgatggagctggccgagaagttctggtgcgaccacatgagcctgatcgtgaccatcaaggacacccaggacttcatcagagacctggaggaccccggcatcgaccccagcgtggtgaagcagcagcaggaggccgccgagaccatcagagaggagatcgacggcctgcaggaggagctggacatcgtgatcaacctgggcagcgagctgatcgccgcctgcggcgagcccgacaagcccatcgtgaagaagagcatcgacgagctgaacagcgcctgggacagcctgaacaaggcctggaaggacagaatcgacaagctggaggaggccatgcaggccgccgtgcagtaccaggacggcctgcaggccgtgttcgactgggtggacatcgccggcggcaagctggccagcatgagccccatcggcaccgacctggagaccgtgaagcagcagatcgaggagctgaagcagttcaagagcgaggcctaccagcagcagatcgagatggagagactgaaccaccaggccgagctgctgctgaagaaggtgaccgaggagagcgacaagcacaccgtgcaggaccccctgatggagctgaagctgatctgggacagcctggaggagagaatcatcaacagacagcacaagctggagggcgccctgctggccctgggccagttccagcacgccctggacgagctgctggcctggctgacccacaccgagggcctgctgagcgagcagaagcccgtgggcggcgaccccaaggccatcgagatcgagctggccaagcaccacgtgctgcagaacgacgtgctggcccaccagagcaccgtggaggccgtgaacaaggccggcaacgacctgatcgagagcagcgccggcgaggaggccagcaacctgcagaacaagctggaggtgctgaaccagagatggcagaacgtgctggagaagaccgagcagagaaagcagcagctggacggcgccctgagacaggccaagggcttccacggcgagatcgaggacctgcagcagtggctgaccgacaccgagagacacctgctggccagcaagcccctgggcggcctgcccgagaccgccaaggagcagctgaacgtgcacatggaggtgtgcgccgccttcgaggccaaggaggagacctacaagagcctgatgcagaagggccagcagatgctggccagatgccccaagagcgccgagaccaacatcgaccaggacatcaacaacctgaaggagaagtgggagagcgtggagaccaagctgaacgagagaaagaccaagctggaggaggccctgaacctggccatggagttccacaacagcctgcaggacttcatcaactggctgacccaggccgagcagaccctgaacgtggccagcagacccagcctgatcctggacaccgtgctgttccagatcgacgagcacaaggtgttcgccaacgaggtgaacagccacagagagcagatcatcgagctggacaagaccggcacccacctgaagtacttcagccagaagcaggacgtggtgctgatcaagaacctgctgatcagcgtgcagagcagatgggagaaggtggtgcagagactggtggagagaggcagaagcctggacgacgccagaaagagagccaagcagttccacgaggcctggagcaagctgatggagtggctggaggagagcgagaagagcctggacagcgagctggagatcgccaacgaccccgacaagatcaagacccagctggcccagcacaaggagttccagaagagcctgggcgccaagcacagcgtgtacgacaccaccaacagaaccggcagaagcctgaaggagaagaccagcctggccgacgacaacctgaagctggacgacatgctgagcgagctgagagacaagtgggacaccatctgcggcaagagcgtggagagacagaacaagctggaggaggccctgctgttcagcggccagttcaccgacgccctgcaggccctgatcgactggctgtacagagtggagccccagctggccgaggaccagcccgtgcacggcgacatcgacctggtgatgaacctgatcgacaaccacaaggccttccagaaggagctgggcaagagaaccagcagcgtgcaggccctgaagagaagcgccagagagctgatcgagggcagcagagacgacagcagctgggtgaaggtgcagatgcaggagctgagcaccagatgggagaccgtgtgcgccctgagcatcagcaagcagaccagactggaggccgccctgagacaggccgaggagttccacagcgtggtgcacgccctgctggagtggctggccgaggccgagcagaccctgagattccacggcgtgctgcccgacgacgaggacgccctgagaaccctgatcgaccagcacaaggagttcatgaagaagctggaggagaagagagccgagctgaacaaggccaccaccatgggcgacaccgtgctggccatctgccaccccgacagcatcaccaccatcaagcactggatcaccatcatcagagccagattcgaggaggtgctggcctgggccaagcagcaccagcagagactggccagcgccctggccggcctgatcgccaagcaggagctgctggaggccctgctggcctggctgcagtgggccgagaccaccctgaccgacaaggacaaggaggtgatcccccaggagatcgaggaggtgaaggccctgatcgccgagcaccagaccttcatggaggagatgaccagaaagcagcccgacgtggacaaggtgaccaagacctacaagagaagagccgccgaccccagcagcctgcagagccacatccccgtgctggacaagggcagagccggcagaaagagattccccgccagcagcctgtaccccagcggcagccagacccagatcgagaccaagaaccccagagtgaacctgctggtgagcaagtggcagcaggtgtggctgctggccctggagagaagaagaaagctgaacgacgccctggacagactggaggagctgagagagttcgccaacttcgacttcgacatctggagaaagaagtacatgagatggatgaaccacaagaagagcagagtgatggacttcttcagaagaatcgacaaggaccaggacggcaagatcaccagacaggagttcatcgacggcatcctgagcagcaagttccccaccagcagactggagatgagcgccgtggccgacatcttcgacagagacggcgacggctacatcgactactacgagttcgtggccgccctgcaccccaacaaggacgcctacaagcccatcaccgacgccgacaagatcgaggacgaggtgaccagacaggtggccaagtgcaagtgcgccaagagattccaggtggagcagatcggcgacaacaagtacagagtgagcttccagagcaacttcggcgacagccagcagctgagactggtgagaatcctgagaagcaccgtgatggtgagagtgggcggcggctggatggccctggacgagttcctggtgaagaacgacccctgcagagtgcaccaccacggcagcaagatgctgagaagcgagagcaacagcagcatcaccaccacccagcccaccatcgccaagggcagaaccaacatggagctgagagagaagttcatcctggccgacggcgccagccagggcatggccgccttcagacccagaggcagaagaagcagacccagcagcagaggcgccagccccaacagaagcaccagcgtgagcagccaggccgcccaggccgccagcccccaggtgcccgccaccaccacccccaagggcacccccatccagggcagcaagctgagactgcccggctacctgagcggcaagggcttccacagcggcgaggacagcggcctgatcaccaccgccgccgccagagtgagaacccagttcgccgacagcaagaagacccccagcagacccggcagcagagccggcagcaaggccggcagcagagccagcagcagaagaggcagcgacgccagcgacttcgacatcagcgagatccagagcgtgtgcagcgacgtggagaccgtgccccagacccacagacccacccccagagccggcagcagacccagcaccgccaagcccagcaagatccccaccccccagagaaagagccccgccagcaagctggacaagagcagcaagagatag

SEQ ID NO: 79919 - DNA, 7950 bp, synthetic construct
  misc_feature 1..7950: note = Description of Artificial Sequence: Synthetic coding sequence
  source 1..7950: mol_type = other DNA
atgcacagcagcagctacagctacagaagcagcgacagcgtgttcagcaacaccaccagcaccagaaccagcctggacagcaacgagaacctgctgctggtgcactgcggccccaccctgatcaacagctgcatcagcttcggcagcgagagcttcgacggccacagactggagatgctgcagcagatcgccaacagagtgcagagagacagcgtgatctgcgaggacaagctgatcctggccggcaacgccctgcagagcgacagcaagagactggagagcggcgtgcagttccagaacgaggccgagatcgccggctacatcctggagtgcgagaacctgctgagacagcacgtgatcgacgtgcagatcctgatcgacggcaagtactaccaggccgaccagctggtgcagagagtggccaagctgagagacgagatcatggccctgagaaacgagtgcagcagcgtgtacagcaagggcagaatcctgaccaccgagcagaccaagctgatgatcagcggcatcacccagagcctgaacagcggcttcgcccagaccctgcaccccagcctgaccagcggcctgacccagagcctgacccccagcctgaccagcagcagcatgaccagcggcctgagcagcggcatgaccagcagactgacccccagcgtgacccccgcctacacccccggcttccccagcggcctggtgcccaacttcagcagcggcgtggagcccaacagcctgcagaccctgaagctgatgcagatcagaaagcccctgctgaagagcagcctgctggaccagaacctgaccgaggaggagatcaacatgaagttcgtgcaggacctgctgaactgggtggacgagatgcaggtgcagctggacagaaccgagtggggcagcgacctgcccagcgtggagagccacctggagaaccacaagaacgtgcacagagccatcgaggagttcgagagcagcctgaaggaggccaagatcagcgagatccagatgaccgcccccctgaagctgacctacgccgagaagctgcacagactggagagccagtacgccaagctgctgaacaccagcagaaaccaggagagacacctggacaccctgcacaacttcgtgagcagagccaccaacgagctgatctggctgaacgagaaggaggaggaggaggtggcctacgactggagcgagagaaacaccaacatcgccagaaagaaggactaccacgccgagctgatgagagagctggaccagaaggaggagaacatcaagagcgtgcaggagatcgccgagcagctgctgctggagaaccaccccgccagactgaccatcgaggcctacagagccgccatgcagacccagtggagctggatcctgcagctgtgccagtgcgtggagcagcacatcaaggagaacaccgcctacttcgagttcttcaacgacgccaaggaggccaccgactacctgagaaacctgaaggacgccatccagagaaagtacagctgcgacagaagcagcagcatccacaagctggaggacctggtgcaggagagcatggaggagaaggaggagctgctgcagtacaagagcaccatcgccaacctgatgggcaaggccaagaccatcatccagctgaagcccagaaacagcgactgccccctgaagaccagcatccccatcaaggccatctgcgactacagacagatcgagatcaccatctacaaggacgacgagtgcgtgctggccaacaacagccacagagccaagtggaaggtgatcagccccaccggcaacgaggccatggtgcccagcgtgtgcttcaccgtgcccccccccaacaaggaggccgtggacctggccaacagaatcgagcagcagtaccagaacgtgctgaccctgtggcacgagagccacatcaacatgaagagcgtggtgagctggcactacctgatcaacgagatcgacagaatcagagccagcaacgtggccagcatcaagaccatgctgcccggcgagcaccagcaggtgctgagcaacctgcagagcagattcgaggacttcctggaggacagccaggagagccaggtgttcagcggcagcgacatcacccagctggagaaggaggtgaacgtgtgcaagcagtactaccaggagctgctgaagagcgccgagagagaggagcaggaggagagcgtgtacaacctgtacatcagcgaggtgagaaacatcagactgagactggagaactgcgaggacagactgatcagacagatcagaacccccctggagagagacgacctgcacgagagcgtgttcagaatcaccgagcaggagaagctgaagaaggagctggagagactgaaggacgacctgggcaccatcaccaacaagtgcgaggagttcttcagccaggccgccgccagcagcagcgtgcccaccctgagaagcgagctgaacgtggtgctgcagaacatgaaccaggtgtacagcatgagcagcacctacatcgacaagctgaagaccgtgaacctggtgctgaagaacacccaggccgccgaggccctggtgaagctgtacgagaccaagctgtgcgaggaggaggccgtgatcgccgacaagaacaacatcgagaacctgatcagcaccctgaagcagtggagaagcgaggtggacgagaagagacaggtgttccacgccctggaggacgagctgcagaaggccaaggccatcagcgacgagatgttcaagacctacaaggagagagacctggacttcgactggcacaaggagaaggccgaccagctggtggagagatggcagaacgtgcacgtgcagatcgacaacagactgagagacctggagggcatcggcaagagcctgaagtactacagagacacctaccaccccctggacgactggatccagcaggtggagaccacccagagaaagatccaggagaaccagcccgagaacagcaagaccctggccacccagctgaaccagcagaagatgctggtgagcgagatcgagatgaagcagagcaagatggacgagtgccagaagtacgccgagcagtacagcgccaccgtgaaggactacgagctgcagaccatgacctacagagccatggtggacagccagcagaagagccccgtgaagagaagaagaatgcagagcagcgccgacctgatcatccaggagttcatggacctgagaaccagatacaccgccctggtgaccctgatgacccagtacatcaagttcgccggcgacagcctgaagagactggaggaggaggagatcaagagatgcaaggagaccagcgagcacggcgcctacagcgacctgctgcagagacagaaggccaccgtgctggagaacagcaagctgaccggcaagatcagcgagctggagagaatggtggccgagctgaagaagcagaagagcagagtggaggaggagctgcccaaggtgagagaggccgccgagaacgagctgagaaagcagcagagaaacgtggaggacatcagcctgcagaagatcagagccgagagcgaggccaagcagtacagaagagagctggagaccatcgtgagagagaaggaggccgccgagagagagctggagagagtgagacagctgaccatcgaggccgaggccaagagagccgccgtggaggagaacctgctgaacttcagaaaccagctggaggagaacaccttcaccagaagaaccctggaggaccacctgaagagaaaggacctgagcctgaacgacctggagcagcagaagaacaagctgatggaggagctgagaagaaagagagacaacgaggaggagctgctgaagctgatcaagcagatggagaaggacctggccttccagaagcaggtggccgagaagcagctgaaggagaagcagaagatcgagctggaggccagaagaaagatcaccgagatccagtacacctgcagagagaacgccctgcccgtgtgccccatcacccaggccaccagctgcagagccgtgaccggcctgcagcaggagcacgacaagcagaaggccgaggagctgaagcagcaggtggacgagctgaccgccgccaacagaaaggccgagcaggacatgagagagctgacctacgagctgaacgccctgcagctggagaagaccagcagcgaggagaaggccagactgctgaaggacaagctggacgagaccaacaacaccctgagatgcctgaagctggagctggagagaaaggaccaggccgagaagggctacagccagcagctgagagagctgggcagacagctgaaccagaccaccggcaaggccgaggaggccatgcaggaggccagcgacctgaagaagatcaagagaaactaccagctggagctggagagcctgaaccacgagaagggcaagctgcagagagaggtggacagaatcaccagagcccacgccgtggccgagaagaacatccagcacctgaacagccagatccacagcttcagagacgagaaggagctggagagactgcagatctgccagagaaagagcgaccacctgaaggagcagttcgagaagagccacgagcagctgctgcagaacatcaaggccgagaaggagaacaacgacaagatccagagactgaacgaggagctggagaagagcaacgagtgcgccgagatgctgaagcagaaggtggaggagctgaccagacagaacaacgagaccaagctgatgatgcagagaatccaggccgagagcgagaacatcgtgctggagaagcagaccatccagcagagatgcgaggccctgaagatccaggccgacggcttcaaggaccagctgagaagcaccaacgagcacctgcacaagcagaccaagaccgagcaggacttccagagaaagatcaagtgcctggaggaggacctggccaagagccagaacctggtgagcgagttcaagcagaagtgcgaccagcagaacatcatcatccagaacaccaagaaggaggtgagaaacctgaacgccgagctgaacgccagcaaggaggagaagagaagaggcgagcagaaggtgcagctgcagcaggcccaggtgcaggagctgaacaacagactgaagaaggtgcaggacgagctgcacctgaagaccatcgaggagcagatgacccacagaaagatggtgctgttccaggaggagagcggcaagttcaagcagagcgccgaggagttcagaaagaagatggagaagctgatggagagcaaggtgatcaccgagaacgacatcagcggcatcagactggacttcgtgagcctgcagcaggagaacagcagagcccaggagaacgccaagctgtgcgagaccaacatcaaggagctggagagacagctgcagcagtacagagagcagatgcagcagggccagcacatggaggccaaccactaccagaagtgccagaagctggaggacgagctgatcgcccagaagagagaggtggagaacctgaagcagaagatggaccagcagatcaaggagcacgagcaccagctggtgctgctgcagtgcgagatccagaagaagagcaccgccaaggactgcaccttcaagcccgacttcgagatgaccgtgaaggagtgccagcacagcggcgagctgagcagcagaaacaccggccacctgcaccccacccccagaagccccctgctgagatggacccaggagccccagcccctggaggagaagtggcagcacagagtggtggagcagatccccaaggaggtgcagttccagccccccggcgcccccctggagaaggagaagagccagcagtgctacagcgagtacttcagccagaccagcaccgagctgcagatcaccttcgacgagaccaaccccatcaccagactgagcgagatcgagaagatcagagaccaggccctgaacaacagcagaccccccgtgagataccaggacaacgcctgcgagatggagctggtgaaggtgctgacccccctggagatcgccaagaacaagcagtacgacatgcacaccgaggtgaccaccctgaagcaggagaagaaccccgtgcccagcgccgaggagtggatgctggagggctgcagagccagcggcggcctgaagaagggcgacttcctgaagaagggcctggagcccgagaccttccagaacttcgacggcgaccacgcctgcagcgtgagagacgacgagttcaagttccagggcctgagacacaccgtgaccgccagacagctggtggaggccaagctgctggacatgagaaccatcgagcagctgagactgggcctgaagaccgtggaggaggtgcagaagaccctgaacaagttcctgaccaaggccaccagcatcgccggcctgtacctggagagcaccaaggagaagatcagcttcgccagcgccgccgagagaatcatcatcgacaagatggtggccctggccttcctggaggcccaggccgccaccggcttcatcatcgaccccatcagcggccagacctacagcgtggaggacgccgtgctgaagggcgtggtggaccccgagttcagaatcagactgctggaggccgagaaggccgccgtgggctacagctacagcagcaagaccctgagcgtgttccaggccatggagaacagaatgctggacagacagaagggcaagcacatcctggaggcccagatcgccagcggcggcgtgatcgaccccgtgagaggcatcagagtgccccccgagatcgccctgcagcagggcctgctgaacaacgccatcctgcagttcctgcacgagcccagcagcaacaccagagtgttccccaaccccaacaacaagcaggccctgtactacagcgagctgctgagaatgtgcgtgttcgacgtggagagccagtgcttcctgttccccttcggcgagagaaacatcagcaacctgaacgtgaagaagacccacagaatcagcgtggtggacaccaagaccggcagcgagctgaccgtgtacgaggccttccagagaaacctgatcgagaagagcatctacctggagctgagcggccagcagtaccagtggaaggaggccatgttcttcgagagctacggccacagcagccacatgctgaccgacaccaagaccggcctgcacttcaacatcaacgaggccatcgagcagggcaccatcgacaaggccctggtgaagaagtaccaggagggcctgatcaccctgaccgagctggccgacagcctgctgagcagactggtgcccaagaaggacctgcacagccccgtggccggctactggctgaccgccagcggcgagagaatcagcgtgctgaaggccagcagaagaaacctggtggacagaatcaccgccctgagatgcctggaggcccaggtgagcaccggcggcatcatcgaccccctgaccggcaagaagtacagagtggccgaggccctgcacagaggcctggtggacgagggcttcgcccagcagctgagacagtgcgagctggtgatcaccggcatcggccaccccatcaccaacaagatgatgagcgtggtggaggccgtgaacgccaacatcatcaacaaggagatgggcatcagatgcctggagttccagtacctgaccggcggcctgatcgagccccaggtgcacagcagactgagcatcgaggaggccctgcaggtgggcatcatcgacgtgctgatcgccaccaagctgaaggaccagaagagctacgtgagaaacatcatctgcccccagaccaagagaaagctgacctacaaggaggccctggagaaggccgacttcgacttccacaccggcctgaagctgctggaggtgagcgagcccctgatgaccggcatcagcagcctgtactacagcagctag

SEQ ID NO: 79920 - DNA, 22719 bp, synthetic construct
  misc_feature 1..22719: note = Description of Artificial Sequence: Synthetic coding sequence
  source 1..22719: mol_type = other DNA
atggccggctacctgagccccgccgcctacctgtacgtggaggagcaggagtacctgcaggcctacgaggacgtgctggagagatacaaggacgagagagacaaggtgcagaagaagaccttcaccaagtggatcaaccagcacctgatgaaggtgagaaagcacgtgaacgacctgtacgaggacctgagagacggccacaacctgatcagcctgctggaggtgctgagcggcgacaccctgcccagagagaagggcagaatgagattccacagactgcagaacgtgcagatcgccctggactacctgaagagaagacaggtgaagctggtgaacatcagaaacgacgacatcaccgacggcaaccccaagctgaccctgggcctgatctggaccatcatcctgcacttccagatcagcgacatccacgtgaccggcgagagcgaggacatgagcgccaaggagagactgctgctgtggacccagcaggccaccgagggctacgccggcatcagatgcgagaacttcaccacctgctggagagacggcaagctgttcaacgccatcatccacaagtacagacccgacctgatcgacatgaacaccgtggccgtgcagagcaacctggccaacctggagcacgccttctacgtggccgagaagatcggcgtgatcagactgctggaccccgaggacgtggacgtgagcagccccgacgagaagagcgtgatcacctacgtgagcagcctgtacgacgccttccccaaggtgcccgagggcggcgagggcatcggcgccaacgacgtggaggtgaagtggatcgagtaccagaacatggtgaactacctgatccagtggatcagacaccacgtgaccaccatgagcgagagaaccttccccaacaaccccgtggagctgaaggccctgtacaaccagtacctgcagttcaaggagaccgagatcccccccaaggagaccgagaagagcaagatcaagagactgtacaagctgctggagatctggatcgagttcggcagaatcaagctgctgcagggctaccaccccaacgacatcgagaaggagtggggcaagctgatcatcgccatgctggagagagagaaggccctgagacccgaggtggagagactggagatgctgcagcagatcgccaacagagtgcagagagacagcgtgatctgcgaggacaagctgatcctggccggcaacgccctgcagagcgacagcaagagactggagagcggcgtgcagttccagaacgaggccgagatcgccggctacatcctggagtgcgagaacctgctgagacagcacgtgatcgacgtgcagatcctgatcgacggcaagtactaccaggccgaccagctggtgcagagagtggccaagctgagagacgagatcatggccctgagaaacgagtgcagcagcgtgtacagcaagggcagaatcctgaccaccgagcagaccaagctgatgatcagcggcatcacccagagcctgaacagcggcttcgcccagaccctgcaccccagcctgaccagcggcctgacccagagcctgacccccagcctgaccagcagcagcatgaccagcggcctgagcagcggcatgaccagcagactgacccccagcgtgacccccgcctacacccccggcttccccagcggcctggtgcccaacttcagcagcggcgtggagcccaacagcctgcagaccctgaagctgatgcagatcagaaagcccctgctgaagagcagcctgctggaccagaacctgaccgaggaggagatcaacatgaagttcgtgcaggacctgctgaactgggtggacgagatgcaggtgcagctggacagaaccgagtggggcagcgacctgcccagcgtggagagccacctggagaaccacaagaacgtgcacagagccatcgaggagttcgagagcagcctgaaggaggccaagatcagcgagatccagatgaccgcccccctgaagctgacctacgccgagaagctgcacagactggagagccagtacgccaagctgctgaacaccagcagaaaccaggagagacacctggacaccctgcacaacttcgtgagcagagccaccaacgagctgatctggctgaacgagaaggaggaggaggaggtggcctacgactggagcgagagaaacaccaacatcgccagaaagaaggactaccacgccgagctgatgagagagctggaccagaaggaggagaacatcaagagcgtgcaggagatcgccgagcagctgctgctggagaaccaccccgccagactgaccatcgaggcctacagagccgccatgcagacccagtggagctggatcctgcagctgtgccagtgcgtggagcagcacatcaaggagaacaccgcctacttcgagttcttcaacgacgccaaggaggccaccgactacctgagaaacctgaaggacgccatccagagaaagtacagctgcgacagaagcagcagcatccacaagctggaggacctggtgcaggagagcatggaggagaaggaggagctgctgcagtacaagagcaccatcgccaacctgatgggcaaggccaagaccatcatccagctgaagcccagaaacagcgactgccccctgaagaccagcatccccatcaaggccatctgcgactacagacagatcgagatcaccatctacaaggacgacgagtgcgtgctggccaacaacagccacagagccaagtggaaggtgatcagccccaccggcaacgaggccatggtgcccagcgtgtgcttcaccgtgcccccccccaacaaggaggccgtggacctggccaacagaatcgagcagcagtaccagaacgtgctgaccctgtggcacgagagccacatcaacatgaagagcgtggtgagctggcactacctgatcaacgagatcgacagaatcagagccagcaacgtggccagcatcaagaccatgctgcccggcgagcaccagcaggtgctgagcaacctgcagagcagattcgaggacttcctggaggacagccaggagagccaggtgttcagcggcagcgacatcacccagctggagaaggaggtgaacgtgtgcaagcagtactaccaggagctgctgaagagcgccgagagagaggagcaggaggagagcgtgtacaacctgtacatcagcgaggtgagaaacatcagactgagactggagaactgcgaggacagactgatcagacagatcagaacccccctggagagagacgacctgcacgagagcgtgttcagaatcaccgagcaggagaagctgaagaaggagctggagagactgaaggacgacctgggcaccatcaccaacaagtgcgaggagttcttcagccaggccgccgccagcagcagcgtgcccaccctgagaagcgagctgaacgtggtgctgcagaacatgaaccaggtgtacagcatgagcagcacctacatcgacaagctgaagaccgtgaacctggtgctgaagaacacccaggccgccgaggccctggtgaagctgtacgagaccaagctgtgcgaggaggaggccgtgatcgccgacaagaacaacatcgagaacctgatcagcaccctgaagcagtggagaagcgaggtggacgagaagagacaggtgttccacgccctggaggacgagctgcagaaggccaaggccatcagcgacgagatgttcaagacctacaaggagagagacctggacttcgactggcacaaggagaaggccgaccagctggtggagagatggcagaacgtgcacgtgcagatcgacaacagactgagagacctggagggcatcggcaagagcctgaagtactacagagacacctaccaccccctggacgactggatccagcaggtggagaccacccagagaaagatccaggagaaccagcccgagaacagcaagaccctggccacccagctgaaccagcagaagatgctggtgagcgagatcgagatgaagcagagcaagatggacgagtgccagaagtacgccgagcagtacagcgccaccgtgaaggactacgagctgcagaccatgacctacagagccatggtggacagccagcagaagagccccgtgaagagaagaagaatgcagagcagcgccgacctgatcatccaggagttcatggacctgagaaccagatacaccgccctggtgaccctgatgacccagtacatcaagttcgccggcgacagcctgaagagactggaggaggaggagaagagcctggaggaggagaagaaggagcacgtggagaaggccaaggagctgcagaagtgggtgagcaacatcagcaagaccctgaaggacgccgagaaggccggcaagccccccttcagcaagcagaagatcagcagcgaggagatcagcaccaagaaggagcagctgagcgaggccctgcagaccatccagctgttcctggccaagcacggcgacaagatgaccgacgaggagagaaacgagctggagaagcaggtgaagaccctgcaggagagctacaacctgctgttcagcgagagcctgaagcagctgcaggagagccagaccagcggcgacgtgaaggtggaggagaagctggacaaggtgatcgccggcaccatcgaccagaccaccggcgaggtgctgagcgtgttccaggccgtgctgagaggcctgatcgactacgacaccggcatcagactgctggagacccagctgatgatcagcggcctgatcagccccgagctgagaaagtgcttcgacctgaaggacgccaagagccacggcctgatcgacgagcagatcctgtgccagctgaaggagctgagcaaggccaaggagatcatcagcgccgccagccccaccaccatccccgtgctggacgccctggcccagagcatgatcaccgagagcatggccatcaaggtgctggagatcctgctgagcaccggcagcctggtgatccccgccaccggcgagcagctgaccctgcagaaggccttccagcagaacctggtgagcagcgccctgttcagcaaggtgctggagagacagaacatgtgcaaggacctgatcgacccctgcaccagcgagaaggtgagcctgatcgacatggtgcagagaagcaccctgcaggagaacaccggcatgtggctgctgcccgtgagaccccaggagggcggcagaatcaccctgaagtgcggcagaaacatcagcatcctgagagccgcccacgagggcctgatcgacagagagaccatgttcagactgctgagcgcccagctgctgagcggcggcctgatcaacagcaacagcggccagagaatgaccgtggaggaggccgtgagagagggcgtgatcgacagagacaccgccagcagcatcctgacctaccaggtgcagaccggcggcatcatccagagcaaccccgccaagagactgaccgtggacgaggccgtgcagtgcgacctgatcaccagcagcagcgccctgctggtgctggaggcccagagaggctacgtgggcctgatctggccccacagcggcgagatcttccccaccagcagcagcctgcagcaggagctgatcaccaacgagctggcctacaagatcctgaacggcagacagaagatcgccgccctgtacatccccgagagcagccaggtgatcggcctggacgccgccaagcagctgggcatcatcgacaacaacaccgccagcatcctgaagaacatcaccctgcccgacaagatgcccgacctgggcgacctggaggcctgcaagaacgccagaagatggctgagcttctgcaagttccagcccagcaccgtgcacgactacagacaggaggaggacgtgttcgacggcgaggagcccgtgaccacccagaccagcgaggagaccaagaagctgttcctgagctacctgatgatcaacagctacatggacgccaacaccggccagagactgctgctgtacgacggcgacctggacgaggccgtgggcatgctgctggagggctgccacgccgagttcgacggcaacaccgccatcaaggagtgcctggacgtgctgagcagcagcggcgtgttcctgaacaacgccagcggcagagagaaggacgagtgcaccgccacccccagcagcttcaacaagtgccactgcggcgagcccgagcacgaggagacccccgagaacagaaagtgcgccatcgacgaggagttcaacgagatgagaaacaccgtgatcaacagcgagttcagccagagcggcaagctggccagcaccatcagcatcgaccccaaggtgaacagcagccccagcgtgtgcgtgcccagcctgatcagctacctgacccagaccgagctggccgacatcagcatgctgagaagcgacagcgagaacatcctgaccaactacgagaaccagagcagagtggagaccaacgagagagccaacgagtgcagccacagcaagaacatccagaacttccccagcgacctgatcgagaaccccatcatgaagagcaagatgagcaagttctgcggcgtgaacgagaccgagaacgaggacaacaccaacagagacagccccatcttcgactacagccccagactgagcgccctgctgagccacgacaagctgatgcacagccagggcagcttcaacgacacccacacccccgagagcaacggcaacaagtgcgaggcccccgccctgagcttcagcgacaagaccatgctgagcggccagagaatcggcgagaagttccaggaccagttcctgggcatcgccgccatcaacatcagcctgcccggcgagcagtacggccagaagagcctgaacatgatcagcagcaacccccaggtgcagtaccacaacgacaagtacatcagcaacaccagcggcgaggacgagaagacccaccccggcttccagcagatgcccgaggacaaggaggacgagagcgagatcgaggagtacagctgcgccgtgacccccggcggcgacaccgacaacgccatcgtgagcctgacctgcgccacccccctgctggacgagaccatcagcgccagcgactacgagaccagcctgctgaacgaccagcagaacaacaccggcaccgacaccgacagcgacgacgacttctacgacacccccctgttcgaggacgacgaccacgacagcctgctgctggacggcgacgacagagactgcctgcaccccgaggactacgacaccctgcaggaggagaacgacgagaccgccagccccgccgacgtgttctacgacgtgagcaaggagaacgagaacagcatggtgccccagggcgcccccgtgggcagcctgagcgtgaagaacaaggcccactgcctgcaggacttcctgatggacgtggagaaggacgagctggacagcggcgagaagatccacctgaaccccgtgggcagcgacaaggtgaacggccagagcctggagaccggcagcgagagagagtgcaccaacatcctggagggcgacgagagcgacagcctgaccgactacgacatcgtgggcggcaaggagagcttcaccgccagcctgaagttcgacgacagcggcagctggagaggcagaaaggaggagtacgtgaccggccaggagttccacagcgacaccgaccacctggacagcatgcagagcgaggagagctacggcgactacatctacgacagcaacgaccaggacgacgacgacgacgacggcatcgacgaggagggcggcggcatcagagacgagaacggcaagcccagatgccagaacgtggccgaggacatggacatccagctgtgcgccagcatcctgaacgagaacagcgacgagaacgagaacatcaacaccatgatcctgctggacaagatgcacagctgcagcagcctggagaagcagcagagagtgaacgtggtgcagctggccagccccagcgagaacaacctggtgaccgagaagagcaacctgcccgagtacaccaccgagatcgccggcaagagcaaggagaacctgctgaaccacgagatggtgctgaaggacgtgctgccccccatcatcaaggacaccgagagcgagaagaccttcggccccgccagcatcagccacgacaacaacaacatcagcagcaccagcgagctgggcaccgacctggccaacaccaaggtgaagctgatccagggcagcgagctgcccgagctgaccgacagcgtgaagggcaaggacgagtacttcaagaacatgacccccaaggtggacagcagcctggaccacatcatctgcaccgagcccgacctgatcggcaagcccgccgaggagagccacctgagcctgatcgccagcgtgaccgacaaggacccccagggcaacggcagcgacctgatcaagggcagagacggcaagagcgacatcctgatcgaggacgagaccagcatccagaagatgtacctgggcgagggcgaggtgctggtggagggcctggtggaggaggagaacagacacctgaagctgctgcccggcaagaacaccagagacagcttcaagctgatcaacagccagttccccttcccccagatcaccaacaacgaggagctgaaccagaagggcagcctgaagaaggccaccgtgaccctgaaggacgagcccaacaacctgcagatcatcgtgagcaagagccccgtgcagttcgagaacctggaggagatcttcgacaccagcgtgagcaaggagatcagcgacgacatcaccagcgacatcaccagctgggagggcaacacccacttcgaggagagcttcaccgacggccccgagaaggagctggacctgttcacctacctgaagcactgcgccaagaacatcaaggccaaggacgtggccaagcccaacgaggacgtgcccagccacgtgctgatcaccgccccccccatgaaggagcacctgcagctgggcgtgaacaacaccaaggagaagagcaccagcacccagaaggacagccccctgaacgacatgatccagagcaacgacctgtgcagcaaggagagcatcagcggcggcggcaccgagatcagccagttcacccccgagagcatcgaggccaccctgagcatcctgagcagaaagcacgtggaggacgtgggcaagaacgacttcctgcagagcgagagatgcgccaacggcctgggcaacgacaacagcagcaacaccctgaacaccgactacagcttcctggagatcaacaacaagaaggagagaatcgagcagcagctgcccaaggagcaggccctgagccccagaagccaggagaaggaggtgcagatccccgagctgagccaggtgttcgtggaggacgtgaaggacatcctgaagagcagactgaaggagggccacatgaacccccaggaggtggaggagcccagcgcctgcgccgacaccaagatcctgatccagaacctgatcaagagaatcaccaccagccagctggtgaacgaggccagcaccgtgcccagcgacagccagatgagcgacagcagcggcgtgagccccatgaccaacagcagcgagctgaagcccgagagcagagacgaccccttctgcatcggcaacctgaagagcgagctgctgctgaacatcctgaagcaggaccagcacagccagaagatcaccggcgtgttcgagctgatgagagagctgacccacatggagtacgacctggagaagagaggcatcaccagcaaggtgctgcccctgcagctggagaacatcttctacaagctgctggccgacggctacagcgagaagatcgagcacgtgggcgacttcaaccagaaggcctgcagcaccagcgagatgatggaggagaagccccacatcctgggcgacatcaagagcaaggagggcaactactacagccccaacctggagaccgtgaaggagatcggcctggagagcagcaccgtgtgggccagcaccctgcccagagacgagaagctgaaggacctgtgcaacgacttccccagccacctggagtgcaccagcggcagcaaggagatggccagcggcgacagcagcaccgagcagttcagcagcgagctgcagcagtgcctgcagcacaccgagaagatgcacgagtacctgaccctgctgcaggacatgaagccccccctggacaaccaggagagcctggacaacaacctggaggccctgaagaaccagctgagacagctggagaccttcgagctgggcctggcccccatcgccgtgatcctgagaaaggacatgaagctggccgaggagttcctgaagagcctgcccagcgacttccccagaggccacgtggaggagctgagcatcagccaccagagcctgaagaccgccttcagcagcctgagcaacgtgagcagcgagagaaccaagcagatcatgctggccatcgacagcgagatgagcaagctggccgtgagccacgaggagttcctgcacaagctgaagagcttcagcgactgggtgagcgagaagagcaagagcgtgaaggacatcgagatcgtgaacgtgcaggacagcgagtacgtgaagaagagactggagttcctgaaggccaacaacgtgctgaaggacctgggccacaccaagatgcagctggagaccaccgccttcgacgtgcagttcttcatcagcgagtacgcccaggacctgagccccaaccagagcaagcagctgctgagactgctgaacaccacccagaagtgcttcctggacgtgcaggagagcgtgaccacccaggtggagagactggagacccagctgcacctggagcaggacctggacgaccagaagatcgtggccgagagacagcaggagtacaaggagaagctgcagggcatctgcgacctgctgacccagaccgagaacagactgatcggccaccaggaggccttcatgatcggcgacggcaccgtggagctgaagaagtaccagagcaagcaggaggagctgcagaaggacatgcagggcagcgcccaggccctggccgaggtggtgaagaacaccgagaacttcctgaaggagaacggcgagaagctgagccaggaggacaaggccctgatcgagcagaagctgaacgaggccaagatcaagtgcgagcagctgaacctgaaggccgagcagagcaagaaggagctggacaaggtggtgaccaccgccatcaaggaggagaccgagaaggtggccgccgtgaagcagctggaggagagcaagaccaagatcgagaacctgctggactggctgagcaacgtggacaaggacagcgagagagccggcaccaagcacaagcaggtgatcgagcagaacggcacccacttccaggagggcgacggcaagagcgccatcggcgaggaggacgaggtgaacggcaacctgctggagaccgacgtggacggccaggtgggcaccacccaggagaacctgaaccagcagtaccagaaggtgaaggcccagcacgagaagatcatcagccagcaccaggccgtgatcatcgccacccagagcgcccaggtgctgctggagaagcagggccagtacctgagccccgaggagaaggagaagctgcagaagaacatgaaggagctgaaggtgcactacgagaccgccctggccgagagcgagaagaagatgaagctgacccacagcctgcaggaggagctggagaagttcgacgccgactacaccgagttcgagcactggctgcagcagagcgagcaggagctggagaacctggaggccggcgccgacgacatcaacggcctgatgaccaagctgaagagacagaagagcttcagcgaggacgtgatcagccacaagggcgacctgagatacatcaccatcagcggcaacagagtgctggaggccgccaagagctgcagcaagagagacggcggcaaggtggacaccagcgccacccacagagaggtgcagagaaagctggaccacgccaccgacagattcagaagcctgtacagcaagtgcaacgtgctgggcaacaacctgaaggacctggtggacaagtaccagcactacgaggacgccagctgcggcctgctggccggcctgcaggcctgcgaggccaccgccagcaagcacctgagcgagcccatcgccgtggaccccaagaacctgcagagacagctggaggagaccaaggccctgcagggccagatcagcagccagcaggtggccgtggagaagctgaagaagaccgccgaggtgctgctggacgccagaggcagcctgctgcccgccaagaacgacatccagaagaccctggacgacatcgtgggcagatacgaggacctgagcaagagcgtgaacgagagaaacgagaagctgcagatcaccctgaccagaagcctgagcgtgcaggacggcctggacgagatgctggactggatgggcaacgtggagagcagcctgaaggagcagggccaggtgcccctgaacagcaccgccctgcaggacatcatcagcaagaacatcatgctggagcaggacatcgccggcagacagagcagcatcaacgccatgaacgagaaggtgaagaagttcatggagaccaccgaccccagcaccgccagcagcctgcaggccaagatgaaggacctgagcgccagattcagcgaggccagccacaagcacaaggagaccctggccaagatggaggagctgaagaccaaggtggagctgttcgagaacctgagcgagaagctgcagaccttcctggagaccaagacccaggccctgaccgaggtggacgtgcccggcaaggacgtgaccgagctgagccagtacatgcaggagagcaccagcgagttcctggagcacaagaagcacctggaggtgctgcacagcctgctgaaggagatcagcagccacggcctgcccagcgacaaggccctggtgctggagaagaccaacaacctgagcaagaagttcaaggagatggaggacaccatcaaggagaagaaggaggccgtgaccagctgccaggagcagctggacgccttccaggtgctggtgaagagcctgaagagctggatcaaggagaccaccaagaaggtgcccatcgtgcagcccagcttcggcgccgaggacctgggcaagagcctggaggacaccaagaagctgcaggagaagtggagcctgaagacccccgagatccagaaggtgaacaacagcggcatcagcctgtgcaacctgatcagcgccgtgaccacccccgccaaggccatcgccgccgtgaagagcggcggcgccgtgctgaacggcgagggcaccgccaccaacaccgaggagttctgggccaacaagggcctgaccagcatcaagaaggacatgaccgacatcagccacggctacgaggacctgggcctgctgctgaaggacaagatcgccgagctgaacaccaagctgagcaagctgcagaaggcccaggaggagagcagcgccatgatgcagtggctgcagaagatgaacaagaccgccaccaagtggcagcagacccccgcccccaccgacaccgaggccgtgaagacccaggtggagcagaacaagagcttcgaggccgagctgaagcagaacgtgaacaaggtgcaggagctgaaggacaagctgaccgagctgctggaggagaaccccgacacccccgaggcccccagatggaagcagatgctgaccgagatcgacagcaagtggcaggagctgaaccagctgaccatcgacagacagcagaagctggaggagagcagcaacaacctgacccagttccagaccgtggaggcccagctgaagcagtggctggtggagaaggagctgatggtgagcgtgctgggccccctgagcatcgaccccaacatgctgaacacccagagacagcaggtgcagatcctgctgcaggagttcgccaccagaaagccccagtacgagcagctgaccgccgccggccagggcatcctgagcagacccggcgaggaccccagcctgagaggcatcgtgaaggagcagctggccgccgtgacccagaagtgggacagcctgaccggccagctgagcgacagatgcgactggatcgaccaggccatcgtgaagagcacccagtaccagagcctgctgagaagcctgagcgacaagctgagcgacctggacaacaagctgagcagcagcctggccgtgagcacccaccccgacgccatgaaccagcagctggagaccgcccagaagatgaagcaggagatccagcaggagaagaagcagatcaaggtggcccaggccctgtgcgaggacctgagcgccctggtgaaggaggagtacctgaaggccgagctgagcagacagctggagggcatcctgaagagcttcaaggacgtggagcagaaggccgagaaccacgtgcagcacctgcagagcgcctgcgccagcagccaccagttccagcagatgagcagagacttccaggcctggctggacaccaagaaggaggagcagaacaagagccaccccatcagcgccaagctggacgtgctggagagcctgatcaaggaccacaaggacttcagcaagaccctgaccgcccagagccacatgtacgagaagaccatcgccgagggcgagaacctgctgctgaagacccagggcagcgagaaggccgccctgcagctgcagctgaacaccatcaagaccaactgggacaccttcaacaagcaggtgaaggagagagagaacaagctgaaggagagcctggagaaggccctgaagtacaaggagcaggtggagaccctgtggccctggatcgacaagtgccagaacaacctggaggagatcaagttctgcctggaccccgccgagggcgagaacagcatcgccaagctgaagagcctgcagaaggagatggaccagcacttcggcatggtggagctgctgaacaacaccgccaacagcctgctgagcgtgtgcgagatcgacaaggaggtggtgaccgacgagaacaagagcctgatccagaaggtggacatggtgaccgagcagctgcacagcaagaagttctgcctggagaacatgacccagaagttcaaggagttccaggaggtgagcaaggagagcaagagacagctgcagtgcgccaaggagcagctggacatccacgacagcctgggcagccaggcctacagcaacaagtacctgaccatgctgcagacccagcagaagagcctgcaggccctgaagcaccaggtggacctggccaagagactggcccaggacctggtggtggaggccagcgacagcaagggcaccagcgacgtgctgctgcaggtggagaccatcgcccaggagcacagcaccctgagccagcaggtggacgagaagtgcagcttcctggagaccaagctgcagggcatcggccacttccagaacaccatcagagagatgttcagccagttcgccgagttcgacgacgagctggacagcatggcccccgtgggcagagacgccgagaccctgcagaagcagaaggagaccatcaaggccttcctgaagaagctggaggccctgatggccagcaacgacaacgccaacaagacctgcaagatgatgctggccaccgaggagaccagccccgacctggtgggcatcaagagagacctggaggccctgagcaagcagtgcaacaagctgctggacagagcccaggccagagaggagcaggtggagggcaccatcaagagactggaggagttctacagcaagctgaaggagttcagcatcctgctgcagaaggccgaggagcacgaggagagccagggccccgtgggcatggagaccgagaccatcaaccagcagctgaacatgttcaaggtgttccagaaggaggagatcgagcccctgcagggcaagcagcaggacgtgaactggctgggccagggcctgatccagagcgccgccaagagcaccagcacccagggcctggagcacgacctggacgacgtgaacgccagatggaagaccctgaacaagaaggtggcccagagagccgcccagctgcaggaggccctgctgcactgcggcagattccaggacgccctggagagcctgctgagctggatggtggacaccgaggagctggtggccaaccagaagccccccagcgccgagttcaaggtggtgaaggcccagatccaggagcagaagctgctgcagagactgctggacgacagaaagagcaccgtggaggtgatcaagagagagggcgagaagatcgccaccaccgccgagcccgccgacaaggtgaagatcctgaagcagctgagcctgctggacagcagatgggaggccctgctgaacaaggccgagaccagaaacagacagctggagggcatcagcgtggtggcccagcagttccacgagaccctggagcccctgaacgagtggctgaccaccatcgagaagagactggtgaactgcgagcccatcggcacccaggccagcaagctggaggagcagatcgcccagcacaaggccctggaggacgacatcatcaaccacaacaagcacctgcaccaggccgtgagcatcggccagagcctgaaggtgctgagcagcagagaggacaaggacatggtgcagagcaagctggacttcagccaggtgtggtacatcgagatccaggagaagagccacagcagaagcgagctgctgcagcaggccctgtgcaacgccaagatcttcggcgaggacgaggtggagctgatgaactggctgaacgaggtgcacgacaagctgagcaagctgagcgtgcaggactacagcaccgagggcctgtggaagcagcagagcgagctgagagtgctgcaggaggacatcctgctgagaaagcagaacgtggaccaggccctgctgaacggcctggagctgctgaagcagaccaccggcgacgaggtgctgatcatccaggacaagctggaggccatcaaggccagatacaaggacatcaccaagctgagcaccgacgtggccaagaccctggagcaggccctgcagctggccagaagactgcacagcacccacgaggagctgtgcacctggctggacaaggtggaggtggagctgctgagctacgagacccaggtgctgaagggcgaggaggccagccaggcccagatgagacccaaggagctgaagaaggaggccaagaacaacaaggccctgctggacagcctgaacgaggtgagcagcgccctgctggagctggtgccctggagagccagagagggcctggagaagatggtggccgaggacaacgagagatacagactggtgagcgacaccatcacccagaaggtggaggagatcgacgccgccatcctgagaagccagcagttcgaccaggccgccgacgccgagctgagctggatcaccgagaccgagaagaagctgatgagcctgggcgacatcagactggagcaggaccagaccagcgcccagctgcaggtgcagaagaccttcaccatggagatcctgagacacaaggacatcatcgacgacctggtgaagagcggccacaagatcatgaccgcctgcagcgaggaggagaagcagagcatgaagaagaagctggacaaggtgctgaagaactacgacaccatctgccagatcaacagcgagagatacctgcagctggagagagcccagagcctggtgaaccagttctgggagacctacgaggagctgtggccctggctgaccgagacccagagcatcatcagccagctgcccgcccccgccctggagtacgagaccctgagacagcagcaggaggagcacagacagctgagagagctgatcgccgagcacaagccccacatcgacaagatgaacaagaccggcccccagctgctggagctgagccccggcgagggcttcagcatccaggagaagtacgtggccgccgacaccctgtacagccagatcaaggaggacgtgaagaagagagccgtggccctggacgaggccatcagccagagcacccagttccacgacaagatcgaccagatcctggagagcctggagagaatcgtggagagactgagacagccccccagcatcagcgccgaggtggagaagatcaaggagcagatcagcgagaacaagaacgtgagcgtggacatggagaagctgcagcccctgtacgagaccctgaagcagagaggcgaggagatgatcgccagaagcggcggcaccgacaaggacatcagcgccaaggccgtgcaggacaagctggaccagatggtgttcatctgggagaacatccacaccctggtggaggagagagaggccaagctgctggacgtgatggagctggccgagaagttctggtgcgaccacatgagcctgatcgtgaccatcaaggacacccaggacttcatcagagacctggaggaccccggcatcgaccccagcgtggtgaagcagcagcaggaggccgccgagaccatcagagaggagatcgacggcctgcaggaggagctggacatcgtgatcaacctgggcagcgagctgatcgccgcctgcggcgagcccgacaagcccatcgtgaagaagagcatcgacgagctgaacagcgcctgggacagcctgaacaaggcctggaaggacagaatcgacaagctggaggaggccatgcaggccgccgtgcagtaccaggacggcctgcaggccgtgttcgactgggtggacatcgccggcggcaagctggccagcatgagccccatcggcaccgacctggagaccgtgaagcagcagatcgaggagctgaagcagttcaagagcgaggcctaccagcagcagatcgagatggagagactgaaccaccaggccgagctgctgctgaagaaggtgaccgaggagagcgacaagcacaccgtgcaggaccccctgatggagctgaagctgatctgggacagcctggaggagagaatcatcaacagacagcacaagctggagggcgccctgctggccctgggccagttccagcacgccctggacgagctgctggcctggctgacccacaccgagggcctgctgagcgagcagaagcccgtgggcggcgaccccaaggccatcgagatcgagctggccaagcaccacgtgctgcagaacgacgtgctggcccaccagagcaccgtggaggccgtgaacaaggccggcaacgacctgatcgagagcagcgccggcgaggaggccagcaacctgcagaacaagctggaggtgctgaaccagagatggcagaacgtgctggagaagaccgagcagagaaagcagcagctggacggcgccctgagacaggccaagggcttccacggcgagatcgaggacctgcagcagtggctgaccgacaccgagagacacctgctggccagcaagcccctgggcggcctgcccgagaccgccaaggagcagctgaacgtgcacatggaggtgtgcgccgccttcgaggccaaggaggagacctacaagagcctgatgcagaagggccagcagatgctggccagatgccccaagagcgccgagaccaacatcgaccaggacatcaacaacctgaaggagaagtgggagagcgtggagaccaagctgaacgagagaaagaccaagctggaggaggccctgaacctggccatggagttccacaacagcctgcaggacttcatcaactggctgacccaggccgagcagaccctgaacgtggccagcagacccagcctgatcctggacaccgtgctgttccagatcgacgagcacaaggtgttcgccaacgaggtgaacagccacagagagcagatcatcgagctggacaagaccggcacccacctgaagtacttcagccagaagcaggacgtggtgctgatcaagaacctgctgatcagcgtgcagagcagatgggagaaggtggtgcagagactggtggagagaggcagaagcctggacgacgccagaaagagagccaagcagttccacgaggcctggagcaagctgatggagtggctggaggagagcgagaagagcctggacagcgagctggagatcgccaacgaccccgacaagatcaagacccagctggcccagcacaaggagttccagaagagcctgggcgccaagcacagcgtgtacgacaccaccaacagaaccggcagaagcctgaaggagaagaccagcctggccgacgacaacctgaagctggacgacatgctgagcgagctgagagacaagtgggacaccatctgcggcaagagcgtggagagacagaacaagctggaggaggccctgctgttcagcggccagttcaccgacgccctgcaggccctgatcgactggctgtacagagtggagccccagctggccgaggaccagcccgtgcacggcgacatcgacctggtgatgaacctgatcgacaaccacaaggccttccagaaggagctgggcaagagaaccagcagcgtgcaggccctgaagagaagcgccagagagctgatcgagggcagcagagacgacagcagctgggtgaaggtgcagatgcaggagctgagcaccagatgggagaccgtgtgcgccctgagcatcagcaagcagaccagactggaggccgccctgagacaggccgaggagttccacagcgtggtgcacgccctgctggagtggctggccgaggccgagcagaccctgagattccacggcgtgctgcccgacgacgaggacgccctgagaaccctgatcgaccagcacaaggagttcatgaagaagctggaggagaagagagccgagctgaacaaggccaccaccatgggcgacaccgtgctggccatctgccaccccgacagcatcaccaccatcaagcactggatcaccatcatcagagccagattcgaggaggtgctggcctgggccaagcagcaccagcagagactggccagcgccctggccggcctgatcgccaagcaggagctgctggaggccctgctggcctggctgcagtgggccgagaccaccctgaccgacaaggacaaggaggtgatcccccaggagatcgaggaggtgaaggccctgatcgccgagcaccagaccttcatggaggagatgaccagaaagcagcccgacgtggacaaggtgaccaagacctacaagagaagagccgccgaccccagcagcctgcagagccacatccccgtgctggacaagggcagagccggcagaaagagattccccgccagcagcctgtaccccagcggcagccagacccagatcgagaccaagaaccccagagtgaacctgctggtgagcaagtggcagcaggtgtggctgctggccctggagagaagaagaaagctgaacgacgccctggacagactggaggagctgagagagttcgccaacttcgacttcgacatctggagaaagaagtacatgagatggatgaaccacaagaagagcagagtgatggacttcttcagaagaatcgacaaggaccaggacggcaagatcaccagacaggagttcatcgacggcatcctgagcagcaagttccccaccagcagactggagatgagcgccgtggccgacatcttcgacagagacggcgacggctacatcgactactacgagttcgtggccgccctgcaccccaacaaggacgcctacaagcccatcaccgacgccgacaagatcgaggacgaggtgaccagacaggtggccaagtgcaagtgcgccaagagattccaggtggagcagatcggcgacaacaagtacagagtgagcttccagagcaacttcggcgacagccagcagctgagactggtgagaatcctgagaagcaccgtgatggtgagagtgggcggcggctggatggccctggacgagttcctggtgaagaacgacccctgcagagtgcaccaccacggcagcaagatgctgagaagcgagagcaacagcagcatcaccaccacccagcccaccatcgccaagggcagaaccaacatggagctgagagagaagttcatcctggccgacggcgccagccagggcatggccgccttcagacccagaggcagaagaagcagacccagcagcagaggcgccagccccaacagaagcaccagcgtgagcagccaggccgcccaggccgccagcccccaggtgcccgccaccaccacccccaagggcacccccatccagggcagcaagctgagactgcccggctacctgagcggcaagggcttccacagcggcgaggacagcggcctgatcaccaccgccgccgccagagtgagaacccagttcgccgacagcaagaagacccccagcagacccggcagcagagccggcagcaaggccggcagcagagccagcagcagaagaggcagcgacgccagcgacttcgacatcagcgagatccagagcgtgtgcagcgacgtggagaccgtgccccagacccacagacccacccccagagccggcagcagacccagcaccgccaagcccagcaagatccccaccccccagagaaagagccccgccagcaagctggacaagagcagcaagagatag

SEQ ID NO: 79921 - DNA, 16374 bp, synthetic construct
  misc_feature 1..16374: note = Description of Artificial Sequence: Synthetic coding sequence
  source 1..16374: mol_type = other DNA
atggccggctacctgagccccgccgcctacctgtacgtggaggagcaggagtacctgcaggcctacgaggacgtgctggagagatacaaggacgagagagacaaggtgcagaagaagaccttcaccaagtggatcaaccagcacctgatgaaggtgagaaagcacgtgaacgacctgtacgaggacctgagagacggccacaacctgatcagcctgctggaggtgctgagcggcgacaccctgcccagagagaagggcagaatgagattccacagactgcagaacgtgcagatcgccctggactacctgaagagaagacaggtgaagctggtgaacatcagaaacgacgacatcaccgacggcaaccccaagctgaccctgggcctgatctggaccatcatcctgcacttccagatcagcgacatccacgtgaccggcgagagcgaggacatgagcgccaaggagagactgctgctgtggacccagcaggccaccgagggctacgccggcatcagatgcgagaacttcaccacctgctggagagacggcaagctgttcaacgccatcatccacaagtacagacccgacctgatcgacatgaacaccgtggccgtgcagagcaacctggccaacctggagcacgccttctacgtggccgagaagatcggcgtgatcagactgctggaccccgaggacgtggacgtgagcagccccgacgagaagagcgtgatcacctacgtgagcagcctgtacgacgccttccccaaggtgcccgagggcggcgagggcatcggcgccaacgacgtggaggtgaagtggatcgagtaccagaacatggtgaactacctgatccagtggatcagacaccacgtgaccaccatgagcgagagaaccttccccaacaaccccgtggagctgaaggccctgtacaaccagtacctgcagttcaaggagaccgagatcccccccaaggagaccgagaagagcaagatcaagagactgtacaagctgctggagatctggatcgagttcggcagaatcaagctgctgcagggctaccaccccaacgacatcgagaaggagtggggcaagctgatcatcgccatgctggagagagagaaggccctgagacccgaggtggagagactggagatgctgcagcagatcgccaacagagtgcagagagacagcgtgatctgcgaggacaagctgatcctggccggcaacgccctgcagagcgacagcaagagactggagagcggcgtgcagttccagaacgaggccgagatcgccggctacatcctggagtgcgagaacctgctgagacagcacgtgatcgacgtgcagatcctgatcgacggcaagtactaccaggccgaccagctggtgcagagagtggccaagctgagagacgagatcatggccctgagaaacgagtgcagcagcgtgtacagcaagggcagaatcctgaccaccgagcagaccaagctgatgatcagcggcatcacccagagcctgaacagcggcttcgcccagaccctgcaccccagcctgaccagcggcctgacccagagcctgacccccagcctgaccagcagcagcatgaccagcggcctgagcagcggcatgaccagcagactgacccccagcgtgacccccgcctacacccccggcttccccagcggcctggtgcccaacttcagcagcggcgtggagcccaacagcctgcagaccctgaagctgatgcagatcagaaagcccctgctgaagagcagcctgctggaccagaacctgaccgaggaggagatcaacatgaagttcgtgcaggacctgctgaactgggtggacgagatgcaggtgcagctggacagaaccgagtggggcagcgacctgcccagcgtggagagccacctggagaaccacaagaacgtgcacagagccatcgaggagttcgagagcagcctgaaggaggccaagatcagcgagatccagatgaccgcccccctgaagctgacctacgccgagaagctgcacagactggagagccagtacgccaagctgctgaacaccagcagaaaccaggagagacacctggacaccctgcacaacttcgtgagcagagccaccaacgagctgatctggctgaacgagaaggaggaggaggaggtggcctacgactggagcgagagaaacaccaacatcgccagaaagaaggactaccacgccgagctgatgagagagctggaccagaaggaggagaacatcaagagcgtgcaggagatcgccgagcagctgctgctggagaaccaccccgccagactgaccatcgaggcctacagagccgccatgcagacccagtggagctggatcctgcagctgtgccagtgcgtggagcagcacatcaaggagaacaccgcctacttcgagttcttcaacgacgccaaggaggccaccgactacctgagaaacctgaaggacgccatccagagaaagtacagctgcgacagaagcagcagcatccacaagctggaggacctggtgcaggagagcatggaggagaaggaggagctgctgcagtacaagagcaccatcgccaacctgatgggcaaggccaagaccatcatccagctgaagcccagaaacagcgactgccccctgaagaccagcatccccatcaaggccatctgcgactacagacagatcgagatcaccatctacaaggacgacgagtgcgtgctggccaacaacagccacagagccaagtggaaggtgatcagccccaccggcaacgaggccatggtgcccagcgtgtgcttcaccgtgcccccccccaacaaggaggccgtggacctggccaacagaatcgagcagcagtaccagaacgtgctgaccctgtggcacgagagccacatcaacatgaagagcgtggtgagctggcactacctgatcaacgagatcgacagaatcagagccagcaacgtggccagcatcaagaccatgctgcccggcgagcaccagcaggtgctgagcaacctgcagagcagattcgaggacttcctggaggacagccaggagagccaggtgttcagcggcagcgacatcacccagctggagaaggaggtgaacgtgtgcaagcagtactaccaggagctgctgaagagcgccgagagagaggagcaggaggagagcgtgtacaacctgtacatcagcgaggtgagaaacatcagactgagactggagaactgcgaggacagactgatcagacagatcagaacccccctggagagagacgacctgcacgagagcgtgttcagaatcaccgagcaggagaagctgaagaaggagctggagagactgaaggacgacctgggcaccatcaccaacaagtgcgaggagttcttcagccaggccgccgccagcagcagcgtgcccaccctgagaagcgagctgaacgtggtgctgcagaacatgaaccaggtgtacagcatgagcagcacctacatcgacaagctgaagaccgtgaacctggtgctgaagaacacccaggccgccgaggccctggtgaagctgtacgagaccaagctgtgcgaggaggaggccgtgatcgccgacaagaacaacatcgagaacctgatcagcaccctgaagcagtggagaagcgaggtggacgagaagagacaggtgttccacgccctggaggacgagctgcagaaggccaaggccatcagcgacgagatgttcaagacctacaaggagagagacctggacttcgactggcacaaggagaaggccgaccagctggtggagagatggcagaacgtgcacgtgcagatcgacaacagactgagagacctggagggcatcggcaagagcctgaagtactacagagacacctaccaccccctggacgactggatccagcaggtggagaccacccagagaaagatccaggagaaccagcccgagaacagcaagaccctggccacccagctgaaccagcagaagatgctggtgagcgagatcgagatgaagcagagcaagatggacgagtgccagaagtacgccgagcagtacagcgccaccgtgaaggactacgagctgcagaccatgacctacagagccatggtggacagccagcagaagagccccgtgaagagaagaagaatgcagagcagcgccgacctgatcatccaggagttcatggacctgagaaccagatacaccgccctggtgaccctgatgacccagtacatcaagttcgccggcgacagcctgaagagactggaggaggaggagaagagcctggaggaggagaagaaggagcacgtggagaaggccaaggagctgcagaagtgggtgagcaacatcagcaagaccctgaaggacgccgagaaggccggcaagccccccttcagcaagcagaagatcagcagcgaggagatcagcaccaagaaggagcagctgagcgaggccctgcagaccatccagctgttcctggccaagcacggcgacaagatgaccgacgaggagagaaacgagctggagaagcaggtgaagaccctgcaggagagctacaacctgctgttcagcgagagcctgaagcagctgcaggagagccagaccagcggcgacgtgaaggtggaggagaagatcgtggccgagagacagcaggagtacaaggagaagctgcagggcatctgcgacctgctgacccagaccgagaacagactgatcggccaccaggaggccttcatgatcggcgacggcaccgtggagctgaagaagtaccagagcaagcaggaggagctgcagaaggacatgcagggcagcgcccaggccctggccgaggtggtgaagaacaccgagaacttcctgaaggagaacggcgagaagctgagccaggaggacaaggccctgatcgagcagaagctgaacgaggccaagatcaagtgcgagcagctgaacctgaaggccgagcagagcaagaaggagctggacaaggtggtgaccaccgccatcaaggaggagaccgagaaggtggccgccgtgaagcagctggaggagagcaagaccaagatcgagaacctgctggactggctgagcaacgtggacaaggacagcgagagagccggcaccaagcacaagcaggtgatcgagcagaacggcacccacttccaggagggcgacggcaagagcgccatcggcgaggaggacgaggtgaacggcaacctgctggagaccgacgtggacggccaggtgggcaccacccaggagaacctgaaccagcagtaccagaaggtgaaggcccagcacgagaagatcatcagccagcaccaggccgtgatcatcgccacccagagcgcccaggtgctgctggagaagcagggccagtacctgagccccgaggagaaggagaagctgcagaagaacatgaaggagctgaaggtgcactacgagaccgccctggccgagagcgagaagaagatgaagctgacccacagcctgcaggaggagctggagaagttcgacgccgactacaccgagttcgagcactggctgcagcagagcgagcaggagctggagaacctggaggccggcgccgacgacatcaacggcctgatgaccaagctgaagagacagaagagcttcagcgaggacgtgatcagccacaagggcgacctgagatacatcaccatcagcggcaacagagtgctggaggccgccaagagctgcagcaagagagacggcggcaaggtggacaccagcgccacccacagagaggtgcagagaaagctggaccacgccaccgacagattcagaagcctgtacagcaagtgcaacgtgctgggcaacaacctgaaggacctggtggacaagtaccagcactacgaggacgccagctgcggcctgctggccggcctgcaggcctgcgaggccaccgccagcaagcacctgagcgagcccatcgccgtggaccccaagaacctgcagagacagctggaggagaccaaggccctgcagggccagatcagcagccagcaggtggccgtggagaagctgaagaagaccgccgaggtgctgctggacgccagaggcagcctgctgcccgccaagaacgacatccagaagaccctggacgacatcgtgggcagatacgaggacctgagcaagagcgtgaacgagagaaacgagaagctgcagatcaccctgaccagaagcctgagcgtgcaggacggcctggacgagatgctggactggatgggcaacgtggagagcagcctgaaggagcagggccaggtgcccctgaacagcaccgccctgcaggacatcatcagcaagaacatcatgctggagcaggacatcgccggcagacagagcagcatcaacgccatgaacgagaaggtgaagaagttcatggagaccaccgaccccagcaccgccagcagcctgcaggccaagatgaaggacctgagcgccagattcagcgaggccagccacaagcacaaggagaccctggccaagatggaggagctgaagaccaaggtggagctgttcgagaacctgagcgagaagctgcagaccttcctggagaccaagacccaggccctgaccgaggtggacgtgcccggcaaggacgtgaccgagctgagccagtacatgcaggagagcaccagcgagttcctggagcacaagaagcacctggaggtgctgcacagcctgctgaaggagatcagcagccacggcctgcccagcgacaaggccctggtgctggagaagaccaacaacctgagcaagaagttcaaggagatggaggacaccatcaaggagaagaaggaggccgtgaccagctgccaggagcagctggacgccttccaggtgctggtgaagagcctgaagagctggatcaaggagaccaccaagaaggtgcccatcgtgcagcccagcttcggcgccgaggacctgggcaagagcctggaggacaccaagaagctgcaggagaagtggagcctgaagacccccgagatccagaaggtgaacaacagcggcatcagcctgtgcaacctgatcagcgccgtgaccacccccgccaaggccatcgccgccgtgaagagcggcggcgccgtgctgaacggcgagggcaccgccaccaacaccgaggagttctgggccaacaagggcctgaccagcatcaagaaggacatgaccgacatcagccacggctacgaggacctgggcctgctgctgaaggacaagatcgccgagctgaacaccaagctgagcaagctgcagaaggcccaggaggagagcagcgccatgatgcagtggctgcagaagatgaacaagaccgccaccaagtggcagcagacccccgcccccaccgacaccgaggccgtgaagacccaggtggagcagaacaagagcttcgaggccgagctgaagcagaacgtgaacaaggtgcaggagctgaaggacaagctgaccgagctgctggaggagaaccccgacacccccgaggcccccagatggaagcagatgctgaccgagatcgacagcaagtggcaggagctgaaccagctgaccatcgacagacagcagaagctggaggagagcagcaacaacctgacccagttccagaccgtggaggcccagctgaagcagtggctggtggagaaggagctgatggtgagcgtgctgggccccctgagcatcgaccccaacatgctgaacacccagagacagcaggtgcagatcctgctgcaggagttcgccaccagaaagccccagtacgagcagctgaccgccgccggccagggcatcctgagcagacccggcgaggaccccagcctgagaggcatcgtgaaggagcagctggccgccgtgacccagaagtgggacagcctgaccggccagctgagcgacagatgcgactggatcgaccaggccatcgtgaagagcacccagtaccagagcctgctgagaagcctgagcgacaagctgagcgacctggacaacaagctgagcagcagcctggccgtgagcacccaccccgacgccatgaaccagcagctggagaccgcccagaagatgaagcaggagatccagcaggagaagaagcagatcaaggtggcccaggccctgtgcgaggacctgagcgccctggtgaaggaggagtacctgaaggccgagctgagcagacagctggagggcatcctgaagagcttcaaggacgtggagcagaaggccgagaaccacgtgcagcacctgcagagcgcctgcgccagcagccaccagttccagcagatgagcagagacttccaggcctggctggacaccaagaaggaggagcagaacaagagccaccccatcagcgccaagctggacgtgctggagagcctgatcaaggaccacaaggacttcagcaagaccctgaccgcccagagccacatgtacgagaagaccatcgccgagggcgagaacctgctgctgaagacccagggcagcgagaaggccgccctgcagctgcagctgaacaccatcaagaccaactgggacaccttcaacaagcaggtgaaggagagagagaacaagctgaaggagagcctggagaaggccctgaagtacaaggagcaggtggagaccctgtggccctggatcgacaagtgccagaacaacctggaggagatcaagttctgcctggaccccgccgagggcgagaacagcatcgccaagctgaagagcctgcagaaggagatggaccagcacttcggcatggtggagctgctgaacaacaccgccaacagcctgctgagcgtgtgcgagatcgacaaggaggtggtgaccgacgagaacaagagcctgatccagaaggtggacatggtgaccgagcagctgcacagcaagaagttctgcctggagaacatgacccagaagttcaaggagttccaggaggtgagcaaggagagcaagagacagctgcagtgcgccaaggagcagctggacatccacgacagcctgggcagccaggcctacagcaacaagtacctgaccatgctgcagacccagcagaagagcctgcaggccctgaagcaccaggtggacctggccaagagactggcccaggacctggtggtggaggccagcgacagcaagggcaccagcgacgtgctgctgcaggtggagaccatcgcccaggagcacagcaccctgagccagcaggtggacgagaagtgcagcttcctggagaccaagctgcagggcatcggccacttccagaacaccatcagagagatgttcagccagttcgccgagttcgacgacgagctggacagcatggcccccgtgggcagagacgccgagaccctgcagaagcagaaggagaccatcaaggccttcctgaagaagctggaggccctgatggccagcaacgacaacgccaacaagacctgcaagatgatgctggccaccgaggagaccagccccgacctggtgggcatcaagagagacctggaggccctgagcaagcagtgcaacaagctgctggacagagcccaggccagagaggagcaggtggagggcaccatcaagagactggaggagttctacagcaagctgaaggagttcagcatcctgctgcagaaggccgaggagcacgaggagagccagggccccgtgggcatggagaccgagaccatcaaccagcagctgaacatgttcaaggtgttccagaaggaggagatcgagcccctgcagggcaagcagcaggacgtgaactggctgggccagggcctgatccagagcgccgccaagagcaccagcacccagggcctggagcacgacctggacgacgtgaacgccagatggaagaccctgaacaagaaggtggcccagagagccgcccagctgcaggaggccctgctgcactgcggcagattccaggacgccctggagagcctgctgagctggatggtggacaccgaggagctggtggccaaccagaagccccccagcgccgagttcaaggtggtgaaggcccagatccaggagcagaagctgctgcagagactgctggacgacagaaagagcaccgtggaggtgatcaagagagagggcgagaagatcgccaccaccgccgagcccgccgacaaggtgaagatcctgaagcagctgagcctgctggacagcagatgggaggccctgctgaacaaggccgagaccagaaacagacagctggagggcatcagcgtggtggcccagcagttccacgagaccctggagcccctgaacgagtggctgaccaccatcgagaagagactggtgaactgcgagcccatcggcacccaggccagcaagctggaggagcagatcgcccagcacaaggccctggaggacgacatcatcaaccacaacaagcacctgcaccaggccgtgagcatcggccagagcctgaaggtgctgagcagcagagaggacaaggacatggtgcagagcaagctggacttcagccaggtgtggtacatcgagatccaggagaagagccacagcagaagcgagctgctgcagcaggccctgtgcaacgccaagatcttcggcgaggacgaggtggagctgatgaactggctgaacgaggtgcacgacaagctgagcaagctgagcgtgcaggactacagcaccgagggcctgtggaagcagcagagcgagctgagagtgctgcaggaggacatcctgctgagaaagcagaacgtggaccaggccctgctgaacggcctggagctgctgaagcagaccaccggcgacgaggtgctgatcatccaggacaagctggaggccatcaaggccagatacaaggacatcaccaagctgagcaccgacgtggccaagaccctggagcaggccctgcagctggccagaagactgcacagcacccacgaggagctgtgcacctggctggacaaggtggaggtggagctgctgagctacgagacccaggtgctgaagggcgaggaggccagccaggcccagatgagacccaaggagctgaagaaggaggccaagaacaacaaggccctgctggacagcctgaacgaggtgagcagcgccctgctggagctggtgccctggagagccagagagggcctggagaagatggtggccgaggacaacgagagatacagactggtgagcgacaccatcacccagaaggtggaggagatcgacgccgccatcctgagaagccagcagttcgaccaggccgccgacgccgagctgagctggatcaccgagaccgagaagaagctgatgagcctgggcgacatcagactggagcaggaccagaccagcgcccagctgcaggtgcagaagaccttcaccatggagatcctgagacacaaggacatcatcgacgacctggtgaagagcggccacaagatcatgaccgcctgcagcgaggaggagaagcagagcatgaagaagaagctggacaaggtgctgaagaactacgacaccatctgccagatcaacagcgagagatacctgcagctggagagagcccagagcctggtgaaccagttctgggagacctacgaggagctgtggccctggctgaccgagacccagagcatcatcagccagctgcccgcccccgccctggagtacgagaccctgagacagcagcaggaggagcacagacagctgagagagctgatcgccgagcacaagccccacatcgacaagatgaacaagaccggcccccagctgctggagctgagccccggcgagggcttcagcatccaggagaagtacgtggccgccgacaccctgtacagccagatcaaggaggacgtgaagaagagagccgtggccctggacgaggccatcagccagagcacccagttccacgacaagatcgaccagatcctggagagcctggagagaatcgtggagagactgagacagccccccagcatcagcgccgaggtggagaagatcaaggagcagatcagcgagaacaagaacgtgagcgtggacatggagaagctgcagcccctgtacgagaccctgaagcagagaggcgaggagatgatcgccagaagcggcggcaccgacaaggacatcagcgccaaggccgtgcaggacaagctggaccagatggtgttcatctgggagaacatccacaccctggtggaggagagagaggccaagctgctggacgtgatggagctggccgagaagttctggtgcgaccacatgagcctgatcgtgaccatcaaggacacccaggacttcatcagagacctggaggaccccggcatcgaccccagcgtggtgaagcagcagcaggaggccgccgagaccatcagagaggagatcgacggcctgcaggaggagctggacatcgtgatcaacctgggcagcgagctgatcgccgcctgcggcgagcccgacaagcccatcgtgaagaagagcatcgacgagctgaacagcgcctgggacagcctgaacaaggcctggaaggacagaatcgacaagctggaggaggccatgcaggccgccgtgcagtaccaggacggcctgcaggccgtgttcgactgggtggacatcgccggcggcaagctggccagcatgagccccatcggcaccgacctggagaccgtgaagcagcagatcgaggagctgaagcagttcaagagcgaggcctaccagcagcagatcgagatggagagactgaaccaccaggccgagctgctgctgaagaaggtgaccgaggagagcgacaagcacaccgtgcaggaccccctgatggagctgaagctgatctgggacagcctggaggagagaatcatcaacagacagcacaagctggagggcgccctgctggccctgggccagttccagcacgccctggacgagctgctggcctggctgacccacaccgagggcctgctgagcgagcagaagcccgtgggcggcgaccccaaggccatcgagatcgagctggccaagcaccacgtgctgcagaacgacgtgctggcccaccagagcaccgtggaggccgtgaacaaggccggcaacgacctgatcgagagcagcgccggcgaggaggccagcaacctgcagaacaagctggaggtgctgaaccagagatggcagaacgtgctggagaagaccgagcagagaaagcagcagctggacggcgccctgagacaggccaagggcttccacggcgagatcgaggacctgcagcagtggctgaccgacaccgagagacacctgctggccagcaagcccctgggcggcctgcccgagaccgccaaggagcagctgaacgtgcacatggaggtgtgcgccgccttcgaggccaaggaggagacctacaagagcctgatgcagaagggccagcagatgctggccagatgccccaagagcgccgagaccaacatcgaccaggacatcaacaacctgaaggagaagtgggagagcgtggagaccaagctgaacgagagaaagaccaagctggaggaggccctgaacctggccatggagttccacaacagcctgcaggacttcatcaactggctgacccaggccgagcagaccctgaacgtggccagcagacccagcctgatcctggacaccgtgctgttccagatcgacgagcacaaggtgttcgccaacgaggtgaacagccacagagagcagatcatcgagctggacaagaccggcacccacctgaagtacttcagccagaagcaggacgtggtgctgatcaagaacctgctgatcagcgtgcagagcagatgggagaaggtggtgcagagactggtggagagaggcagaagcctggacgacgccagaaagagagccaagcagttccacgaggcctggagcaagctgatggagtggctggaggagagcgagaagagcctggacagcgagctggagatcgccaacgaccccgacaagatcaagacccagctggcccagcacaaggagttccagaagagcctgggcgccaagcacagcgtgtacgacaccaccaacagaaccggcagaagcctgaaggagaagaccagcctggccgacgacaacctgaagctggacgacatgctgagcgagctgagagacaagtgggacaccatctgcggcaagagcgtggagagacagaacaagctggaggaggccctgctgttcagcggccagttcaccgacgccctgcaggccctgatcgactggctgtacagagtggagccccagctggccgaggaccagcccgtgcacggcgacatcgacctggtgatgaacctgatcgacaaccacaaggccttccagaaggagctgggcaagagaaccagcagcgtgcaggccctgaagagaagcgccagagagctgatcgagggcagcagagacgacagcagctgggtgaaggtgcagatgcaggagctgagcaccagatgggagaccgtgtgcgccctgagcatcagcaagcagaccagactggaggccgccctgagacaggccgaggagttccacagcgtggtgcacgccctgctggagtggctggccgaggccgagcagaccctgagattccacggcgtgctgcccgacgacgaggacgccctgagaaccctgatcgaccagcacaaggagttcatgaagaagctggaggagaagagagccgagctgaacaaggccaccaccatgggcgacaccgtgctggccatctgccaccccgacagcatcaccaccatcaagcactggatcaccatcatcagagccagattcgaggaggtgctggcctgggccaagcagcaccagcagagactggccagcgccctggccggcctgatcgccaagcaggagctgctggaggccctgctggcctggctgcagtgggccgagaccaccctgaccgacaaggacaaggaggtgatcccccaggagatcgaggaggtgaaggccctgatcgccgagcaccagaccttcatggaggagatgaccagaaagcagcccgacgtggacaaggtgaccaagacctacaagagaagagccgccgaccccagcagcctgcagagccacatccccgtgctggacaagggcagagccggcagaaagagattccccgccagcagcctgtaccccagcggcagccagacccagatcgagaccaagaaccccagagtgaacctgctgctgagagagttcgccaacttcgacttcgacatctggagaaagaagtacatgagatggatgaaccacaagaagagcagagtgatggacttcttcagaagaatcgacaaggaccaggacggcaagatcaccagacaggagttcatcgacggcatcctgagcagcaagttccccaccagcagactggagatgagcgccgtggccgacatcttcgacagagacggcgacggctacatcgactactacgagttcgtggccgccctgcaccccaacaaggacgcctacaagcccatcaccgacgccgacaagatcgaggacgaggtgaccagacaggtggccaagtgcaagtgcgccaagagattccaggtggagcagatcggcgacaacaagtacagagtgagcttccagagcaacttcggcgacagccagcagctgagactggtgagaatcctgagaagcaccgtgatggtgagagtgggcggcggctggatggccctggacgagttcctggtgaagaacgacccctgcagagtgcaccaccacggcagcaagatgctgagaagcgagagcaacagcagcatcaccaccacccagcccaccatcgccaagggcagaaccaacatggagctgagagagaagttcatcctggccgacggcgccagccagggcatggccgccttcagacccagaggcagaagaagcagacccagcagcagaggcgccagccccaacagaagcaccagcgtgagcagccaggccgcccaggccgccagcccccaggtgcccgccaccaccacccccaagggcacccccatccagggcagcaagctgagactgcccggctacctgagcggcaagggcttccacagcggcgaggacagcggcctgatcaccaccgccgccgccagagtgagaacccagttcgccgacagcaagaagacccccagcagacccggcagcagagccggcagcaaggccggcagcagagccagcagcagaagaggcagcgacgccagcgacttcgacatcagcgagatccagagcgtgtgcagcgacgtggagaccgtgccccagacccacagacccacccccagagccggcagcagacccagcaccgccaagcccagcaagatccccaccccccagagaaagagccccgccagcaagctggacaagagcagcaagagatag

SEQ ID NO: 79922 - DNA, 9183 bp, synthetic construct
  misc_feature 1..9183: note = Description of Artificial Sequence: Synthetic coding sequence
  source 1..9183: mol_type = other DNA
atgcacagcagcagctacagctacagaagcagcgacagcgtgttcagcaacaccaccagcaccagaaccagcctggacagcaacgagaacctgctgctggtgcactgcggccccaccctgatcaacagctgcatcagcttcggcagcgagagcttcgacggccacagactggagatgctgcagcagatcgccaacagagtgcagagagacagcgtgatctgcgaggacaagctgatcctggccggcaacgccctgcagagcgacagcaagagactggagagcggcgtgcagttccagaacgaggccgagatcgccggctacatcctggagtgcgagaacctgctgagacagcacgtgatcgacgtgcagatcctgatcgacggcaagtactaccaggccgaccagctggtgcagagagtggccaagctgagagacgagatcatggccctgagaaacgagtgcagcagcgtgtacagcaagggcagaatcctgaccaccgagcagaccaagctgatgatcagcggcatcacccagagcctgaacagcggcttcgcccagaccctgcaccccagcctgaccagcggcctgacccagagcctgacccccagcctgaccagcagcagcatgaccagcggcctgagcagcggcatgaccagcagactgacccccagcgtgacccccgcctacacccccggcttccccagcggcctggtgcccaacttcagcagcggcgtggagcccaacagcctgcagaccctgaagctgatgcagatcagaaagcccctgctgaagagcagcctgctggaccagaacctgaccgaggaggagatcaacatgaagttcgtgcaggacctgctgaactgggtggacgagatgcaggtgcagctggacagaaccgagtggggcagcgacctgcccagcgtggagagccacctggagaaccacaagaacgtgcacagagccatcgaggagttcgagagcagcctgaaggaggccaagatcagcgagatccagatgaccgcccccctgaagctgacctacgccgagaagctgcacagactggagagccagtacgccaagctgctgaacaccagcagaaaccaggagagacacctggacaccctgcacaacttcgtgagcagagccaccaacgagctgatctggctgaacgagaaggaggaggaggaggtggcctacgactggagcgagagaaacaccaacatcgccagaaagaaggactaccacgccgagctgatgagagagctggaccagaaggaggagaacatcaagagcgtgcaggagatcgccgagcagctgctgctggagaaccaccccgccagactgaccatcgaggcctacagagccgccatgcagacccagtggagctggatcctgcagctgtgccagtgcgtggagcagcacatcaaggagaacaccgcctacttcgagttcttcaacgacgccaaggaggccaccgactacctgagaaacctgaaggacgccatccagagaaagtacagctgcgacagaagcagcagcatccacaagctggaggacctggtgcaggagagcatggaggagaaggaggagctgctgcagtacaagagcaccatcgccaacctgatgggcaaggccaagaccatcatccagctgaagcccagaaacagcgactgccccctgaagaccagcatccccatcaaggccatctgcgactacagacagatcgagatcaccatctacaaggacgacgagtgcgtgctggccaacaacagccacagagccaagtggaaggtgatcagccccaccggcaacgaggccatggtgcccagcgtgtgcttcaccgtgcccccccccaacaaggaggccgtggacctggccaacagaatcgagcagcagtaccagaacgtgctgaccctgtggcacgagagccacatcaacatgaagagcgtggtgagctggcactacctgatcaacgagatcgacagaatcagagccagcaacgtggccagcatcaagaccatgctgcccggcgagcaccagcaggtgctgagcaacctgcagagcagattcgaggacttcctggaggacagccaggagagccaggtgttcagcggcagcgacatcacccagctggagaaggaggtgaacgtgtgcaagcagtactaccaggagctgctgaagagcgccgagagagaggagcaggaggagagcgtgtacaacctgtacatcagcgaggtgagaaacatcagactgagactggagaactgcgaggacagactgatcagacagatcagaacccccctggagagagacgacctgcacgagagcgtgttcagaatcaccgagcaggagaagctgaagaaggagctggagagactgaaggacgacctgggcaccatcaccaacaagtgcgaggagttcttcagccaggccgccgccagcagcagcgtgcccaccctgagaagcgagctgaacgtggtgctgcagaacatgaaccaggtgtacagcatgagcagcacctacatcgacaagctgaagaccgtgaacctggtgctgaagaacacccaggccgccgaggccctggtgaagctgtacgagaccaagctgtgcgaggaggaggccgtgatcgccgacaagaacaacatcgagaacctgatcagcaccctgaagcagtggagaagcgaggtggacgagaagagacaggtgttccacgccctggaggacgagctgcagaaggccaaggccatcagcgacgagatgttcaagacctacaaggagagagacctggacttcgactggcacaaggagaaggccgaccagctggtggagagatggcagaacgtgcacgtgcagatcgacaacagactgagagacctggagggcatcggcaagagcctgaagtactacagagacacctaccaccccctggacgactggatccagcaggtggagaccacccagagaaagatccaggagaaccagcccgagaacagcaagaccctggccacccagctgaaccagcagaagatgctggtgagcgagatcgagatgaagcagagcaagatggacgagtgccagaagtacgccgagcagtacagcgccaccgtgaaggactacgagctgcagaccatgacctacagagccatggtggacagccagcagaagagccccgtgaagagaagaagaatgcagagcagcgccgacctgatcatccaggagttcatggacctgagaaccagatacaccgccctggtgaccctgatgacccagtacatcaagttcgccggcgacagcctgaagagactggaggaggaggagaagagcctggaggaggagaagaaggagcacgtggagaaggccaaggagctgcagaagtgggtgagcaacatcagcaagaccctgaaggacgccgagaaggccggcaagccccccttcagcaagcagaagatcagcagcgaggagatcagcaccaagaaggagcagctgagcgaggccctgcagaccatccagctgttcctggccaagcacggcgacaagatgaccgacgaggagagaaacgagctggagaagcaggtgaagaccctgcaggagagctacaacctgctgttcagcgagagcctgaagcagctgcaggagagccagaccagcggcgacgtgaaggtggaggagaagctggacaaggtgatcgccggcaccatcgaccagaccaccggcgaggtgctgagcgtgttccaggccgtgctgagaggcctgatcgactacgacaccggcatcagactgctggagacccagctgatgatcagcggcctgatcagccccgagctgagaaagtgcttcgacctgaaggacgccaagagccacggcctgatcgacgagcagatcctgtgccagctgaaggagctgagcaaggccaaggagatcatcagcgccgccagccccaccaccatccccgtgctggacgccctggcccagagcatgatcaccgagagcatggccatcaaggtgctggagatcctgctgagcaccggcagcctggtgatccccgccaccggcgagcagctgaccctgcagaaggccttccagcagaacctggtgagcagcgccctgttcagcaaggtgctggagagacagaacatgtgcaaggacctgatcgacccctgcaccagcgagaaggtgagcctgatcgacatggtgcagagaagcaccctgcaggagaacaccggcatgtggctgctgcccgtgagaccccaggagggcggcagaatcaccctgaagtgcggcagaaacatcagcatcctgagagccgcccacgagggcctgatcgacagagagaccatgttcagactgctgagcgcccagctgctgagcggcggcctgatcaacagcaacagcggccagagaatgaccgtggaggaggccgtgagagagggcgtgatcgacagagacaccgccagcagcatcctgacctaccaggtgcagaccggcggcatcatccagagcaaccccgccaagagactgaccgtggacgaggccgtgcagtgcgacctgatcaccagcagcagcgccctgctggtgctggaggcccagagaggctacgtgggcctgatctggccccacagcggcgagatcttccccaccagcagcagcctgcagcaggagctgatcaccaacgagctggcctacaagatcctgaacggcagacagaagatcgccgccctgtacatccccgagagcagccaggtgatcggcctggacgccgccaagcagctgggcatcatcgacaacaacaccgccagcatcctgaagaacatcaccctgcccgacaagatgcccgacctgggcgacctggaggcctgcaagaacgccagaagatggctgagcttctgcaagttccagcccagcaccgtgcacgactacagacaggaggaggacgtgttcgacggcgaggagcccgtgaccacccagaccagcgaggagaccaagaagctgttcctgagctacctgatgatcaacagctacatggacgccaacaccggccagagactgctgctgtacgacggcgacctggacgaggccgtgggcatgctgctggagggctgccacgccgagttcgacggcaacaccgccatcaaggagtgcctggacgtgctgagcagcagcggcgtgttcctgaacaacgccagcggcagagagaaggacgagtgcaccgccacccccagcagcttcaacaagtgccactgcggcgagcccgagcacgaggagacccccgagaacagaaagtgcgccatcgacgaggagttcaacgagatgagaaacaccgtgatcaacagcgagttcagccagagcggcaagctggccagcaccatcagcatcgaccccaaggtgaacagcagccccagcgtgtgcgtgcccagcctgatcagctacctgacccagaccgagctggccgacatcagcatgctgagaagcgacagcgagaacatcctgaccaactacgagaaccagagcagagtggagaccaacgagagagccaacgagtgcagccacagcaagaacatccagaacttccccagcgacctgatcgagaaccccatcatgaagagcaagatgagcaagttctgcggcgtgaacgagaccgagaacgaggacaacaccaacagagacagccccatcttcgactacagccccagactgagcgccctgctgagccacgacaagctgatgcacagccagggcagcttcaacgacacccacacccccgagagcaacggcaacaagtgcgaggcccccgccctgagcttcagcgacaagaccatgctgagcggccagagaatcggcgagaagttccaggaccagttcctgggcatcgccgccatcaacatcagcctgcccggcgagcagtacggccagaagagcctgaacatgatcagcagcaacccccaggtgcagtaccacaacgacaagtacatcagcaacaccagcggcgaggacgagaagacccaccccggcttccagcagatgcccgaggacaaggaggacgagagcgagatcgaggagtacagctgcgccgtgacccccggcggcgacaccgacaacgccatcgtgagcctgacctgcgccacccccctgctggacgagaccatcagcgccagcgactacgagaccagcctgctgaacgaccagcagaacaacaccggcaccgacaccgacagcgacgacgacttctacgacacccccctgttcgaggacgacgaccacgacagcctgctgctggacggcgacgacagagactgcctgcaccccgaggactacgacaccctgcaggaggagaacgacgagaccgccagccccgccgacgtgttctacgacgtgagcaaggagaacgagaacagcatggtgccccagggcgcccccgtgggcagcctgagcgtgaagaacaaggcccactgcctgcaggacttcctgatggacgtggagaaggacgagctggacagcggcgagaagatccacctgaaccccgtgggcagcgacaaggtgaacggccagagcctggagaccggcagcgagagagagtgcaccaacatcctggagggcgacgagagcgacagcctgaccgactacgacatcgtgggcggcaaggagagcttcaccgccagcctgaagttcgacgacagcggcagctggagaggcagaaaggaggagtacgtgaccggccaggagttccacagcgacaccgaccacctggacagcatgcagagcgaggagagctacggcgactacatctacgacagcaacgaccaggacgacgacgacgacgacggcatcgacgaggagggcggcggcatcagagacgagaacggcaagcccagatgccagaacgtggccgaggacatggacatccagctgtgcgccagcatcctgaacgagaacagcgacgagaacgagaacatcaacaccatgatcctgctggacaagatgcacagctgcagcagcctggagaagcagcagagagtgaacgtggtgcagctggccagccccagcgagaacaacctggtgaccgagaagagcaacctgcccgagtacaccaccgagatcgccggcaagagcaaggagaacctgctgaaccacgagatggtgctgaaggacgtgctgccccccatcatcaaggacaccgagagcgagaagaccttcggccccgccagcatcagccacgacaacaacaacatcagcagcaccagcgagctgggcaccgacctggccaacaccaaggtgaagctgatccagggcagcgagctgcccgagctgaccgacagcgtgaagggcaaggacgagtacttcaagaacatgacccccaaggtggacagcagcctggaccacatcatctgcaccgagcccgacctgatcggcaagcccgccgaggagagccacctgagcctgatcgccagcgtgaccgacaaggacccccagggcaacggcagcgacctgatcaagggcagagacggcaagagcgacatcctgatcgaggacgagaccagcatccagaagatgtacctgggcgagggcgaggtgctggtggagggcctggtggaggaggagaacagacacctgaagctgctgcccggcaagaacaccagagacagcttcaagctgatcaacagccagttccccttcccccagatcaccaacaacgaggagctgaaccagaagggcagcctgaagaaggccaccgtgaccctgaaggacgagcccaacaacctgcagatcatcgtgagcaagagccccgtgcagttcgagaacctggaggagatcttcgacaccagcgtgagcaaggagatcagcgacgacatcaccagcgacatcaccagctgggagggcaacacccacttcgaggagagcttcaccgacggccccgagaaggagctggacctgttcacctacctgaagcactgcgccaagaacatcaaggccaaggacgtggccaagcccaacgaggacgtgcccagccacgtgctgatcaccgccccccccatgaaggagcacctgcagctgggcgtgaacaacaccaaggagaagagcaccagcacccagaaggacagccccctgaacgacatgatccagagcaacgacctgtgcagcaaggagagcatcagcggcggcggcaccgagatcagccagttcacccccgagagcatcgaggccaccctgagcatcctgagcagaaagcacgtggaggacgtgggcaagaacgacttcctgcagagcgagagatgcgccaacggcctgggcaacgacaacagcagcaacaccctgaacaccgactacagcttcctggagatcaacaacaagaaggagagaatcgagcagcagctgcccaaggagcaggccctgagccccagaagccaggagaaggaggtgcagatccccgagctgagccaggtgttcgtggaggacgtgaaggacatcctgaagagcagactgaaggagggccacatgaacccccaggaggtggaggagcccagcgcctgcgccgacaccaagatcctgatccagaacctgatcaagagaatcaccaccagccagctggtgaacgaggccagcaccgtgcccagcgacagccagatgagcgacagcagcggcgtgagccccatgaccaacagcagcgagctgaagcccgagagcagagacgaccccttctgcatcggcaacctgaagagcgagctgctgctgaacatcctgaagcaggaccagcacagccagaagatcaccggcgtgttcgagctgatgagagagctgacccacatggagtacgacctggagaagagaggcatcaccagcaaggtgctgcccctgcagctggagaacatcttctacaagctgctggccgacggctacagcgagaagatcgagcacgtgggcgacttcaaccagaaggcctgcagcaccagcgagatgatggaggagaagccccacatcctgggcgacatcaagagcaaggagggcaactactacagccccaacctggagaccgtgaaggagatcggcctggagagcagcaccgtgtgggccagcaccctgcccagagacgagaagctgaaggacctgtgcaacgacttccccagccacctggagtgcaccagcggcagcaaggagatggccagcggcgacagcagcaccgagcagtag

SEQ ID NO: 79923 - DNA, 21741 bp, synthetic construct
  misc_feature 1..21741: note = Description of Artificial Sequence: Synthetic coding sequence
  source 1..21741: mol_type = other DNA
atgcacagcagcagctacagctacagaagcagcgacagcgtgttcagcaacaccaccagcaccagaaccagcctggacagcaacgagaacctgctgctggtgcactgcggccccaccctgatcaacagctgcatcagcttcggcagcgagagcttcgacggccacagactggagatgctgcagcagatcgccaacagagtgcagagagacagcgtgatctgcgaggacaagctgatcctggccggcaacgccctgcagagcgacagcaagagactggagagcggcgtgcagttccagaacgaggccgagatcgccggctacatcctggagtgcgagaacctgctgagacagcacgtgatcgacgtgcagatcctgatcgacggcaagtactaccaggccgaccagctggtgcagagagtggccaagctgagagacgagatcatggccctgagaaacgagtgcagcagcgtgtacagcaagggcagaatcctgaccaccgagcagaccaagctgatgatcagcggcatcacccagagcctgaacagcggcttcgcccagaccctgcaccccagcctgaccagcggcctgacccagagcctgacccccagcctgaccagcagcagcatgaccagcggcctgagcagcggcatgaccagcagactgacccccagcgtgacccccgcctacacccccggcttccccagcggcctggtgcccaacttcagcagcggcgtggagcccaacagcctgcagaccctgaagctgatgcagatcagaaagcccctgctgaagagcagcctgctggaccagaacctgaccgaggaggagatcaacatgaagttcgtgcaggacctgctgaactgggtggacgagatgcaggtgcagctggacagaaccgagtggggcagcgacctgcccagcgtggagagccacctggagaaccacaagaacgtgcacagagccatcgaggagttcgagagcagcctgaaggaggccaagatcagcgagatccagatgaccgcccccctgaagctgacctacgccgagaagctgcacagactggagagccagtacgccaagctgctgaacaccagcagaaaccaggagagacacctggacaccctgcacaacttcgtgagcagagccaccaacgagctgatctggctgaacgagaaggaggaggaggaggtggcctacgactggagcgagagaaacaccaacatcgccagaaagaaggactaccacgccgagctgatgagagagctggaccagaaggaggagaacatcaagagcgtgcaggagatcgccgagcagctgctgctggagaaccaccccgccagactgaccatcgaggcctacagagccgccatgcagacccagtggagctggatcctgcagctgtgccagtgcgtggagcagcacatcaaggagaacaccgcctacttcgagttcttcaacgacgccaaggaggccaccgactacctgagaaacctgaaggacgccatccagagaaagtacagctgcgacagaagcagcagcatccacaagctggaggacctggtgcaggagagcatggaggagaaggaggagctgctgcagtacaagagcaccatcgccaacctgatgggcaaggccaagaccatcatccagctgaagcccagaaacagcgactgccccctgaagaccagcatccccatcaaggccatctgcgactacagacagatcgagatcaccatctacaaggacgacgagtgcgtgctggccaacaacagccacagagccaagtggaaggtgatcagccccaccggcaacgaggccatggtgcccagcgtgtgcttcaccgtgcccccccccaacaaggaggccgtggacctggccaacagaatcgagcagcagtaccagaacgtgctgaccctgtggcacgagagccacatcaacatgaagagcgtggtgagctggcactacctgatcaacgagatcgacagaatcagagccagcaacgtggccagcatcaagaccatgctgcccggcgagcaccagcaggtgctgagcaacctgcagagcagattcgaggacttcctggaggacagccaggagagccaggtgttcagcggcagcgacatcacccagctggagaaggaggtgaacgtgtgcaagcagtactaccaggagctgctgaagagcgccgagagagaggagcaggaggagagcgtgtacaacctgtacatcagcgaggtgagaaacatcagactgagactggagaactgcgaggacagactgatcagacagatcagaacccccctggagagagacgacctgcacgagagcgtgttcagaatcaccgagcaggagaagctgaagaaggagctggagagactgaaggacgacctgggcaccatcaccaacaagtgcgaggagttcttcagccaggccgccgccagcagcagcgtgcccaccctgagaagcgagctgaacgtggtgctgcagaacatgaaccaggtgtacagcatgagcagcacctacatcgacaagctgaagaccgtgaacctggtgctgaagaacacccaggccgccgaggccctggtgaagctgtacgagaccaagctgtgcgaggaggaggccgtgatcgccgacaagaacaacatcgagaacctgatcagcaccctgaagcagtggagaagcgaggtggacgagaagagacaggtgttccacgccctggaggacgagctgcagaaggccaaggccatcagcgacgagatgttcaagacctacaaggagagagacctggacttcgactggcacaaggagaaggccgaccagctggtggagagatggcagaacgtgcacgtgcagatcgacaacagactgagagacctggagggcatcggcaagagcctgaagtactacagagacacctaccaccccctggacgactggatccagcaggtggagaccacccagagaaagatccaggagaaccagcccgagaacagcaagaccctggccacccagctgaaccagcagaagatgctggtgagcgagatcgagatgaagcagagcaagatggacgagtgccagaagtacgccgagcagtacagcgccaccgtgaaggactacgagctgcagaccatgacctacagagccatggtggacagccagcagaagagccccgtgaagagaagaagaatgcagagcagcgccgacctgatcatccaggagttcatggacctgagaaccagatacaccgccctggtgaccctgatgacccagtacatcaagttcgccggcgacagcctgaagagactggaggaggaggagaagagcctggaggaggagaagaaggagcacgtggagaaggccaaggagctgcagaagtgggtgagcaacatcagcaagaccctgaaggacgccgagaaggccggcaagccccccttcagcaagcagaagatcagcagcgaggagatcagcaccaagaaggagcagctgagcgaggccctgcagaccatccagctgttcctggccaagcacggcgacaagatgaccgacgaggagagaaacgagctggagaagcaggtgaagaccctgcaggagagctacaacctgctgttcagcgagagcctgaagcagctgcaggagagccagaccagcggcgacgtgaaggtggaggagaagctggacaaggtgatcgccggcaccatcgaccagaccaccggcgaggtgctgagcgtgttccaggccgtgctgagaggcctgatcgactacgacaccggcatcagactgctggagacccagctgatgatcagcggcctgatcagccccgagctgagaaagtgcttcgacctgaaggacgccaagagccacggcctgatcgacgagcagatcctgtgccagctgaaggagctgagcaaggccaaggagatcatcagcgccgccagccccaccaccatccccgtgctggacgccctggcccagagcatgatcaccgagagcatggccatcaaggtgctggagatcctgctgagcaccggcagcctggtgatccccgccaccggcgagcagctgaccctgcagaaggccttccagcagaacctggtgagcagcgccctgttcagcaaggtgctggagagacagaacatgtgcaaggacctgatcgacccctgcaccagcgagaaggtgagcctgatcgacatggtgcagagaagcaccctgcaggagaacaccggcatgtggctgctgcccgtgagaccccaggagggcggcagaatcaccctgaagtgcggcagaaacatcagcatcctgagagccgcccacgagggcctgatcgacagagagaccatgttcagactgctgagcgcccagctgctgagcggcggcctgatcaacagcaacagcggccagagaatgaccgtggaggaggccgtgagagagggcgtgatcgacagagacaccgccagcagcatcctgacctaccaggtgcagaccggcggcatcatccagagcaaccccgccaagagactgaccgtggacgaggccgtgcagtgcgacctgatcaccagcagcagcgccctgctggtgctggaggcccagagaggctacgtgggcctgatctggccccacagcggcgagatcttccccaccagcagcagcctgcagcaggagctgatcaccaacgagctggcctacaagatcctgaacggcagacagaagatcgccgccctgtacatccccgagagcagccaggtgatcggcctggacgccgccaagcagctgggcatcatcgacaacaacaccgccagcatcctgaagaacatcaccctgcccgacaagatgcccgacctgggcgacctggaggcctgcaagaacgccagaagatggctgagcttctgcaagttccagcccagcaccgtgcacgactacagacaggaggaggacgtgttcgacggcgaggagcccgtgaccacccagaccagcgaggagaccaagaagctgttcctgagctacctgatgatcaacagctacatggacgccaacaccggccagagactgctgctgtacgacggcgacctggacgaggccgtgggcatgctgctggagggctgccacgccgagttcgacggcaacaccgccatcaaggagtgcctggacgtgctgagcagcagcggcgtgttcctgaacaacgccagcggcagagagaaggacgagtgcaccgccacccccagcagcttcaacaagtgccactgcggcgagcccgagcacgaggagacccccgagaacagaaagtgcgccatcgacgaggagttcaacgagatgagaaacaccgtgatcaacagcgagttcagccagagcggcaagctggccagcaccatcagcatcgaccccaaggtgaacagcagccccagcgtgtgcgtgcccagcctgatcagctacctgacccagaccgagctggccgacatcagcatgctgagaagcgacagcgagaacatcctgaccaactacgagaaccagagcagagtggagaccaacgagagagccaacgagtgcagccacagcaagaacatccagaacttccccagcgacctgatcgagaaccccatcatgaagagcaagatgagcaagttctgcggcgtgaacgagaccgagaacgaggacaacaccaacagagacagccccatcttcgactacagccccagactgagcgccctgctgagccacgacaagctgatgcacagccagggcagcttcaacgacacccacacccccgagagcaacggcaacaagtgcgaggcccccgccctgagcttcagcgacaagaccatgctgagcggccagagaatcggcgagaagttccaggaccagttcctgggcatcgccgccatcaacatcagcctgcccggcgagcagtacggccagaagagcctgaacatgatcagcagcaacccccaggtgcagtaccacaacgacaagtacatcagcaacaccagcggcgaggacgagaagacccaccccggcttccagcagatgcccgaggacaaggaggacgagagcgagatcgaggagtacagctgcgccgtgacccccggcggcgacaccgacaacgccatcgtgagcctgacctgcgccacccccctgctggacgagaccatcagcgccagcgactacgagaccagcctgctgaacgaccagcagaacaacaccggcaccgacaccgacagcgacgacgacttctacgacacccccctgttcgaggacgacgaccacgacagcctgctgctggacggcgacgacagagactgcctgcaccccgaggactacgacaccctgcaggaggagaacgacgagaccgccagccccgccgacgtgttctacgacgtgagcaaggagaacgagaacagcatggtgccccagggcgcccccgtgggcagcctgagcgtgaagaacaaggcccactgcctgcaggacttcctgatggacgtggagaaggacgagctggacagcggcgagaagatccacctgaaccccgtgggcagcgacaaggtgaacggccagagcctggagaccggcagcgagagagagtgcaccaacatcctggagggcgacgagagcgacagcctgaccgactacgacatcgtgggcggcaaggagagcttcaccgccagcctgaagttcgacgacagcggcagctggagaggcagaaaggaggagtacgtgaccggccaggagttccacagcgacaccgaccacctggacagcatgcagagcgaggagagctacggcgactacatctacgacagcaacgaccaggacgacgacgacgacgacggcatcgacgaggagggcggcggcatcagagacgagaacggcaagcccagatgccagaacgtggccgaggacatggacatccagctgtgcgccagcatcctgaacgagaacagcgacgagaacgagaacatcaacaccatgatcctgctggacaagatgcacagctgcagcagcctggagaagcagcagagagtgaacgtggtgcagctggccagccccagcgagaacaacctggtgaccgagaagagcaacctgcccgagtacaccaccgagatcgccggcaagagcaaggagaacctgctgaaccacgagatggtgctgaaggacgtgctgccccccatcatcaaggacaccgagagcgagaagaccttcggccccgccagcatcagccacgacaacaacaacatcagcagcaccagcgagctgggcaccgacctggccaacaccaaggtgaagctgatccagggcagcgagctgcccgagctgaccgacagcgtgaagggcaaggacgagtacttcaagaacatgacccccaaggtggacagcagcctggaccacatcatctgcaccgagcccgacctgatcggcaagcccgccgaggagagccacctgagcctgatcgccagcgtgaccgacaaggacccccagggcaacggcagcgacctgatcaagggcagagacggcaagagcgacatcctgatcgaggacgagaccagcatccagaagatgtacctgggcgagggcgaggtgctggtggagggcctggtggaggaggagaacagacacctgaagctgctgcccggcaagaacaccagagacagcttcaagctgatcaacagccagttccccttcccccagatcaccaacaacgaggagctgaaccagaagggcagcctgaagaaggccaccgtgaccctgaaggacgagcccaacaacctgcagatcatcgtgagcaagagccccgtgcagttcgagaacctggaggagatcttcgacaccagcgtgagcaaggagatcagcgacgacatcaccagcgacatcaccagctgggagggcaacacccacttcgaggagagcttcaccgacggccccgagaaggagctggacctgttcacctacctgaagcactgcgccaagaacatcaaggccaaggacgtggccaagcccaacgaggacgtgcccagccacgtgctgatcaccgccccccccatgaaggagcacctgcagctgggcgtgaacaacaccaaggagaagagcaccagcacccagaaggacagccccctgaacgacatgatccagagcaacgacctgtgcagcaaggagagcatcagcggcggcggcaccgagatcagccagttcacccccgagagcatcgaggccaccctgagcatcctgagcagaaagcacgtggaggacgtgggcaagaacgacttcctgcagagcgagagatgcgccaacggcctgggcaacgacaacagcagcaacaccctgaacaccgactacagcttcctggagatcaacaacaagaaggagagaatcgagcagcagctgcccaaggagcaggccctgagccccagaagccaggagaaggaggtgcagatccccgagctgagccaggtgttcgtggaggacgtgaaggacatcctgaagagcagactgaaggagggccacatgaacccccaggaggtggaggagcccagcgcctgcgccgacaccaagatcctgatccagaacctgatcaagagaatcaccaccagccagctggtgaacgaggccagcaccgtgcccagcgacagccagatgagcgacagcagcggcgtgagccccatgaccaacagcagcgagctgaagcccgagagcagagacgaccccttctgcatcggcaacctgaagagcgagctgctgctgaacatcctgaagcaggaccagcacagccagaagatcaccggcgtgttcgagctgatgagagagctgacccacatggagtacgacctggagaagagaggcatcaccagcaaggtgctgcccctgcagctggagaacatcttctacaagctgctggccgacggctacagcgagaagatcgagcacgtgggcgacttcaaccagaaggcctgcagcaccagcgagatgatggaggagaagccccacatcctgggcgacatcaagagcaaggagggcaactactacagccccaacctggagaccgtgaaggagatcggcctggagagcagcaccgtgtgggccagcaccctgcccagagacgagaagctgaaggacctgtgcaacgacttccccagccacctggagtgcaccagcggcagcaaggagatggccagcggcgacagcagcaccgagcagttcagcagcgagctgcagcagtgcctgcagcacaccgagaagatgcacgagtacctgaccctgctgcaggacatgaagccccccctggacaaccaggagagcctggacaacaacctggaggccctgaagaaccagctgagacagctggagaccttcgagctgggcctggcccccatcgccgtgatcctgagaaaggacatgaagctggccgaggagttcctgaagagcctgcccagcgacttccccagaggccacgtggaggagctgagcatcagccaccagagcctgaagaccgccttcagcagcctgagcaacgtgagcagcgagagaaccaagcagatcatgctggccatcgacagcgagatgagcaagctggccgtgagccacgaggagttcctgcacaagctgaagagcttcagcgactgggtgagcgagaagagcaagagcgtgaaggacatcgagatcgtgaacgtgcaggacagcgagtacgtgaagaagagactggagttcctgaaggccaacaacgtgctgaaggacctgggccacaccaagatgcagctggagaccaccgccttcgacgtgcagttcttcatcagcgagtacgcccaggacctgagccccaaccagagcaagcagctgctgagactgctgaacaccacccagaagtgcttcctggacgtgcaggagagcgtgaccacccaggtggagagactggagacccagctgcacctggagcaggacctggacgaccagaagatcgtggccgagagacagcaggagtacaaggagaagctgcagggcatctgcgacctgctgacccagaccgagaacagactgatcggccaccaggaggccttcatgatcggcgacggcaccgtggagctgaagaagtaccagagcaagcaggaggagctgcagaaggacatgcagggcagcgcccaggccctggccgaggtggtgaagaacaccgagaacttcctgaaggagaacggcgagaagctgagccaggaggacaaggccctgatcgagcagaagctgaacgaggccaagatcaagtgcgagcagctgaacctgaaggccgagcagagcaagaaggagctggacaaggtggtgaccaccgccatcaaggaggagaccgagaaggtggccgccgtgaagcagctggaggagagcaagaccaagatcgagaacctgctggactggctgagcaacgtggacaaggacagcgagagagccggcaccaagcacaagcaggtgatcgagcagaacggcacccacttccaggagggcgacggcaagagcgccatcggcgaggaggacgaggtgaacggcaacctgctggagaccgacgtggacggccaggtgggcaccacccaggagaacctgaaccagcagtaccagaaggtgaaggcccagcacgagaagatcatcagccagcaccaggccgtgatcatcgccacccagagcgcccaggtgctgctggagaagcagggccagtacctgagccccgaggagaaggagaagctgcagaagaacatgaaggagctgaaggtgcactacgagaccgccctggccgagagcgagaagaagatgaagctgacccacagcctgcaggaggagctggagaagttcgacgccgactacaccgagttcgagcactggctgcagcagagcgagcaggagctggagaacctggaggccggcgccgacgacatcaacggcctgatgaccaagctgaagagacagaagagcttcagcgaggacgtgatcagccacaagggcgacctgagatacatcaccatcagcggcaacagagtgctggaggccgccaagagctgcagcaagagagacggcggcaaggtggacaccagcgccacccacagagaggtgcagagaaagctggaccacgccaccgacagattcagaagcctgtacagcaagtgcaacgtgctgggcaacaacctgaaggacctggtggacaagtaccagcactacgaggacgccagctgcggcctgctggccggcctgcaggcctgcgaggccaccgccagcaagcacctgagcgagcccatcgccgtggaccccaagaacctgcagagacagctggaggagaccaaggccctgcagggccagatcagcagccagcaggtggccgtggagaagctgaagaagaccgccgaggtgctgctggacgccagaggcagcctgctgcccgccaagaacgacatccagaagaccctggacgacatcgtgggcagatacgaggacctgagcaagagcgtgaacgagagaaacgagaagctgcagatcaccctgaccagaagcctgagcgtgcaggacggcctggacgagatgctggactggatgggcaacgtggagagcagcctgaaggagcagggccaggtgcccctgaacagcaccgccctgcaggacatcatcagcaagaacatcatgctggagcaggacatcgccggcagacagagcagcatcaacgccatgaacgagaaggtgaagaagttcatggagaccaccgaccccagcaccgccagcagcctgcaggccaagatgaaggacctgagcgccagattcagcgaggccagccacaagcacaaggagaccctggccaagatggaggagctgaagaccaaggtggagctgttcgagaacctgagcgagaagctgcagaccttcctggagaccaagacccaggccctgaccgaggtggacgtgcccggcaaggacgtgaccgagctgagccagtacatgcaggagagcaccagcgagttcctggagcacaagaagcacctggaggtgctgcacagcctgctgaaggagatcagcagccacggcctgcccagcgacaaggccctggtgctggagaagaccaacaacctgagcaagaagttcaaggagatggaggacaccatcaaggagaagaaggaggccgtgaccagctgccaggagcagctggacgccttccaggtgctggtgaagagcctgaagagctggatcaaggagaccaccaagaaggtgcccatcgtgcagcccagcttcggcgccgaggacctgggcaagagcctggaggacaccaagaagctgcaggagaagtggagcctgaagacccccgagatccagaaggtgaacaacagcggcatcagcctgtgcaacctgatcagcgccgtgaccacccccgccaaggccatcgccgccgtgaagagcggcggcgccgtgctgaacggcgagggcaccgccaccaacaccgaggagttctgggccaacaagggcctgaccagcatcaagaaggacatgaccgacatcagccacggctacgaggacctgggcctgctgctgaaggacaagatcgccgagctgaacaccaagctgagcaagctgcagaaggcccaggaggagagcagcgccatgatgcagtggctgcagaagatgaacaagaccgccaccaagtggcagcagacccccgcccccaccgacaccgaggccgtgaagacccaggtggagcagaacaagagcttcgaggccgagctgaagcagaacgtgaacaaggtgcaggagctgaaggacaagctgaccgagctgctggaggagaaccccgacacccccgaggcccccagatggaagcagatgctgaccgagatcgacagcaagtggcaggagctgaaccagctgaccatcgacagacagcagaagctggaggagagcagcaacaacctgacccagttccagaccgtggaggcccagctgaagcagtggctggtggagaaggagctgatggtgagcgtgctgggccccctgagcatcgaccccaacatgctgaacacccagagacagcaggtgcagatcctgctgcaggagttcgccaccagaaagccccagtacgagcagctgaccgccgccggccagggcatcctgagcagacccggcgaggaccccagcctgagaggcatcgtgaaggagcagctggccgccgtgacccagaagtgggacagcctgaccggccagctgagcgacagatgcgactggatcgaccaggccatcgtgaagagcacccagtaccagagcctgctgagaagcctgagcgacaagctgagcgacctggacaacaagctgagcagcagcctggccgtgagcacccaccccgacgccatgaaccagcagctggagaccgcccagaagatgaagcaggagatccagcaggagaagaagcagatcaaggtggcccaggccctgtgcgaggacctgagcgccctggtgaaggaggagtacctgaaggccgagctgagcagacagctggagggcatcctgaagagcttcaaggacgtggagcagaaggccgagaaccacgtgcagcacctgcagagcgcctgcgccagcagccaccagttccagcagatgagcagagacttccaggcctggctggacaccaagaaggaggagcagaacaagagccaccccatcagcgccaagctggacgtgctggagagcctgatcaaggaccacaaggacttcagcaagaccctgaccgcccagagccacatgtacgagaagaccatcgccgagggcgagaacctgctgctgaagacccagggcagcgagaaggccgccctgcagctgcagctgaacaccatcaagaccaactgggacaccttcaacaagcaggtgaaggagagagagaacaagctgaaggagagcctggagaaggccctgaagtacaaggagcaggtggagaccctgtggccctggatcgacaagtgccagaacaacctggaggagatcaagttctgcctggaccccgccgagggcgagaacagcatcgccaagctgaagagcctgcagaaggagatggaccagcacttcggcatggtggagctgctgaacaacaccgccaacagcctgctgagcgtgtgcgagatcgacaaggaggtggtgaccgacgagaacaagagcctgatccagaaggtggacatggtgaccgagcagctgcacagcaagaagttctgcctggagaacatgacccagaagttcaaggagttccaggaggtgagcaaggagagcaagagacagctgcagtgcgccaaggagcagctggacatccacgacagcctgggcagccaggcctacagcaacaagtacctgaccatgctgcagacccagcagaagagcctgcaggccctgaagcaccaggtggacctggccaagagactggcccaggacctggtggtggaggccagcgacagcaagggcaccagcgacgtgctgctgcaggtggagaccatcgcccaggagcacagcaccctgagccagcaggtggacgagaagtgcagcttcctggagaccaagctgcagggcatcggccacttccagaacaccatcagagagatgttcagccagttcgccgagttcgacgacgagctggacagcatggcccccgtgggcagagacgccgagaccctgcagaagcagaaggagaccatcaaggccttcctgaagaagctggaggccctgatggccagcaacgacaacgccaacaagacctgcaagatgatgctggccaccgaggagaccagccccgacctggtgggcatcaagagagacctggaggccctgagcaagcagtgcaacaagctgctggacagagcccaggccagagaggagcaggtggagggcaccatcaagagactggaggagttctacagcaagctgaaggagttcagcatcctgctgcagaaggccgaggagcacgaggagagccagggccccgtgggcatggagaccgagaccatcaaccagcagctgaacatgttcaaggtgttccagaaggaggagatcgagcccctgcagggcaagcagcaggacgtgaactggctgggccagggcctgatccagagcgccgccaagagcaccagcacccagggcctggagcacgacctggacgacgtgaacgccagatggaagaccctgaacaagaaggtggcccagagagccgcccagctgcaggaggccctgctgcactgcggcagattccaggacgccctggagagcctgctgagctggatggtggacaccgaggagctggtggccaaccagaagccccccagcgccgagttcaaggtggtgaaggcccagatccaggagcagaagctgctgcagagactgctggacgacagaaagagcaccgtggaggtgatcaagagagagggcgagaagatcgccaccaccgccgagcccgccgacaaggtgaagatcctgaagcagctgagcctgctggacagcagatgggaggccctgctgaacaaggccgagaccagaaacagacagctggagggcatcagcgtggtggcccagcagttccacgagaccctggagcccctgaacgagtggctgaccaccatcgagaagagactggtgaactgcgagcccatcggcacccaggccagcaagctggaggagcagatcgcccagcacaaggccctggaggacgacatcatcaaccacaacaagcacctgcaccaggccgtgagcatcggccagagcctgaaggtgctgagcagcagagaggacaaggacatggtgcagagcaagctggacttcagccaggtgtggtacatcgagatccaggagaagagccacagcagaagcgagctgctgcagcaggccctgtgcaacgccaagatcttcggcgaggacgaggtggagctgatgaactggctgaacgaggtgcacgacaagctgagcaagctgagcgtgcaggactacagcaccgagggcctgtggaagcagcagagcgagctgagagtgctgcaggaggacatcctgctgagaaagcagaacgtggaccaggccctgctgaacggcctggagctgctgaagcagaccaccggcgacgaggtgctgatcatccaggacaagctggaggccatcaaggccagatacaaggacatcaccaagctgagcaccgacgtggccaagaccctggagcaggccctgcagctggccagaagactgcacagcacccacgaggagctgtgcacctggctggacaaggtggaggtggagctgctgagctacgagacccaggtgctgaagggcgaggaggccagccaggcccagatgagacccaaggagctgaagaaggaggccaagaacaacaaggccctgctggacagcctgaacgaggtgagcagcgccctgctggagctggtgccctggagagccagagagggcctggagaagatggtggccgaggacaacgagagatacagactggtgagcgacaccatcacccagaaggtggaggagatcgacgccgccatcctgagaagccagcagttcgaccaggccgccgacgccgagctgagctggatcaccgagaccgagaagaagctgatgagcctgggcgacatcagactggagcaggaccagaccagcgcccagctgcaggtgcagaagaccttcaccatggagatcctgagacacaaggacatcatcgacgacctggtgaagagcggccacaagatcatgaccgcctgcagcgaggaggagaagcagagcatgaagaagaagctggacaaggtgctgaagaactacgacaccatctgccagatcaacagcgagagatacctgcagctggagagagcccagagcctggtgaaccagttctgggagacctacgaggagctgtggccctggctgaccgagacccagagcatcatcagccagctgcccgcccccgccctggagtacgagaccctgagacagcagcaggaggagcacagacagctgagagagctgatcgccgagcacaagccccacatcgacaagatgaacaagaccggcccccagctgctggagctgagccccggcgagggcttcagcatccaggagaagtacgtggccgccgacaccctgtacagccagatcaaggaggacgtgaagaagagagccgtggccctggacgaggccatcagccagagcacccagttccacgacaagatcgaccagatcctggagagcctggagagaatcgtggagagactgagacagccccccagcatcagcgccgaggtggagaagatcaaggagcagatcagcgagaacaagaacgtgagcgtggacatggagaagctgcagcccctgtacgagaccctgaagcagagaggcgaggagatgatcgccagaagcggcggcaccgacaaggacatcagcgccaaggccgtgcaggacaagctggaccagatggtgttcatctgggagaacatccacaccctggtggaggagagagaggccaagctgctggacgtgatggagctggccgagaagttctggtgcgaccacatgagcctgatcgtgaccatcaaggacacccaggacttcatcagagacctggaggaccccggcatcgaccccagcgtggtgaagcagcagcaggaggccgccgagaccatcagagaggagatcgacggcctgcaggaggagctggacatcgtgatcaacctgggcagcgagctgatcgccgcctgcggcgagcccgacaagcccatcgtgaagaagagcatcgacgagctgaacagcgcctgggacagcctgaacaaggcctggaaggacagaatcgacaagctggaggaggccatgcaggccgccgtgcagtaccaggacggcctgcaggccgtgttcgactgggtggacatcgccggcggcaagctggccagcatgagccccatcggcaccgacctggagaccgtgaagcagcagatcgaggagctgaagcagttcaagagcgaggcctaccagcagcagatcgagatggagagactgaaccaccaggccgagctgctgctgaagaaggtgaccgaggagagcgacaagcacaccgtgcaggaccccctgatggagctgaagctgatctgggacagcctggaggagagaatcatcaacagacagcacaagctggagggcgccctgctggccctgggccagttccagcacgccctggacgagctgctggcctggctgacccacaccgagggcctgctgagcgagcagaagcccgtgggcggcgaccccaaggccatcgagatcgagctggccaagcaccacgtgctgcagaacgacgtgctggcccaccagagcaccgtggaggccgtgaacaaggccggcaacgacctgatcgagagcagcgccggcgaggaggccagcaacctgcagaacaagctggaggtgctgaaccagagatggcagaacgtgctggagaagaccgagcagagaaagcagcagctggacggcgccctgagacaggccaagggcttccacggcgagatcgaggacctgcagcagtggctgaccgacaccgagagacacctgctggccagcaagcccctgggcggcctgcccgagaccgccaaggagcagctgaacgtgcacatggaggtgtgcgccgccttcgaggccaaggaggagacctacaagagcctgatgcagaagggccagcagatgctggccagatgccccaagagcgccgagaccaacatcgaccaggacatcaacaacctgaaggagaagtgggagagcgtggagaccaagctgaacgagagaaagaccaagctggaggaggccctgaacctggccatggagttccacaacagcctgcaggacttcatcaactggctgacccaggccgagcagaccctgaacgtggccagcagacccagcctgatcctggacaccgtgctgttccagatcgacgagcacaaggtgttcgccaacgaggtgaacagccacagagagcagatcatcgagctggacaagaccggcacccacctgaagtacttcagccagaagcaggacgtggtgctgatcaagaacctgctgatcagcgtgcagagcagatgggagaaggtggtgcagagactggtggagagaggcagaagcctggacgacgccagaaagagagccaagcagttccacgaggcctggagcaagctgatggagtggctggaggagagcgagaagagcctggacagcgagctggagatcgccaacgaccccgacaagatcaagacccagctggcccagcacaaggagttccagaagagcctgggcgccaagcacagcgtgtacgacaccaccaacagaaccggcagaagcctgaaggagaagaccagcctggccgacgacaacctgaagctggacgacatgctgagcgagctgagagacaagtgggacaccatctgcggcaagagcgtggagagacagaacaagctggaggaggccctgctgttcagcggccagttcaccgacgccctgcaggccctgatcgactggctgtacagagtggagccccagctggccgaggaccagcccgtgcacggcgacatcgacctggtgatgaacctgatcgacaaccacaaggccttccagaaggagctgggcaagagaaccagcagcgtgcaggccctgaagagaagcgccagagagctgatcgagggcagcagagacgacagcagctgggtgaaggtgcagatgcaggagctgagcaccagatgggagaccgtgtgcgccctgagcatcagcaagcagaccagactggaggccgccctgagacaggccgaggagttccacagcgtggtgcacgccctgctggagtggctggccgaggccgagcagaccctgagattccacggcgtgctgcccgacgacgaggacgccctgagaaccctgatcgaccagcacaaggagttcatgaagaagctggaggagaagagagccgagctgaacaaggccaccaccatgggcgacaccgtgctggccatctgccaccccgacagcatcaccaccatcaagcactggatcaccatcatcagagccagattcgaggaggtgctggcctgggccaagcagcaccagcagagactggccagcgccctggccggcctgatcgccaagcaggagctgctggaggccctgctggcctggctgcagtgggccgagaccaccctgaccgacaaggacaaggaggtgatcccccaggagatcgaggaggtgaaggccctgatcgccgagcaccagaccttcatggaggagatgaccagaaagcagcccgacgtggacaaggtgaccaagacctacaagagaagagccgccgaccccagcagcctgcagagccacatccccgtgctggacaagggcagagccggcagaaagagattccccgccagcagcctgtaccccagcggcagccagacccagatcgagaccaagaaccccagagtgaacctgctggtgagcaagtggcagcaggtgtggctgctggccctggagagaagaagaaagctgaacgacgccctggacagactggaggagctgagagagttcgccaacttcgacttcgacatctggagaaagaagtacatgagatggatgaaccacaagaagagcagagtgatggacttcttcagaagaatcgacaaggaccaggacggcaagatcaccagacaggagttcatcgacggcatcctgagcagcaagttccccaccagcagactggagatgagcgccgtggccgacatcttcgacagagacggcgacggctacatcgactactacgagttcgtggccgccctgcaccccaacaaggacgcctacaagcccatcaccgacgccgacaagatcgaggacgaggtgaccagacaggtggccaagtgcaagtgcgccaagagattccaggtggagcagatcggcgacaacaagtacagagtgagcttccagagcaacttcggcgacagccagcagctgagactggtgagaatcctgagaagcaccgtgatggtgagagtgggcggcggctggatggccctggacgagttcctggtgaagaacgacccctgcagagtgcaccaccacggcagcaagatgctgagaagcgagagcaacagcagcatcaccaccacccagcccaccatcgccaagggcagaaccaacatggagctgagagagaagttcatcctggccgacggcgccagccagggcatggccgccttcagacccagaggcagaagaagcagacccagcagcagaggcgccagccccaacagaagcaccagcgtgagcagccaggccgcccaggccgccagcccccaggtgcccgccaccaccacccccaagggcacccccatccagggcagcaagctgagactgcccggctacctgagcggcaagggcttccacagcggcgaggacagcggcctgatcaccaccgccgccgccagagtgagaacccagttcgccgacagcaagaagacccccagcagacccggcagcagagccggcagcaaggccggcagcagagccagcagcagaagaggcagcgacgccagcgacttcgacatcagcgagatccagagcgtgtgcagcgacgtggagaccgtgccccagacccacagacccacccccagagccggcagcagacccagcaccgccaagcccagcaagatccccaccccccagagaaagagccccgccagcaagctggacaagagcagcaagagatag

SEQ ID NO: 79924 - DNA, 768 bp, synthetic construct
  misc_feature 1..768: note = Description of Artificial Sequence: Synthetic coding sequence
  source 1..768: mol_type = other DNA
atgaacaagaccggcccccagctgctggagctgagccccggcgagggcttcagcatccaggagaagtacgtggccgccgacaccctgtacagccagatcaaggaggacgtgaagaagagagccgtggccctggacgaggccatcagccagagcacccagttccacgacaagatcgaccagatcctggagagcctggagagaatcgtggagagactgagacagccccccagcatcagcgccgaggtggagaagatcaaggagcagatcagcgagaacaagaacgtgagcgtggacatggagaagctgcagcccctgtacgagaccctgaagcagagaggcgaggagatgatcgccagaagcggcggcaccgacaaggacatcagcgccaaggccgtgcaggacaagctggaccagatggtgttcatctgggagaacatccacaccctggtggaggagagagaggccaagctgctggacgtgatggagctggccgagaagttctggtgcgaccacatgagcctgatcgtgaccatcaaggacacccaggacttcatcagagacctggaggaccccggcatcgaccccagcgtggtgaagcagcagcaggaggccgccgagaccatcagagaggagatcgacggcctgcaggaggagctggacatcgtgatcaacctgggcagcgagctgatcgccgcctgcggcgagcccgacaagcccatcgtgaagaagagcatcgacgagctgaacagcatgggcttcagcaagtag

SEQ ID NO: 79925 - DNA, 1359 bp, synthetic construct
  misc_feature 1..1359: note = Description of Artificial Sequence: Synthetic coding sequence
  source 1..1359: mol_type = other DNA
atgttccccgaccagcccgagaagcccctgaacctggcccacatcgtgccccccagacccgtgaccagcatgaacgacaccctgttcagccacagcgtgcccagcagcggcagccccttcatcaccagaagactgcccgagggcatcagcgccagcagccccgtggccgaggagcacagcctgatcaagctgtacgtgaaccagctggaccacggcgccagaagcccccccaaggacagcgaggtggagcagaacaagctgctggccagagccgcccccgccttcctgaagggcaagggcatccagtacagcctgaacgtggccgacagactggccgacgagcacgtgctgatcggcctgtacgtgaacatgctgagaaacaaccccagctgcatgctggagagcagcaacagactggacgaggagcacagactgatcgccagatacgccgccagactggccgccgagagcagcagcagccagcccccccagcagagaagcgcccccgacatcagcttcaccatcgacgccaacaagcagcagagacagctgatcgccgagctggagaacaagaacagagagatcctgcaggagatccagagactgagactggagcacgagcaggccagccagcccacccccgagaaggcccagcagaaccccaccctgctggccgagctgagactgctgagacagagaaaggacgagctggagcagagaatgagcgccctgcaggagagcagaagagagctgatggtgcagctggagggcctgatgaagctgctgaagacccagggcgccggcagccccagaagcagccccagccacaccatcagcagacccatccccatgcccatcagaagcgccagcgcctgcagcacccccacccacaccccccaggacagcctgaccggcgtgggcggcgacgtgcaggaggccttcgcccagagcagcagaagaaacctgagaaacgacctgctggtggccgccgacagcatcaccaacaccatgagcagcctggtgaaggagctgaacagcgaggtgggcagcgagaccgagagcaacgtggacagcgagttcgccagaacccagttcgaggacctggtgcccagccccaccagcgagaaggccttcctggcccagatccacgccagaaagcccggctacatccacagcggcgccaccaccagcaccatgagaggcgacatggtgaccgaggacgccgacccctacgtgcagcccgaggacgagaactacgagaacgacagcgtgagacagctggagaacgagctgcagatggaggagtacctgaagcagaagctgcaggacgaggcctaccaggtgagcctgcagggctag

SEQ ID NO: 79926 - DNA, 1116 bp, synthetic construct
  misc_feature 1..1116: note = Description of Artificial Sequence: Synthetic coding sequence
  source 1..1116: mol_type = other DNA
atgatcgaggacagcggcaagagaggcaacaccatggccgagagaagacagctgttcgccgagatgagagcccaggacctggacagaatcagactgagcacctacagaaccgcctgcaagctgagattcgtgcagaagaagtgcaacctgcacctggtggacatctggaacgtgatcgaggccctgagagagaacgccctgaacaacctggaccccaacaccgagctgaacgtgagcagactggaggccgtgctgagcaccatcttctaccagctgaacaagagaatgcccaccacccaccagatccacgtggagcagagcatcagcctgctgctgaacttcctgctggccgccttcgaccccgagggccacggcaagatcagcgtgttcgccgtgaagatggccctggccaccctgtgcggcggcaagatcatggacaagctgagatacatcttcagcatgatcagcgacagcagcggcgtgatggtgtacggcagatacgaccagttcctgagagaggtgctgaagctgcccaccgccgtgttcgagggccccagcttcggctacaccgagcagagcgccagaagctgcttcagccagcagaagaaggtgaccctgaacggcttcctggacaccctgatgagcgacccccccccccagtgcctggtgtggctgcccctgctgcacagactggccaacgtggagaacgtgttccaccccgtggagtgcagctactgccacagcgagagcatgatgggcttcagatacagatgccagcagtgccacaactaccagctgtgccaggactgcttctggagaggccacgccggcggcagccacagcaaccagcaccagatgaaggagtacaccagctggaagagccccgccaagaagctgaccaacgccctgagcaagagcctgagctgcgccagcagcagagagcccctgcaccccatgttccccgaccagcccgagaagcccctgaacctggcccacatcgtgccccccagacccgtgaccagcatgaacgacaccctgttcagccacagcgtgcccagcagcggcagccccttcatcaccagaagcagcgacggcgccttcggcggctgcgtgtag

SEQ ID NO: 79927 - DNA, 1188 bp, synthetic construct
  misc_feature 1..1188: note = Description of Artificial Sequence: Synthetic coding sequence
  source 1..1188: mol_type = other DNA
atgttccccgaccagcccgagaagcccctgaacctggcccacatcgtgccccccagacccgtgaccagcatgaacgacaccctgttcagccacagcgtgcccagcagcggcagccccttcatcaccagaagactgcccgagggcatcagcgccagcagccccgtggccgaggagcacagcctgatcaagctgtacgtgaaccagctggaccacggcgccagaatgctggagagcagcaacagactggacgaggagcacagactgatcgccagatacgccgccagactggccgccgagagcagcagcagccagcccccccagcagagaagcgcccccgacatcagcttcaccatcgacgccaacaagcagcagagacagctgatcgccgagctggagaacaagaacagagagatcctgcaggagatccagagactgagactggagcacgagcaggccagccagcccacccccgagaaggcccagcagaaccccaccctgctggccgagctgagactgctgagacagagaaaggacgagctggagcagagaatgagcgccctgcaggagagcagaagagagctgatggtgcagctggagggcctgatgaagctgctgaagacccagggcgccggcagccccagaagcagccccagccacaccatcagcagacccatccccatgcccatcagaagcgccagcgcctgcagcacccccacccacaccccccaggacagcctgaccggcgtgggcggcgacgtgcaggaggccttcgcccagagcagcagaagaaacctgagaaacgacctgctggtggccgccgacagcatcaccaacaccatgagcagcctggtgaaggagctgaacagcgaggtgggcagcgagaccgagagcaacgtggacagcgagttcgccagaacccagttcgaggacctggtgcccagccccaccagcgagaaggccttcctggcccagatccacgccagaaagcccggctacatccacagcggcgccaccaccagcaccatgagaggcgacatggtgaccgaggacgccgacccctacgtgcagcccgaggacgagaactacgagaacgacagcgtgagacagctggagaacgagctgcagatggaggagtacctgaagcagaagctgcaggacgaggcctaccaggtgagcctgcagggctag

SEQ ID NO: 79928 - DNA, 2175 bp, synthetic construct
  misc_feature 1..2175: note = Description of Artificial Sequence: Synthetic coding sequence
  source 1..2175: mol_type = other DNA
atgatcgaggacagcggcaagagaggcaacaccatggccgagagaagacagctgttcgccgagatgagagcccaggacctggacagaatcagactgagcacctacagaaccgcctgcaagctgagattcgtgcagaagaagtgcaacctgcacctggtggacatctggaacgtgatcgaggccctgagagagaacgccctgaacaacctggaccccaacaccgagctgaacgtgagcagactggaggccgtgctgagcaccatcttctaccagctgaacaagagaatgcccaccacccaccagatccacgtggagcagagcatcagcctgctgctgaacttcctgctggccgccttcgaccccgagggccacggcaagatcagcgtgttcgccgtgaagatggccctggccaccctgtgcggcggcaagatcatggacaagctgagatacatcttcagcatgatcagcgacagcagcggcgtgatggtgtacggcagatacgaccagttcctgagagaggtgctgaagctgcccaccgccgtgttcgagggccccagcttcggctacaccgagcagagcgccagaagctgcttcagccagcagaagaaggtgaccctgaacggcttcctggacaccctgatgagcgacccccccccccagtgcctggtgtggctgcccctgctgcacagactggccaacgtggagaacgtgttccaccccgtggagtgcagctactgccacagcgagagcatgatgggcttcagatacagatgccagcagtgccacaactaccagctgtgccaggactgcttctggagaggccacgccggcggcagccacagcaaccagcaccagatgaaggagtacaccagctggaagagccccgccaagaagctgaccaacgccctgagcaagagcctgagctgcgccagcagcagagagcccctgcaccccatgttccccgaccagcccgagaagcccctgaacctggcccacatcgtgccccccagacccgtgaccagcatgaacgacaccctgttcagccacagcgtgcccagcagcggcagccccttcatcaccagaagcatgctggagagcagcaacagactggacgaggagcacagactgatcgccagatacgccgccagactggccgccgagagcagcagcagccagcccccccagcagagaagcgcccccgacatcagcttcaccatcgacgccaacaagcagcagagacagctgatcgccgagctggagaacaagaacagagagatcctgcaggagatccagagactgagactggagcacgagcaggccagccagcccacccccgagaaggcccagcagaaccccaccctgctggccgagctgagactgctgagacagagaaaggacgagctggagcagagaatgagcgccctgcaggagagcagaagagagctgatggtgcagctggagggcctgatgaagctgctgaagacccagggcgccggcagccccagaagcagccccagccacaccatcagcagacccatccccatgcccatcagaagcgccagcgcctgcagcacccccacccacaccccccaggacagcctgaccggcgtgggcggcgacgtgcaggaggccttcgcccagagcagcagaagaaacctgagaaacgacctgctggtggccgccgacagcatcaccaacaccatgagcagcctggtgaaggagctgaacagcgaggtgggcagcgagaccgagagcaacgtggacagcgagttcgccagaacccagttcgaggacctggtgcccagccccaccagcgagaaggccttcctggcccagatccacgccagaaagcccggctacatccacagcggcgccaccaccagcaccatgagaggcgacatggtgaccgaggacgccgacccctacgtgcagcccgaggacgagaactacgagaacgacagcgtgagacagctggagaacgagctgcagatggaggagtacctgaagcagaagctgcaggacgaggcctaccagctgcacgtgagcaccgagaccagactggagcacccctgccccgtgagcgagaccaagtggagagtgctgttctggggcttcgtgttcttcggcggcttcctgagcctggccctgcagatctacttctggggcctgttctag

SEQ ID NO: 79929 - DNA, 912 bp, synthetic construct
  misc_feature 1..912: note = Description of Artificial Sequence: Synthetic coding sequence
  source 1..912: mol_type = other DNA
atgctggagaccctgagagagagactgctgagcgtgcagcaggacttcaccagcggcctgaagaccctgagcgacaagagcagagaggccaaggtgaagagcaagcccagaaccgtgcccttcctgcccaagtacagcgccggcctggagctgctgagcagatacgaggacacctgggccgccctgcacagaagagccaaggactgcgccagcgccggcgagctggtggacagcgaggtggtgatgctgagcgcccactgggagaagaagaagaccagcctggtggagctgcaggagcagctgcagcagctgcccgccctgatcgccgacctggagagcatgaccgccaacctgacccacctggaggccagcttcgaggaggtggagaacaacctgctgcacctggaggacctgtgcggccagtgcgagctggagagatgcaagcacatgcagagccagcagctggagaactacaagaagaacaagagaaaggagctggagaccttcaaggccgagctggacgccgagcacgcccagaaggtgctggagatggagcacacccagcagatgaagctgaaggagagacagaagttcttcgaggaggccttccagcaggacatggagcagtacctgagcaccggctacctgcagatcgccgagagaagagagcccatcggcagcatgagcagcatggaggtgaacgtggacatgctggagcagatggacctgatggacatcagcgaccaggaggccctggacgtgttcctgaacagcggcggcgaggagaacaccgtgctgagccccgccctgggcagagtggacaagctggccctggccgagcccggccagtacagatgccacagcccccccaaggtgagaagagagaaccacctgcccgtgacctacgcctag

SEQ ID NO: 79930 - DNA, 1056 bp, synthetic construct
  misc_feature 1..1056: note = Description of Artificial Sequence: Synthetic coding sequence
  source 1..1056: mol_type = other DNA
atgctggagaccctgagagagagactgctgagcgtgcagcaggacttcaccagcggcctgaagaccctgagcgacaagagcagagaggccaaggtgaagagcaagcccagaaccgtgcccttcctgcccaagtacagcgccggcctggagctgctgagcagatacgaggacacctgggccgccctgcacagaagagccaaggactgcgccagcgccggcgagctggtggacagcgaggtggtgatgctgagcgcccactgggagaagaagaagaccagcctggtggagctgcaggagcagctgcagcagctgcccgccctgatcgccgacctggagagcatgaccgccaacctgacccacctggaggccagcttcgaggaggtggagaacaacctgctgcacctggaggacctgtgcggccagtgcgagctggagagatgcaagcacatgcagagccagcagctggagaactacaagaagaacaagagaaaggagctggagaccttcaaggccgagctggacgccgagcacgcccagaaggtgctggagatggagcacacccagcagatgaagctgaaggagagacagaagttcttcgaggaggccttccagcaggacatggagcagtacctgagcaccggctacctgcagatcgccgagagaagagagcccatcggcagcatgagcagcatggaggtgaacgtggacatgctggagcagatggacctgatggacatcagcgaccaggaggccctggacgtgttcctgaacagcggcggcgaggagaacaccgtgctgagccccgccctgggccccgagagcagcacctgccagaacgagatcaccctgcaggtgcccaaccccagcgagctgagagccaagccccccagcagcagcagcacctgcaccgacagcgccaccagagacatcagcgagggcggcgagagccccgtggtgcagagcgacgaggaggaggtgcaggtggacaccgccctggccaccagccacaccgacagagaggccacccccgacggcggcgaggacagcgacagctag

SEQ ID NO: 79931 - DNA, 1059 bp, synthetic construct
  misc_feature 1..1059: note = Description of Artificial Sequence: Synthetic coding sequence
  source 1..1059: mol_type = other DNA
atgctggagaccctgagagagagactgctgagcgtgcagcaggacttcaccagcggcctgaagaccctgagcgacaagagcagagaggccaaggtgaagagcaagcccagaaccgtgcccttcctgcccaagtacagcgccggcctggagctgctgagcagatacgaggacacctgggccgccctgcacagaagagccaaggactgcgccagcgccggcgagctggtggacagcgaggtggtgatgctgagcgcccactgggagaagaagaagaccagcctggtggagctgcaggagcagctgcagcagctgcccgccctgatcgccgacctggagagcatgaccgccaacctgacccacctggaggccagcttcgaggaggtggagaacaacctgctgcacctggaggacctgtgcggccagtgcgagctggagagatgcaagcacatgcagagccagcagctggagaactacaagaagaacaagagaaaggagctggaggtgaccttcagaagcgagctggacgccgagcacgcccagaaggtgctggagatggagcacacccagcagatgaagctgaaggagagacagaagttcttcgaggaggccttccagcaggacatggagcagtacctgagcaccggctacctgcagatcgccgagagaagagagcccatcggcagcatgagcagcatggaggtgaacgtggacatgctggagcagatggacctgatggacatcagcgaccaggaggccctggacgtgttcctgaacagcggcggcgaggagaacaccgtgctgagccccgccctgggccccgagagcagcacctgccagaacgagatcaccctgcaggtgcccaaccccagcgagctgagagccaagccccccagcagcagcagcacctgcaccgacagcgccaccagagacatcagcgagggcggcgagagccccgtggtgcagagcgacgaggaggaggtgcaggtggacaccgccctggccaccagccacaccgacagagaggccacccccgacggcggcgaggacagcgacagctag

SEQ ID NO: 79932 - DNA, 813 bp, synthetic construct
  misc_feature 1..813: note = Description of Artificial Sequence: Synthetic coding sequence
  source 1..813: mol_type = other DNA
atgctgagcgcccactgggagaagaagaagaccagcctggtggagctgcaggagcagctgcagcagctgcccgccctgatcgccgacctggagagcatgaccgccaacctgacccacctggaggccagcttcgaggaggtggagaacaacctgctgcacctggaggacctgtgcggccagtgcgagctggagagatgcaagcacatgcagagccagcagctggagaactacaagaagaacaagagaagaagactgagaaccttcaagaccgagctggacgccgagcacgcccagaaggtgctggagatggagcacacccagcagatgaagctgaaggagagacagaagttcttcgaggaggccttccagcaggacatggagcagtacctgagcaccggctacctgcagatcgccgagagaagagagcccatcggcagcatgagcagcatggaggtgaacgtggacatgctggagcagatggacctgatggacatcagcgaccaggaggccctggacgtgttcctgaacagcggcggcgaggagaacaccgtgctgagccccgccctgggccccgagagcagcacctgccagaacgagatcaccctgcaggtgcccaaccccagcgagctgagagccaagccccccagcagcagcagcacctgcaccgacagcgccaccagagacatcagcgagggcggcgagagccccgtggtgcagagcgacgaggaggaggtgcaggtggacaccgccctggccaccagccacaccgacagagaggccacccccgacggcggcgaggacagcgacagctag

SEQ ID NO: 79933 - DNA, 912 bp, synthetic construct
  misc_feature 1..912: note = Description of Artificial Sequence: Synthetic coding sequence
  source 1..912: mol_type = other DNA
atgctggagaccctgagagagagactgctgagcgtgcagcaggacttcaccagcggcctgaagaccctgagcgacaagagcagagaggccaaggtgaagagcaagcccagaaccgtgcccttcctgcccaagtacagcgccggcctggagctgctgagcagatacgaggacacctgggccgccctgcacagaagagccaaggactgcgccagcgccggcgagctggtggacagcgaggtggtgatgctgagcgcccactgggagaagaagaagaccagcctggtggagctgcaggagcagctgcagcagctgcccgccctgatcgccgacctggagagcatgaccgccaacctgacccacctggaggccagcttcgaggaggtggagaacaacctgctgcacctggaggacctgtgcggccagtgcgagctggagagatgcaagcacatgcagagccagcagctggagaactacaagaagaacaagagcaaggagctgggcaccggcaaggccgagctggacgccgagcacgcccagaaggtgctggagatggagcacacccagcagatgaagctgaaggagagacagaagttcttcgaggaggccttccagcaggacatggagcagtacctgagcaccggctacctgcagatcgccgagagaagagagcccatcggcagcatgagcagcatggaggtgaacgtggacatgctggagcagatggacctgatggacatcagcgaccaggaggccctggacgtgttcctgaacagcggcggcgaggagaacaccgtgctgagccccgccctgggcagagtggacaagctggccctggccgagcccggccagtacagatgccacagcccccccaaggtgagaagagagaaccacctgcccgtgacctacgcctag

SEQ ID NO: 79934 - DNA, 135 bp, synthetic construct
  misc_feature 1..135: note = Description of Artificial Sequence: Synthetic coding sequence
  source 1..135: mol_type = other DNA
atgctggagaccctgagagagagactgctgagcgtgcagcaggacttcaccagcggcctgaagaccctgagcgacaagagcagagaggccaaggtgaagagcaagcccagctggctgaaccaggagcagttctag

SEQ ID NO: 79935 - DNA, 627 bp, synthetic construct
  misc_feature 1..627: note = Description of Artificial Sequence: Synthetic coding sequence
  source 1..627: mol_type = other DNA
atgctggagaccctgagagagagactgctgagcgtgcagcaggacttcaccagcggcctgaagaccctgagcgacaagagcagagaggccaaggtgaagagcaagcccagatacgaggacacctgggccgccctgcacagaagagccaaggactgcgccagcgccggcgagctggtggacagcgaggtggtgatgctgagcgcccactgggagaagaagaagaccagcctggtggagctgcaggagcagctgcagcagctgcccgccctgatcgccgacctggagagcatgaccgccaacctgacccacctggaggccagcttcgaggaggtggagaacaacctgctgcacctggaggacctgtgcggccagtgcgagctggagagatgcaagcacatgcagagccagcagctggagaactacaagaagaacaagagaaaggagctggagaccttcaaggccgagctggacgccgagcacgcccagaaggtgctggagatggagcacacccagcagatgaagctgaaggagagacagaagttcttcgaggaggccttccagcaggacatggagcagtacctgagcaccggctacctgcagatcgccgagagaagaggcgacccctag

SEQ ID NO: 79936 - DNA, 2235 bp, synthetic construct
  misc_feature 1..2235: note = Description of Artificial Sequence: Synthetic coding sequence
  source 1..2235: mol_type = other DNA
atgatcgaggacagcggcaagagaggcaacaccatggccgagagaagacagctgttcgccgagatgagagcccaggacctggacagaatcagactgagcacctacagaaccgcctgcaagctgagattcgtgcagaagaagtgcaacctgcacctggtggacatctggaacgtgatcgaggccctgagagagaacgccctgaacaacctggaccccaacaccgagctgaacgtgagcagactggaggccgtgctgagcaccatcttctaccagctgaacaagagaatgcccaccacccaccagatccacgtggagcagagcatcagcctgctgctgaacttcctgctggccgccttcgaccccgagggccacggcaagatcagcgtgttcgccgtgaagatggccctggccaccctgtgcggcggcaagatcatggacaagctgagatacatcttcagcatgatcagcgacagcagcggcgtgatggtgtacggcagatacgaccagttcctgagagaggtgctgaagctgcccaccgccgtgttcgagggccccagcttcggctacaccgagcagagcgccagaagctgcttcagccagcagaagaaggtgaccctgaacggcttcctggacaccctgatgagcgacccccccccccagtgcctggtgtggctgcccctgctgcacagactggccaacgtggagaacgtgttccaccccgtggagtgcagctactgccacagcgagagcatgatgggcttcagatacagatgccagcagtgccacaactaccagctgtgccaggactgcttctggagaggccacgccggcggcagccacagcaaccagcaccagatgaaggagtacaccagctggaagagccccgccaagaagctgaccaacgccctgagcaagagcctgagctgcgccagcagcagagagcccctgcaccccatgttccccgaccagcccgagaagcccctgaacctggcccacatcgtgctggacaacatgccccccagacccgtgaccagcatgaacgacaccctgttcagccacagcgtgcccagcagcggcagccccttcatcaccagaagcagcccccccaaggacagcgaggtggagcagaacaagctgctggccagagccgcccccgccttcctgaagggcaagggcatccagtacagcctgaacgtggccgacagactggccgacgagcacgtgctgatcggcctgtacgtgaacatgctgagaaacaaccccagctgcatgctggagagcagcaacagactggacgaggagcacagactgatcgccagatacgccgccagactggccgccgagagcagcagcagccagcccccccagcagagaagcgcccccgacatcagcttcaccatcgacgccaacaagcagcagagacagctgatcgccgagctggagaacaagaacagagagatcctgcaggagatccagagactgagactggagcacgagcaggccagccagcccacccccgagaaggcccagcagaaccccaccctgctggccgagctgagactgctgagacagagaaaggacgagctggagcagagaatgagcgccctgcaggagagcagaagagagctgatggtgcagctggagggcctgatgaagctgctgaagacccagggcgccggcagccccagaagcagccccagccacaccatcagcagacccatccccatgcccatcagaagcgccagcgcctgcagcacccccacccacaccccccaggacagcctgaccggcgtgggcggcgacgtgcaggaggccttcgcccagagcagcagaagaaacctgagaaacgacctgctggtggccgccgacagcatcaccaacaccatgagcagcctggtgaaggagctgaacagcgaggtgggcagcgagaccgagagcaacgtggacagcgagttcgccagaacccagttcgaggacctggtgcccagccccaccagcgagaaggccttcctggcccagatccacgccagaaagcccggctacatccacagcggcgccaccaccagcaccatgagaggcgacatggtgaccgaggacgccgacccctacgtgcagcccgaggacgagaactacgagaacgacagcgtgagacagctggagaacgagctgcagatggaggagtacctgaagcagaagctgcaggacgaggcctaccaggtgagcctgcagggctag

SEQ ID NO: 79937 - DNA, 1713 bp, synthetic construct
  misc_feature 1..1713: note = Description of Artificial Sequence: Synthetic coding sequence
  source 1..1713: mol_type = other DNA
atgatcgaggacagcggcaagagaggcaacaccatggccgagagaagacagctgttcgccgagatgagagcccaggacctggacagaatcagactgagcacctacagaaccgcctgcaagctgagattcgtgcagaagaagtgcaacctgcacctggtggacatctggaacgtgatcgaggccctgagagagaacgccctgaacaacctggaccccaacaccgagctgaacgtgagcagactggaggccgtgctgagcaccatcttctaccagctgaacaagagaatgcccaccacccaccagatccacgtggagcagagcatcagcctgctgctgaacttcctgctggccgccttcgaccccgagggccacggcaagatcagcgtgttcgccgtgaagatggccctggccaccctgtgcggcggcaagatcatggacaagctgagatacatcttcagcatgatcagcgacagcagcggcgtgatggtgtacggcagatacgaccagttcctgagagaggtgctgaagctgcccaccgccgtgttcgagggccccagcttcggctacaccgagcagagcgccagaagctgcttcagccagcagaagaaggtgaccctgaacggcttcctggacaccctgatgagcgacccccccccccagtgcctggtgtggctgcccctgctgcacagactggccaacgtggagaacgtgttccaccccgtggagtgcagctactgccacagcgagagcatgatgggcttcagatacagatgccagcagtgccacaactaccagctgtgccaggactgcttctggagaggccacgccggcggcagccacagcaaccagcaccagatgaaggagtacaccagctggaagagccccgccaagaagctgaccaacgccctgagcaagagcctgagctgcgccagcagcagagagcccctgcaccccatgttccccgaccagcccgagaagcccctgaacctggcccacatcgtggacacctggccccccagacccgtgaccagcatgaacgacaccctgttcagccacagcgtgcccagcagcggcagccccttcatcaccagaagcagcccccccaaggacagcgaggtggagcagaacaagctgctggccagagccgcccccgccttcctgaagggcaagggcatccagtacagcctgaacgtggccgacagactggccgacgagcacgtgctgatcggcctgtacgtgaacatgctgagaaacaaccccagctgcatgctggagagcagcaacagactggacgaggagcacagactgatcgccagatacgccgccagactggccgccgagagcagcagcagccagcccccccagcagagaagcgcccccgacatcagcttcaccatcgacgccaacaagcagcagagacagctgatcgccgagctggagaacaagaacagagagatcctgcaggagatccagagactgagactggagcacgagcaggccagccagcccacccccgagaaggcccagcagaaccccaccctgctggccgagctgagactgctgagacagagaaaggacgagctggagcagagaatgagcgccctgcaggagagcagaagagagctgatggtgcagctggagggcctgatgaagctgctgaaggaggaggagctgaagcagggcgtgagctacgtgccctactgcagaagctag

SEQ ID NO: 79938 - DNA, 2061 bp, synthetic construct
  misc_feature 1..2061: note = Description of Artificial Sequence: Synthetic coding sequence
  source 1..2061: mol_type = other DNA
atgatcgaggacagcggcaagagaggcaacaccatggccgagagaagacagctgttcgccgagatgagagcccaggacctggacagaatcagactgagcacctacagaaccgcctgcaagctgagattcgtgcagaagaagtgcaacctgcacctggtggacatctggaacgtgatcgaggccctgagagagaacgccctgaacaacctggaccccaacaccgagctgaacgtgagcagactggaggccgtgctgagcaccatcttctaccagctgaacaagagaatgcccaccacccaccagatccacgtggagcagagcatcagcctgctgctgaacttcctgctggccgccttcgaccccgagggccacggcaagatcagcgtgttcgccgtgaagatggccctggccaccctgtgcggcggcaagatcatggacaagctgagatacatcttcagcatgatcagcgacagcagcggcgtgatggtgtacggcagatacgaccagttcctgagagaggtgctgaagctgcccaccgccgtgttcgagggccccagcttcggctacaccgagcagagcgccagaagctgcttcagccagcagaagaaggtgaccctgaacggcttcctggacaccctgatgagcgacccccccccccagtgcctggtgtggctgcccctgctgcacagactggccaacgtggagaacgtgttccaccccgtggagtgcagctactgccacagcgagagcatgatgggcttcagatacagatgccagcagtgccacaactaccagctgtgccaggactgcttctggagaggccacgccggcggcagccacagcaaccagcaccagatgaaggagtacaccagctggaagagccccgccaagaagctgaccaacgccctgagcaagagcctgagctgcgccagcagcagagagcccctgcaccccatgttccccgaccagcccgagaagcccctgaacctggcccacatcgtggacacctggccccccagacccgtgaccagcatgaacgacaccctgttcagccacagcgtgcccagcagcggcagccccttcatcaccagaagcatgctggagagcagcaacagactggacgaggagcacagactgatcgccagatacgccgccagactggccgccgagagcagcagcagccagcccccccagcagagaagcgcccccgacatcagcttcaccatcgacgccaacaagcagcagagacagctgatcgccgagctggagaacaagaacagagagatcctgcaggagatccagagactgagactggagcacgagcaggccagccagcccacccccgagaaggcccagcagaaccccaccctgctggccgagctgagactgctgagacagagaaaggacgagctggagcagagaatgagcgccctgcaggagagcagaagagagctgatggtgcagctggagggcctgatgaagctgctgaagacccagggcgccggcagccccagaagcagccccagccacaccatcagcagacccatccccatgcccatcagaagcgccagcgcctgcagcacccccacccacaccccccaggacagcctgaccggcgtgggcggcgacgtgcaggaggccttcgcccagagcagcagaagaaacctgagaaacgacctgctggtggccgccgacagcatcaccaacaccatgagcagcctggtgaaggagctgaacagcgaggtgggcagcgagaccgagagcaacgtggacagcgagttcgccagaacccagttcgaggacctggtgcccagccccaccagcgagaaggccttcctggcccagatccacgccagaaagcccggctacatccacagcggcgccaccaccagcaccatgagaggcgacatggtgaccgaggacgccgacccctacgtgcagcccgaggacgagaactacgagaacgacagcgtgagacagctggagaacgagctgcagatggaggagtacctgaagcagaagctgcaggacgaggcctaccaggtgagcctgcagggctag

SEQ ID NO: 79939 - DNA, 1125 bp, synthetic construct
  misc_feature 1..1125: note = Description of Artificial Sequence: Synthetic coding sequence
  source 1..1125: mol_type = other DNA
atgatcgaggacagcggcaagagaggcaacaccatggccgagagaagacagctgttcgccgagatgagagcccaggacctggacagaatcagactgagcacctacagaaccgcctgcaagctgagattcgtgcagaagaagtgcaacctgcacctggtggacatctggaacgtgatcgaggccctgagagagaacgccctgaacaacctggaccccaacaccgagctgaacgtgagcagactggaggccgtgctgagcaccatcttctaccagctgaacaagagaatgcccaccacccaccagatccacgtggagcagagcatcagcctgctgctgaacttcctgctggccgccttcgaccccgagggccacggcaagatcagcgtgttcgccgtgaagatggccctggccaccctgtgcggcggcaagatcatggacaagctgagatacatcttcagcatgatcagcgacagcagcggcgtgatggtgtacggcagatacgaccagttcctgagagaggtgctgaagctgcccaccgccgtgttcgagggccccagcttcggctacaccgagcagagcgccagaagctgcttcagccagcagaagaaggtgaccctgaacggcttcctggacaccctgatgagcgacccccccccccagtgcctggtgtggctgcccctgctgcacagactggccaacgtggagaacgtgttccaccccgtggagtgcagctactgccacagcgagagcatgatgggcttcagatacagatgccagcagtgccacaactaccagctgtgccaggactgcttctggagaggccacgccggcggcagccacagcaaccagcaccagatgaaggagtacaccagctggaagagccccgccaagaagctgaccaacgccctgagcaagagcctgagctgcgccagcagcagagagcccctgcaccccatgttccccgaccagcccgagaagcccctgaacctggcccacatcgtggacacctggccccccagacccgtgaccagcatgaacgacaccctgttcagccacagcgtgcccagcagcggcagccccttcatcaccagaagcagcgacggcgccttcggcggctgcgtgtag

SEQ ID NO: 79940 - DNA, 1704 bp, synthetic construct
  misc_feature 1..1704: note = Description of Artificial Sequence: Synthetic coding sequence
  source 1..1704: mol_type = other DNA
atgatcgaggacagcggcaagagaggcaacaccatggccgagagaagacagctgttcgccgagatgagagcccaggacctggacagaatcagactgagcacctacagaaccgcctgcaagctgagattcgtgcagaagaagtgcaacctgcacctggtggacatctggaacgtgatcgaggccctgagagagaacgccctgaacaacctggaccccaacaccgagctgaacgtgagcagactggaggccgtgctgagcaccatcttctaccagctgaacaagagaatgcccaccacccaccagatccacgtggagcagagcatcagcctgctgctgaacttcctgctggccgccttcgaccccgagggccacggcaagatcagcgtgttcgccgtgaagatggccctggccaccctgtgcggcggcaagatcatggacaagctgagatacatcttcagcatgatcagcgacagcagcggcgtgatggtgtacggcagatacgaccagttcctgagagaggtgctgaagctgcccaccgccgtgttcgagggccccagcttcggctacaccgagcagagcgccagaagctgcttcagccagcagaagaaggtgaccctgaacggcttcctggacaccctgatgagcgacccccccccccagtgcctggtgtggctgcccctgctgcacagactggccaacgtggagaacgtgttccaccccgtggagtgcagctactgccacagcgagagcatgatgggcttcagatacagatgccagcagtgccacaactaccagctgtgccaggactgcttctggagaggccacgccggcggcagccacagcaaccagcaccagatgaaggagtacaccagctggaagagccccgccaagaagctgaccaacgccctgagcaagagcctgagctgcgccagcagcagagagcccctgcaccccatgttccccgaccagcccgagaagcccctgaacctggcccacatcgtgccccccagacccgtgaccagcatgaacgacaccctgttcagccacagcgtgcccagcagcggcagccccttcatcaccagaagcagcccccccaaggacagcgaggtggagcagaacaagctgctggccagagccgcccccgccttcctgaagggcaagggcatccagtacagcctgaacgtggccgacagactggccgacgagcacgtgctgatcggcctgtacgtgaacatgctgagaaacaaccccagctgcatgctggagagcagcaacagactggacgaggagcacagactgatcgccagatacgccgccagactggccgccgagagcagcagcagccagcccccccagcagagaagcgcccccgacatcagcttcaccatcgacgccaacaagcagcagagacagctgatcgccgagctggagaacaagaacagagagatcctgcaggagatccagagactgagactggagcacgagcaggccagccagcccacccccgagaaggcccagcagaaccccaccctgctggccgagctgagactgctgagacagagaaaggacgagctggagcagagaatgagcgccctgcaggagagcagaagagagctgatggtgcagctggagggcctgatgaagctgctgaaggaggaggagctgaagcagggcgtgagctacgtgccctactgcagaagctag

SEQ ID NO: 79941 - DNA, 1176 bp, synthetic construct
  misc_feature 1..1176: note = Description of Artificial Sequence: Synthetic coding sequence
  source 1..1176: mol_type = other DNA
atgttccccgaccagcccgagaagcccctgaacctggcccacatcgtgccccccagacccgtgaccagcatgaacgacaccctgttcagccacagcgtgcccagcagcggcagccccttcatcaccagaagcagcccccccaaggacagcgaggtggagcagaacaagctgctggccagagccgcccccgccttcctgaagggcaagggcatgctggagagcagcaacagactggacgaggagcacagactgatcgccagatacgccgccagactggccgccgagagcagcagcagccagcccccccagcagagaagcgcccccgacatcagcttcaccatcgacgccaacaagcagcagagacagctgatcgccgagctggagaacaagaacagagagatcctgcaggagatccagagactgagactggagcacgagcaggccagccagcccacccccgagaaggcccagcagaaccccaccctgctggccgagctgagactgctgagacagagaaaggacgagctggagcagagaatgagcgccctgcaggagagcagaagagagctgatggtgcagctggagggcctgatgaagctgctgaagacccagggcgccggcagccccagaagcagccccagccacaccatcagcagacccatccccatgcccatcagaagcgccagcgcctgcagcacccccacccacaccccccaggacagcctgaccggcgtgggcggcgacgtgcaggaggccttcgcccagagcagcagaagaaacctgagaaacgacctgctggtggccgccgacagcatcaccaacaccatgagcagcctggtgaaggagctgaacagcgaggtgggcagcgagaccgagagcaacgtggacagcgagttcgccagaacccagttcgaggacctggtgcccagccccaccagcgagaaggccttcctggcccagatccacgccagaaagcccggctacatccacagcggcgccaccaccagcaccatgagaggcgacatggtgaccgaggacgccgacccctacgtgcagcccgaggacgagaactacgagaacgacagcgtgagacagctggagaacgagctgcagatggaggagtacctgaagcagaagctgcaggacgaggcctaccaggtgagcctgcagggctag

SEQ ID NO: 79942 - DNA, 2232 bp, synthetic construct
  misc_feature 1..2232: note = Description of Artificial Sequence: Synthetic coding sequence
  source 1..2232: mol_type = other DNA
atgatcgaggacagcggcaagagaggcaacaccatggccgagagaagacagctgttcgccgagatgagagcccaggacctggacagaatcagactgagcacctacagaaccgcctgcaagctgagattcgtgcagaagaagtgcaacctgcacctggtggacatctggaacgtgatcgaggccctgagagagaacgccctgaacaacctggaccccaacaccgagctgaacgtgagcagactggaggccgtgctgagcaccatcttctaccagctgaacaagagaatgcccaccacccaccagatccacgtggagcagagcatcagcctgctgctgaacttcctgctggccgccttcgaccccgagggccacggcaagatcagcgtgttcgccgtgaagatggccctggccaccctgtgcggcggcaagatcatggacaagctgagatacatcttcagcatgatcagcgacagcagcggcgtgatggtgtacggcagatacgaccagttcctgagagaggtgctgaagctgcccaccgccgtgttcgagggccccagcttcggctacaccgagcagagcgccagaagctgcttcagccagcagaagaaggtgaccctgaacggcttcctggacaccctgatgagcgacccccccccccagtgcctggtgtggctgcccctgctgcacagactggccaacgtggagaacgtgttccaccccgtggagtgcagctactgccacagcgagagcatgatgggcttcagatacagatgccagcagtgccacaactaccagctgtgccaggactgcttctggagaggccacgccggcggcagccacagcaaccagcaccagatgaaggagtacaccagctggaagagccccgccaagaagctgaccaacgccctgagcaagagcctgagctgcgccagcagcagagagcccctgcaccccatgttccccgaccagcccgagaagcccctgaacctggcccacatcgtggacacctggccccccagacccgtgaccagcatgaacgacaccctgttcagccacagcgtgcccagcagcggcagccccttcatcaccagaagcagcccccccaaggacagcgaggtggagcagaacaagctgctggccagagccgcccccgccttcctgaagggcaagggcatccagtacagcctgaacgtggccgacagactggccgacgagcacgtgctgatcggcctgtacgtgaacatgctgagaaacaaccccagctgcatgctggagagcagcaacagactggacgaggagcacagactgatcgccagatacgccgccagactggccgccgagagcagcagcagccagcccccccagcagagaagcgcccccgacatcagcttcaccatcgacgccaacaagcagcagagacagctgatcgccgagctggagaacaagaacagagagatcctgcaggagatccagagactgagactggagcacgagcaggccagccagcccacccccgagaaggcccagcagaaccccaccctgctggccgagctgagactgctgagacagagaaaggacgagctggagcagagaatgagcgccctgcaggagagcagaagagagctgatggtgcagctggagggcctgatgaagctgctgaagacccagggcgccggcagccccagaagcagccccagccacaccatcagcagacccatccccatgcccatcagaagcgccagcgcctgcagcacccccacccacaccccccaggacagcctgaccggcgtgggcggcgacgtgcaggaggccttcgcccagagcagcagaagaaacctgagaaacgacctgctggtggccgccgacagcatcaccaacaccatgagcagcctggtgaaggagctgaacagcgaggtgggcagcgagaccgagagcaacgtggacagcgagttcgccagaacccagttcgaggacctggtgcccagccccaccagcgagaaggccttcctggcccagatccacgccagaaagcccggctacatccacagcggcgccaccaccagcaccatgagaggcgacatggtgaccgaggacgccgacccctacgtgcagcccgaggacgagaactacgagaacgacagcgtgagacagctggagaacgagctgcagatggaggagtacctgaagcagaagctgcaggacgaggcctaccaggtgagcctgcagggctag

SEQ ID NO: 79943 - DNA, 2073 bp, synthetic construct
  misc_feature 1..2073: note = Description of Artificial Sequence: Synthetic coding sequence
  source 1..2073: mol_type = other DNA
atgatcgaggacagcggcaagagaggcaacaccatggccgagagaagacagctgttcgccgagatgagagcccaggacctggacagaatcagactgagcacctacagaaccgcctgcaagctgagattcgtgcagaagaagtgcaacctgcacctggtggacatctggaacgtgatcgaggccctgagagagaacgccctgaacaacctggaccccaacaccgagctgaacgtgagcagactggaggccgtgctgagcaccatcttctaccagctgaacaagagaatgcccaccacccaccagatccacgtggagcagagcatcagcctgctgctgaacttcctgctggccgccttcgaccccgagggccacggcaagatcagcgtgttcgccgtgaagatggccctggccaccctgtgcggcggcaagatcatggacaagctgagatacatcttcagcatgatcagcgacagcagcggcgtgatggtgtacggcagatacgaccagttcctgagagaggtgctgaagctgcccaccgccgtgttcgagggccccagcttcggctacaccgagcagagcgccagaagctgcttcagccagcagaagaaggtgaccctgaacggcttcctggacaccctgatgagcgacccccccccccagtgcctggtgtggctgcccctgctgcacagactggccaacgtggagaacgtgttccaccccgtggagtgcagctactgccacagcgagagcatgatgggcttcagatacagatgccagcagtgccacaactaccagctgtgccaggactgcttctggagaggccacgccggcggcagccacagcaaccagcaccagatgaaggagtacaccagctggaagagccccgccaagaagctgaccaacgccctgagcaagagcctgagctgcgccagcagcagagagcccctgcaccccatgttccccgaccagcccgagaagcccctgaacctggcccacatcgtgccccccagacccgtgaccagcatgaacgacaccctgttcagccacagcgtgcccagcagcggcagccccttcatcaccagaagcatgctggagagcagcaacagactggacgaggagcacagactgatcgccagatacgccgccagactggccgccgagagcagcagcagccagcccccccagcagagaagcgcccccgacatcagcttcaccatcgacgccaacaagcagcagagacagctgatcgccgagctggagaacaagaacagagagatcctgcaggagatccagagactgagactggagcacgagcaggccagccagcccacccccgagaaggcccagcagaaccccaccctgctggccgagctgagactgctgagacagagaaaggacgagctggagcagagaatgagcgccctgcaggagagcagaagagagctgatggtgcagctggagggcctgatgaagctgctgaaggaggaggagctgaagcagggcacccagggcgccggcagccccagaagcagccccagccacaccatcagcagacccatccccatgcccatcagaagcgccagcgcctgcagcacccccacccacaccccccaggacagcctgaccggcgtgggcggcgacgtgcaggaggccttcgcccagagcagcagaagaaacctgagaaacgacctgctggtggccgccgacagcatcaccaacaccatgagcagcctggtgaaggagctgaacagcgaggtgggcagcgagaccgagagcaacgtggacagcgagttcgccagaacccagttcgaggacctggtgcccagccccaccagcgagaaggccttcctggcccagatccacgccagaaagcccggctacatccacagcggcgccaccaccagcaccatgagaggcgacatggtgaccgaggacgccgacccctacgtgcagcccgaggacgagaactacgagaacgacagcgtgagacagctggagaacgagctgcagatggaggagtacctgaagcagaagctgcaggacgaggcctaccaggtgagcctgcagggctag

SEQ ID NO: 79944 - DNA, 2061 bp, synthetic construct
  misc_feature 1..2061: note = Description of Artificial Sequence: Synthetic coding sequence
  source 1..2061: mol_type = other DNA
atgatcgaggacagcggcaagagaggcaacaccatggccgagagaagacagctgttcgccgagatgagagcccaggacctggacagaatcagactgagcacctacagaaccgcctgcaagctgagattcgtgcagaagaagtgcaacctgcacctggtggacatctggaacgtgatcgaggccctgagagagaacgccctgaacaacctggaccccaacaccgagctgaacgtgagcagactggaggccgtgctgagcaccatcttctaccagctgaacaagagaatgcccaccacccaccagatccacgtggagcagagcatcagcctgctgctgaacttcctgctggccgccttcgaccccgagggccacggcaagatcagcgtgttcgccgtgaagatggccctggccaccctgtgcggcggcaagatcatggacaagctgagatacatcttcagcatgatcagcgacagcagcggcgtgatggtgtacggcagatacgaccagttcctgagagaggtgctgaagctgcccaccgccgtgttcgagggccccagcttcggctacaccgagcagagcgccagaagctgcttcagccagcagaagaaggtgaccctgaacggcttcctggacaccctgatgagcgacccccccccccagtgcctggtgtggctgcccctgctgcacagactggccaacgtggagaacgtgttccaccccgtggagtgcagctactgccacagcgagagcatgatgggcttcagatacagatgccagcagtgccacaactaccagctgtgccaggactgcttctggagaggccacgccggcggcagccacagcaaccagcaccagatgaaggagtacaccagctggaagagccccgccaagaagctgaccaacgccctgagcaagagcctgagctgcgccagcagcagagagcccctgcaccccatgttccccgaccagcccgagaagcccctgaacctggcccacatcgtgtgcttcagaccccccagacccgtgaccagcatgaacgacaccctgttcagccacagcgtgcccagcagcggcagccccttcatcaccagaagcatgctggagagcagcaacagactggacgaggagcacagactgatcgccagatacgccgccagactggccgccgagagcagcagcagccagcccccccagcagagaagcgcccccgacatcagcttcaccatcgacgccaacaagcagcagagacagctgatcgccgagctggagaacaagaacagagagatcctgcaggagatccagagactgagactggagcacgagcaggccagccagcccacccccgagaaggcccagcagaaccccaccctgctggccgagctgagactgctgagacagagaaaggacgagctggagcagagaatgagcgccctgcaggagagcagaagagagctgatggtgcagctggagggcctgatgaagctgctgaagacccagggcgccggcagccccagaagcagccccagccacaccatcagcagacccatccccatgcccatcagaagcgccagcgcctgcagcacccccacccacaccccccaggacagcctgaccggcgtgggcggcgacgtgcaggaggccttcgcccagagcagcagaagaaacctgagaaacgacctgctggtggccgccgacagcatcaccaacaccatgagcagcctggtgaaggagctgaacagcgaggtgggcagcgagaccgagagcaacgtggacagcgagttcgccagaacccagttcgaggacctggtgcccagccccaccagcgagaaggccttcctggcccagatccacgccagaaagcccggctacatccacagcggcgccaccaccagcaccatgagaggcgacatggtgaccgaggacgccgacccctacgtgcagcccgaggacgagaactacgagaacgacagcgtgagacagctggagaacgagctgcagatggaggagtacctgaagcagaagctgcaggacgaggcctaccaggtgagcctgcagggctag

SEQ ID NO: 79945 - DNA, 2232 bp, synthetic construct
  misc_feature 1..2232: note = Description of Artificial Sequence: Synthetic coding sequence
  source 1..2232: mol_type = other DNA
atgatcgaggacagcggcaagagaggcaacaccatggccgagagaagacagctgttcgccgagatgagagcccaggacctggacagaatcagactgagcacctacagaaccgcctgcaagctgagattcgtgcagaagaagtgcaacctgcacctggtggacatctggaacgtgatcgaggccctgagagagaacgccctgaacaacctggaccccaacaccgagctgaacgtgagcagactggaggccgtgctgagcaccatcttctaccagctgaacaagagaatgcccaccacccaccagatccacgtggagcagagcatcagcctgctgctgaacttcctgctggccgccttcgaccccgagggccacggcaagatcagcgtgttcgccgtgaagatggccctggccaccctgtgcggcggcaagatcatggacaagctgagatacatcttcagcatgatcagcgacagcagcggcgtgatggtgtacggcagatacgaccagttcctgagagaggtgctgaagctgcccaccgccgtgttcgagggccccagcttcggctacaccgagcagagcgccagaagctgcttcagccagcagaagaaggtgaccctgaacggcttcctggacaccctgatgagcgacccccccccccagtgcctggtgtggctgcccctgctgcacagactggccaacgtggagaacgtgttccaccccgtggagtgcagctactgccacagcgagagcatgatgggcttcagatacagatgccagcagtgccacaactaccagctgtgccaggactgcttctggagaggccacgccggcggcagccacagcaaccagcaccagatgaaggagtacaccagctggaagagccccgccaagaagctgaccaacgccctgagcaagagcctgagctgcgccagcagcagagagcccctgcaccccatgttccccgaccagcccgagaagcccctgaacctggcccacatcgtgtgcttcagaccccccagacccgtgaccagcatgaacgacaccctgttcagccacagcgtgcccagcagcggcagccccttcatcaccagaagcagcccccccaaggacagcgaggtggagcagaacaagctgctggccagagccgcccccgccttcctgaagggcaagggcatccagtacagcctgaacgtggccgacagactggccgacgagcacgtgctgatcggcctgtacgtgaacatgctgagaaacaaccccagctgcatgctggagagcagcaacagactggacgaggagcacagactgatcgccagatacgccgccagactggccgccgagagcagcagcagccagcccccccagcagagaagcgcccccgacatcagcttcaccatcgacgccaacaagcagcagagacagctgatcgccgagctggagaacaagaacagagagatcctgcaggagatccagagactgagactggagcacgagcaggccagccagcccacccccgagaaggcccagcagaaccccaccctgctggccgagctgagactgctgagacagagaaaggacgagctggagcagagaatgagcgccctgcaggagagcagaagagagctgatggtgcagctggagggcctgatgaagctgctgaagacccagggcgccggcagccccagaagcagccccagccacaccatcagcagacccatccccatgcccatcagaagcgccagcgcctgcagcacccccacccacaccccccaggacagcctgaccggcgtgggcggcgacgtgcaggaggccttcgcccagagcagcagaagaaacctgagaaacgacctgctggtggccgccgacagcatcaccaacaccatgagcagcctggtgaaggagctgaacagcgaggtgggcagcgagaccgagagcaacgtggacagcgagttcgccagaacccagttcgaggacctggtgcccagccccaccagcgagaaggccttcctggcccagatccacgccagaaagcccggctacatccacagcggcgccaccaccagcaccatgagaggcgacatggtgaccgaggacgccgacccctacgtgcagcccgaggacgagaactacgagaacgacagcgtgagacagctggagaacgagctgcagatggaggagtacctgaagcagaagctgcaggacgaggcctaccaggtgagcctgcagggctag

SEQ ID NO: 79946 - DNA, 2232 bp, synthetic construct; identical to SEQ ID NO: 79942
  misc_feature 1..2232: note = Description of Artificial Sequence: Synthetic coding sequence
  source 1..2232: mol_type = other DNA

SEQ ID NO: 79947 - DNA, 1176 bp, synthetic construct; identical to SEQ ID NO: 79941
  misc_feature 1..1176: note = Description of Artificial Sequence: Synthetic coding sequence
  source 1..1176: mol_type = other DNA

SEQ ID NO: 79948 - DNA, 1116 bp, synthetic construct; identical to SEQ ID NO: 79926
  misc_feature 1..1116: note = Description of Artificial Sequence: Synthetic coding sequence
  source 1..1116: mol_type = other DNA

SEQ ID NO: 79949 - DNA, 1794 bp, synthetic construct
  misc_feature 1..1794: note = Description of Artificial Sequence: Synthetic coding sequence
  source 1..1794: mol_type = other DNA
atgatcgaggagagcggcaacaagagaaagaccatggccgagaagagacagctgttcatcgagatgagagcccagaacttcgacgtgatcagactgagcacctacagaaccgcctgcaagctgagattcgtgcagaagagatgcaacctgcacctggtggacatctggaacatgatcgaggccttcagagacaacggcctgaacaccctggaccacaccaccgagatcagcgtgagcagactggagaccgtgatcagcagcatctactaccagctgaacaagagactgcccagcacccaccagatcagcgtggagcagagcatcagcctgctgctgaacttcatgatcgccgcctacgacagcgagggcagaggcaagctgaccgtgttcagcgtgaaggccatgctggccaccatgtgcggcggcaagatgctggacaagctgagatacgtgttcagccagatgagcgacagcaacggcctgatgatcttcagcaagttcgaccagttcctgaaggaggtgctgaagctgcccaccgccgtgttcgagggccccagcttcggctacaccgagcacagcgtgagaacctgcttcccccagcagagaaagatcatgctgaacatgttcctggacaccatgatggccgacccccccccccagtgcctggtgtggctgcccctgatgcacagactggcccacgtggagaacgtgttccaccccgtggagtgcagctactgcagatgcgagagcatgatgggcttcagatacagatgccagcagtgccacaactaccagctgtgccagaactgcttctggagaggccacgccggcggcccccacagcaaccagcaccagatgaaggagcacagcagctggaagagccccgccaagaagctgagccacgccatcagcaagagcctgggctgcgtgcccaccagagagcccccccaccccgtgttccccgagcagcccgagaagcccctggacctggcccacatcgtgccccccagacccctgaccaacatgaacgacaccatggtgagccacatgagcagcggcgtgcccacccccaccaagagactgcagtacagccaggacatccccagccacctggccgacgagcacgccctgatcgccagctacgtggccagactgcagcactgcgccagagtgctggacagccccagcagactggacgaggagcacagactgatcgccagatacgccgccagactggccgccgaggccggcaacgtgaccagaccccccaccgacctgagcttcaacttcgacgccaacaagcagcagagacagctgatcgccgagctggagaacaagaacagagagatcctgcaggagatccagagactgagactggagcacgagcaggccagccagcccacccccgagaaggcccagcagaaccccaccctgctggccgagctgagactgctgagacagagaaaggacgagctggagcagagaatgagcgccctgcaggagagcagaagagagctgatggtgcagctggaggagctgatgaagctgctgaaggaggccgaggccagagagagcgcccaggccaccggcagcccccacaccagccccacccacggcggcggcagacccatgcccatgcccgtgagaagcaccagcgccggcagcacccccacccactgcccccaggacagcctgagcggcgtgggcggcgacgtgcaggaggccttcgcccaggccgaggagggcgccgaggaggaggaggagaagatgcagaacggcaaggacagaggctag

SEQ ID NO: 79950 - DNA, 567 bp, synthetic construct
  misc_feature 1..567: note = Description of Artificial Sequence: Synthetic coding sequence
  source 1..567: mol_type = other DNA
atgatcgaggagagcggcaacaagagaaagaccatggccgagaagagacagctgttcatcgagatgagagcccagaacttcgacgtgatcagactgagcacctacagaaccgcctgcaagctgagattcgtgcagaagagatgcaacctgcacctggtggacatctggaacatgatcgaggccttcagagacaacggcctgaacaccctggaccacaccaccgagatcagcgtgagcagactggagaccgtgatcagcagcatctactaccagctgaacaagagactgcccagcacccaccagatcagcgtggagcagagcatcagcctgctgctgaacttcatgatcgccgcctacgacagcgagggcagaggcaagctgaccgtgttcagcgtgaaggccatgctggccaccatgtgcggcggcaagatgctggacaagctgagatacgtgttcagccagatgagcgacagcaacggcctgatgatcttcagcaagttcgaccagttcctgaaggaggtgctgaagctgcccaccgccgtgttcgagggccccagcttcggctag

SEQ ID NO: 79951 - DNA, 399 bp, synthetic construct
  misc_feature 1..399: note = Description of Artificial Sequence: Synthetic coding sequence
  source 1..399: mol_type = other DNA
atgatcgaggagagcggcaacaagagaaagaccatggccgagaagagacagctgttcatcgagatgagagcccagaacttcgacgtgatcagactgagcacctacagaaccgcctgcaagctgagattcgtgcagaagagatgcaacctgcacctggtggacatctggaacatgatcgaggccttcagagacaacggcctgaacaccctggaccacaccaccgagatcagcgtgagcagactggagaccgtgatcagcagcatctactaccagctgaacaagagactgcccagcacccaccagatcagcgtggagcagagcatcagcctgctgctgaacttcatgatcgccgcctacgacagcgagggcagaggcaagctgaccgtgttcagcgtgtag

SEQ ID NO: 79952 - DNA, 450 bp, synthetic construct
  misc_feature 1..450: note = Description of Artificial Sequence: Synthetic coding sequence
  source 1..450: mol_type = other DNA
atgatcgaggagagcggcaacaagagaaagaccatggccgagaagagacagctgttcatcgagatgagagcccagaacttcgacgtgatcagactgagcacctacagaaccgcctgcaagctgagattcgtgcagaagagatgcaacctgcacctggtggacatctggaacatgatcgaggccttcagagacaacggcctgaacaccctggaccacaccaccgagatcagcgtgagcagactggagaccgtgatcagcagcatctactaccagctgaacaagagactgcccagcacccaccagatcagcgtggagcagagcatcagcctgctgctgaacttcatgatcgccgcctacgacagcgagggcagaggcaagctgaccgtgttcagcgtgaaggccatgctggccaccatgtgcggcggcaagatgctggacaagctgagatag

SEQ ID NO: 79953 - DNA, 1794 bp, synthetic construct
  misc_feature 1..1794: note = Description of Artificial Sequence: Synthetic coding sequence
  source 1..1794: mol_type = other DNA
atgatcgaggagagcggcaacaagagaaagaccatggccgagaagagacagctgttcatcgagatgagagcccagaacttcgacgtgatcagactgagcacctacagaaccgcctgcaagctgagattcgtgcagaagagatgcaacctgcacctggtggacatctggaacatgatcgaggccttcagagacaacggcctgaacaccctggaccacaccaccgagatcagcgtgagcagactggagaccgtgatcagcagcatctactaccagctgaacaagagactgcccagcacccaccagatcagcgtggagcagagcatcagcctgctgctgaacttcatgatcgccgcctacgacagcgagggcagaggcaagctgaccgtgttcagcgtgaaggccatgctggccaccatgtgcggcggcaagatgctggacaagctgagatacgtgttcagccagatgagcgacagcaacggcctgatgatcttcagcaagttcgaccagttcctgaaggaggtgctgaagctgcccaccgccgtgttcgagggccccagcttcggctacaccgagcacagcgtgagaacctgcttcccccagcagagaaagatcatgctgaacatgttcctggacaccatgatggccgacccccccccccagtgcctggtgtggctgcccctgatgcacagactggcccacgtggagaacgtgttccaccccgtggagtgcagctactgcagatgcgagagcatgatgggcttcagatacagatgccagcagtgccacaactaccagctgtgccagaactgcttctggagaggccacgccggcggcccccacagcaaccagcaccagatgaaggagcacagcagctggaagagccccgccaagaagctgagccacgccatcagcaagagcctgggctgcgtgcccaccagagagcccccccaccccgtgttccccgagcagcccgagaagcccctggacctggcccacatcgtgccccccagacccctgaccaacatgaacgacaccatggtgagccacatgagcagcggcgtgcccacccccaccaagagactgcagtacagccaggacatccccagccacctggccgacgagcacgccctgatcgccagctacgtggccagactgcagcactgcgccagagtgctggacagccccagcagactggacgaggagcacagactgatcgccagatacgccgccagactggccgccgaggccggcaacgtgaccagaccccccaccgacctgagcttcaacttcgacgccaacaagcagcagagacagctgatcgccgagctggagaacaagaacagagagatcctgcaggagatccagagactgagactggagcacgagcaggccagccagcccacccccgagaaggcccagcagaaccccaccctgctggccgagctgagactgctgagacagagaaaggacgagctggagcagagaatgagcgccctgcaggagagcagaagagagctgatggtgcagctggaggagctgatgaagctgctgaaggaggaggagcagaagcaggccgcccaggccaccggcagcccccacaccagccccacccacggcggcggcagacccatgcccatgcccgtgagaagcaccagcgccggcagcacccccacccactgcccccaggacagcctgagcggcgtgggcggcgacgtgcaggaggccttcgcccaggccgaggagggcgccgaggaggaggaggagaagatgcagaacggcaaggacagaggctag

SEQ ID NO: 79954 - DNA, 1683 bp, synthetic construct
  misc_feature 1..1683: note = Description of Artificial Sequence: Synthetic coding sequence
  source 1..1683: mol_type = other DNA
atgatcgaggagagcggcaacaagagaaagaccatggccgagaagagacagctgttcatcgagatgagagcccagaacttcgacgtgatcagactgagcacctacagaaccgcctgcaagctgagattcgtgcagaagagatgcaacctgcacctggtggacatctggaacatgatcgaggccttcagagacaacggcctgaacaccctggaccacaccaccgagatcagcgtgagcagactggagaccgtgatcagcagcatctactaccagctgaacaagagactgcccagcacccaccagatcagcgtggagcagagcatcagcctgctgctgaacttcatgatcgccgcctacgacagcgagggcagaggcaagctgaccgtgttcagcgtgaaggccatgctggccaccatgtgcggcggcaagatgctggacaagctgagatacgtgttcagccagatgagcgacagcaacggcctgatgatcttcagcaagttcgaccagttcctgaaggaggtgctgaagctgcccaccgccgtgttcgagggccccagcttcggctacaccgagcacagcgtgagaacctgcttcccccagcagagaaagatcatgctgaacatgttcctggacaccatgatggccgacccccccccccagtgcctggtgtggctgcccctgatgcacagactggcccacgtggagaacgtgttccaccccgtggagtgcagctactgcagatgcgagagcatgatgggcttcagatacagatgccagcagtgccacaactaccagctgtgccagaactgcttctggagaggccacgccggcggcccccacagcaaccagcaccagatgaaggagcacagcagctggaagagccccgccaagaagctgagccacgccatcagcaagagcctgggctgcgtgcccaccagagagcccccccaccccgtgttccccgagcagcccgagaagcccctggacctggcccacatcgtgccccccagacccctgaccaacatgaacgacaccatggtgagccacatgagcagcggcgtgcccacccccaccaagagcgtgctggacagccccagcagactggacgaggagcacagactgatcgccagatacgccgccagactggccgccgaggccggcaacgtgaccagaccccccaccgacctgagcttcaacttcgacgccaacaagcagcagagacagctgatcgccgagctggagaacaagaacagagagatcctgcaggagatccagagactgagactggagcacgagcaggccagccagcccacccccgagaaggcccagcagaaccccaccctgctggccgagctgagactgctgagacagagaaaggacgagctggagcagagaatgagcgccctgcaggagagcagaagagagctgatggtgcagctggaggagctgatgaagctgctgaaggcccaggccaccggcagcccccacaccagccccacccacggcggcggcagacccatgcccatgcccgtgagaagcaccagcgccggcagcacccccacccactgcccccaggacagcctgagcggcgtgggcggcgacgtgcaggaggccttcgcccaggccgaggagggcgccgaggaggaggaggagaagatgcagaacggcaaggacagaggctag

SEQ ID NO: 79955 - DNA, 1884 bp, synthetic construct
  misc_feature 1..1884: note = Description of Artificial Sequence: Synthetic coding sequence
  source 1..1884: mol_type = other DNA
atgatcgaggagagcggcaacaagagaaagaccatggccgagaagagacagctgttcatcgagatgagagcccagaacttcgacgtgatcagactgagcacctacagaaccgcctgcaagctgagattcgtgcagaagagatgcaacctgcacctggtggacatctggaacatgatcgaggccttcagagacaacggcctgaacaccctggaccacaccaccgagatcagcgtgagcagactggagaccgtgatcagcagcatctactaccagctgaacaagagactgcccagcacccaccagatcagcgtggagcagagcatcagcctgctgctgaacttcatgatcgccgcctacgacagcgagggcagaggcaagctgaccgtgttcagcgtgaaggccatgctggccaccatgtgcggcggcaagatgctggacaagctgagatacgtgttcagccagatgagcgacagcaacggcctgatgatcttcagcaagttcgaccagttcctgaaggaggtgctgaagctgcccaccgccgtgttcgagggccccagcttcggctacaccgagcacagcgtgagaacctgcttcccccagcagagaaagatcatgctgaacatgttcctggacaccatgatggccgacccccccccccagtgcctggtgtggctgcccctgatgcacagactggcccacgtggagaacgtgttccaccccgtggagtgcagctactgcagatgcgagagcatgatgggcttcagatacagatgccagcagtgccacaactaccagctgtgccagaactgcttctggagaggccacgccggcggcccccacagcaaccagcaccagatgaaggagcacagcagctggaagagccccgccaagaagctgagccacgccatcagcaagagcctgggctgcgtgcccaccagagagcccccccaccccgtgttccccgagcagcccgagaagcccctggacctggcccacatcgtgccccccagacccctgaccaacatgaacgacaccatggtgagccacatgagcagcggcgtgcccacccccaccaagagactgcagtacagccaggacatccccagccacctggccgacgagcacgccctgatcgccagctacgtggccagactgcagcactgcgccagagtgctggacagccccagcagactggacgaggagcacagactgatcgccagatacgccgccagactggccgccgaggccggcaacgtgaccagaccccccaccgacctgagcttcaacttcgacgccaacaagcagcagagacagctgatcgccgagctggagaacaagaacagagagatcctgcaggagatccagagactgagactggagcacgagcaggccagccagcccacccccgagaaggcccagcagaaccccaccctgctggccgagctgagactgctgagacagagaaaggacgagctggagcagagaatgagcgccctgcaggagagcagaagagagctgatggtgcagctggaggagctgatgaagctgctgaaggaggaggagcagaagcaggccgcccaggccaccggcagcccccacaccagccccacccacggcggcggcagacccatgcccatgcccgtgagaagcaccagcgccggcagcacccccacccactgcccccaggacagcctgagcggcgtgggcggcgacgtgcaggaggccttcgcccagggcaccagaagaaacctgagaaacgacctgctggtggccgccgacagcatcaccaacaccatgagcagcctggtgaaggagctgcacagcgccgaggagggcgccgaggaggaggaggagaagatgcagaacggcaaggacagaggctag

SEQ ID NO: 79956 - DNA, 1704 bp, synthetic construct
  misc_feature 1..1704: note = Description of Artificial Sequence: Synthetic coding sequence
  source 1..1704: mol_type = other DNA
atgatcgaggagagcggcaacaagagaaagaccatggccgagaagagacagctgttcatcgagatgagagcccagaacttcgacgtgatcagactgagcacctacagaaccgcctgcaagctgagattcgtgcagaagagatgcaacctgcacctggtggacatctggaacatgatcgaggccttcagagacaacggcctgaacaccctggaccacaccaccgagatcagcgtgagcagactggagaccgtgatcagcagcatctactaccagctgaacaagagactgcccagcacccaccagatcagcgtggagcagagcatcagcctgctgctgaacttcatgatcgccgcctacgacagcgagggcagaggcaagctgaccgtgttcagcgtgaaggccatgctggccaccatgtgcggcggcaagatgctggacaagctgagatacgtgttcagccagatgagcgacagcaacggcctgatgatcttcagcaagttcgaccagttcctgaaggaggtgctgaagctgcccaccgccgtgttcgagggccccagcttcggctacaccgagcacagcgtgagaacctgcttcccccagcagagaaagatcatgctgaacatgttcctggacaccatgatggccgacccccccccccagtgcctggtgtggctgcccctgatgcacagactggcccacgtggagaacgtgttccaccccgtggagtgcagctactgcagatgcgagagcatgatgggcttcagatacagatgccagcagtgccacaactaccagctgtgccagaactgcttctggagaggccacgccggcggcccccacagcaaccagcaccagatgaaggagcacagcagctggaagagccccgccaagaagctgagccacgccatcagcaagagcctgggctgcgtgcccaccagagagcccccccaccccgtgttccccgagcagcccgagaagcccctggacctggcccacatcgtgccccccagacccctgaccaacatgaacgacaccatggtgagccacatgagcagcggcgtgcccacccccaccaagagcgtgctggacagccccagcagactggacgaggagcacagactgatcgccagatacgccgccagactggccgccgaggccggcaacgtgaccagaccccccaccgacctgagcttcaacttcgacgccaacaagcagcagagacagctgatcgccgagctggagaacaagaacagagagatcctgcaggagatccagagactgagactggagcacgagcaggccagccagcccacccccgagaaggcccagcagaaccccaccctgctggccgagctgagactgctgagacagagaaaggacgagctggagcagagaatgagcgccctgcaggagagcagaagagagctgatggtgcagctggaggagctgatgaagctgctgaaggaggaggagcagaagcaggccgcccaggccaccggcagcccccacaccagccccacccacggcggcggcagacccatgcccatgcccgtgagaagcaccagcgccggcagcacccccacccactgcccccaggacagcctgagcggcgtgggcggcgacgtgcaggaggccttcgcccaggccgaggagggcgccgaggaggaggaggagaagatgcagaacggcaaggacagaggctag

SEQ ID NO: 79957 - DNA, 1773 bp, synthetic construct
  misc_feature 1..1773: note = Description of Artificial Sequence: Synthetic coding sequence
  source 1..1773: mol_type = other DNA
atgatcgaggagagcggcaacaagagaaagaccatggccgagaagagacagctgttcatcgagatgagagcccagaacttcgacgtgatcagactgagcacctacagaaccgcctgcaagctgagattcgtgcagaagagatgcaacctgcacctggtggacatctggaacatgatcgaggccttcagagacaacggcctgaacaccctggaccacaccaccgagatcagcgtgagcagactggagaccgtgatcagcagcatctactaccagctgaacaagagactgcccagcacccaccagatcagcgtggagcagagcatcagcctgctgctgaacttcatgatcgccgcctacgacagcgagggcagaggcaagctgaccgtgttcagcgtgaaggccatgctggccaccatgtgcggcggcaagatgctggacaagctgagatacgtgttcagccagatgagcgacagcaacggcctgatgatcttcagcaagttcgaccagttcctgaaggaggtgctgaagctgcccaccgccgtgttcgagggccccagcttcggctacaccgagcacagcgtgagaacctgcttcccccagcagagaaagatcatgctgaacatgttcctggacaccatgatggccgacccccccccccagtgcctggtgtggctgcccctgatgcacagactggcccacgtggagaacgtgttccaccccgtggagtgcagctactgcagatgcgagagcatgatgggcttcagatacagatgccagcagtgccacaactaccagctgtgccagaactgcttctggagaggccacgccggcggcccccacagcaaccagcaccagatgaaggagcacagcagctggaagagccccgccaagaagctgagccacgccatcagcaagagcctgggctgcgtgcccaccagagagcccccccaccccgtgttccccgagcagcccgagaagcccctggacctggcccacatcgtgccccccagacccctgaccaacatgaacgacaccatggtgagccacatgagcagcggcgtgcccacccccaccaagagcgtgctggacagccccagcagactggacgaggagcacagactgatcgccagatacgccgccagactggccgccgaggccggcaacgtgaccagaccccccaccgacctgagcttcaacttcgacgccaacaagcagcagagacagctgatcgccgagctggagaacaagaacagagagatcctgcaggagatccagagactgagactggagcacgagcaggccagccagcccacccccgagaaggcccagcagaaccccaccctgctggccgagctgagactgctgagacagagaaaggacgagctggagcagagaatgagcgccctgcaggagagcagaagagagctgatggtgcagctggaggagctgatgaagctgctgaaggcccaggccaccggcagcccccacaccagccccacccacggcggcggcagacccatgcccatgcccgtgagaagcaccagcgccggcagcacccccacccactgcccccaggacagcctgagcggcgtgggcggcgacgtgcaggaggccttcgcccagggcaccagaagaaacctgagaaacgacctgctggtggccgccgacagcatcaccaacaccatgagcagcctggtgaaggagctgcacagcgccgaggagggcgccgaggaggaggaggagaagatgcagaacggcaaggacagaggctag

SEQ ID NO: 79958 - DNA, 1830 bp, synthetic construct
  misc_feature 1..1830: note = Description of Artificial Sequence: Synthetic coding sequence
  source 1..1830: mol_type = other DNA
atgatcgaggagagcggcaacaagagaaagaccatggccgagaagagacagctgttcatcgagatgagagcccagaacttcgacgtgatcagactgagcacctacagaaccgcctgcaagctgagattcgtgcagaagagatgcaacctgcacctggtggacatctggaacatgatcgaggccttcagagacaacggcctgaacaccctggaccacaccaccgagatcagcgtgagcagactggagaccgtgatcagcagcatctactaccagctgaacaagagactgcccagcacccaccagatcagcgtggagcagagcatcagcctgctgctgaacttcatgatcgccgcctacgacagcgagggcagaggcaagctgaccgtgttcagcgtgaaggccatgctggccaccatgtgcggcggcaagatgctggacaagctgagatacgtgttcagccagatgagcgacagcaacggcctgatgatcttcagcaagttcgaccagttcctgaaggaggtgctgaagctgcccaccgccgtgttcgagggccccagcttcggctacaccgagcacagcgtgagaacctgcttcccccagcagagaaagatcatgctgaacatgttcctggacaccatgatggccgacccccccccccagtgcctggtgtggctgcccctgatgcacagactggcccacgtggagaacgtgttccaccccgtggagtgcagctactgcagatgcgagagcatgatgggcttcagatacagatgccagcagtgccacaactaccagctgtgccagaactgcttctggagaggccacgccggcggcccccacagcaaccagcaccagatgaaggagcacagcagctggaagagccccgccaagaagctgagccacgccatcagcaagagcctgggctgcgtgcccaccagagagcccccccaccccgtgttccccgagcagcccgagaagcccctggacctggcccacatcgtgccccccagacccctgaccaacatgaacgacaccatggtgagccacatgagcagcggcgtgcccacccccaccaagagactgcagtacagccaggacatccccagccacctggccgacgagcacgccctgatcgccagctacgtggccagactgcagcactgcgccagagtgctggacagccccagcagactggacgaggagcacagactgatcgccagatacgccgccagactggccgccgaggccggcaacgtgaccagaccccccaccgacctgagcttcaacttcgacgccaacaagcagcagagacagctgatcgccgagctggagaacaagaacagagagatcctgcaggagatccagagactgagactggagcacgagcaggccagccagcccacccccgagaaggcccagcagaaccccaccctgctggccgagctgagactgctgagacagagaaaggacgagctggagcagagaatgagcgccctgcaggagagcagaagagagctgatggtgcagctggaggagctgatgaagctgctgaaggaggaggagcagaagcaggccgcccaggccaccggcagcccccacaccagccccacccacggcggcggcagacccatgcccatgcccgtgagaagcaccagcgccggcagcacccccacccactgcccccaggacagcctgagcggcgtgggcggcgacgtgcaggaggccttcgcccagggcaccagaagaaacctgagaaacgacctgctggtggccgccgacagcatcaccaacaccatgagcagcctggtgaaggagctgcacagcggctag

SEQ ID NO: 79959 - DNA, 1638 bp, synthetic construct
  misc_feature 1..1638: note = Description of Artificial Sequence: Synthetic coding sequence
  source 1..1638: mol_type = other DNA
atgatcgaggccttcagagacaacggcctgaacaccctggaccacaccaccgagatcagcgtgagcagactggagaccgtgatcagcagcatctactaccagctgaacaagagactgcccagcacccaccagatcagcgtggagcagagcatcagcctgctgctgaacttcatgatcgccgcctacgacagcgagggcagaggcaagctgaccgtgttcagcgtgaaggccatgctggccaccatgtgcggcggcaagatgctggacaagctgagatacgtgttcagccagatgagcgacagcaacggcctgatgatcttcagcaagttcgaccagttcctgaaggaggtgctgaagctgcccaccgccgtgttcgagggccccagcttcggctacaccgagcacagcgtgagaacctgcttcccccagcagagaaagatcatgctgaacatgttcctggacaccatgatggccgacccccccccccagtgcctggtgtggctgcccctgatgcacagactggcccacgtggagaacgtgttccaccccgtggagtgcagctactgcagatgcgagagcatgatgggcttcagatacagatgccagcagtgccacaactaccagctgtgccagaactgcttctggagaggccacgccggcggcccccacagcaaccagcaccagatgaaggagcacagcagctggaagagccccgccaagaagctgagccacgccatcagcaagagcctgggctgcgtgcccaccagagagcccccccaccccgtgttccccgagcagcccgagaagcccctggacctggcccacatcgtgccccccagacccctgaccaacatgaacgacaccatggtgagccacatgagcagcggcgtgcccacccccaccaagagactgcagtacagccaggacatccccagccacctggccgacgagcacgccctgatcgccagctacgtggccagactgcagcactgcgccagagtgctggacagccccagcagactggacgaggagcacagactgatcgccagatacgccgccagactggccgccgaggccggcaacgtgaccagaccccccaccgacctgagcttcaacttcgacgccaacaagcagcagagacagctgatcgccgagctggagaacaagaacagagagatcctgcaggagatccagagactgagactggagcacgagcaggccagccagcccacccccgagaaggcccagcagaaccccaccctgctggccgagctgagactgctgagacagagaaaggacgagctggagcagagaatgagcgccctgcaggagagcagaagagagctgatggtgcagctggaggagctgatgaagctgctgaaggcccaggccaccggcagcccccacaccagccccacccacggcggcggcagacccatgcccatgcccgtgagaagcaccagcgccggcagcacccccacccactgcccccaggacagcctgagcggcgtgggcggcgacgtgcaggaggccttcgcccagggcaccagaagaaacctgagaaacgacctgctggtggccgccgacagcatcaccaacaccatgagcagcctggtgaaggagctgcacagcggctag

SEQ ID NO: 79960 - DNA, 960 bp, synthetic construct
  misc_feature 1..960: note = Description of Artificial Sequence: Synthetic coding sequence
  source 1..960: mol_type = other DNA
atgaccgacgtgttcagccagatgagcgacagcaacggcctgatgatcttcagcaagttcgaccagttcctgaaggaggtgctgaagctgcccaccgccgtgttcgagggccccagcttcggctacaccgagcacagcgtgagaacctgcttcccccagcagagaaagatcatgctgaacatgttcctggacaccatgatggccgacccccccccccagtgcctggtgtggctgcccctgatgcacagactggcccacgtggagaacgtgttccaccccgtggagtgcagctactgcagatgcgagagcatgatgggcttcagatacagatgccagcagtgccacaactaccagctgtgccagaactgcttctggagaggccacgccggcggcccccacagcaaccagcaccagatgaaggagcacagcagctggaagagccccgccaagaagctgagccacgccatcagcaagagcctgggctgcgtgcccaccagagagcccccccaccccgtgttccccgagcagcccgagaagcccctggacctggcccacatcgtgccccccagacccctgaccaacatgaacgacaccatggtgagccacatgagcagcggcgtgcccacccccaccaagagactgcagtacagccaggacatccccagccacctggccgacgagcacgccctgatcgccagctacgtggccagactgcagcactgcgccagagtgctggacagccccagcagactggacgaggagcacagactgatcgccagatacgccgccagactggccgccgaggccggcaacgtgaccagaccccccaccgacctgagcttcaacttcgacgccaacaagcagcagagacagctgatcgccgagctggagaacaagaacagagagatcctgcaggagatccagagactgagactggagcacgagcaggccagccagtag

SEQ ID NO: 79961 - DNA, 1251 bp, synthetic construct
  misc_feature 1..1251: note = Description of Artificial Sequence: Synthetic coding sequence
  source 1..1251: mol_type = other DNA
atgctgaacatgttcctggacaccatgatggccgacccccccccccagtgcctggtgtggctgcccctgatgcacagactggcccacgtggagaacgtgttccaccccgtggagtgcagctactgcagatgcgagagcatgatgggcttcagatacagatgccagcagtgccacaactaccagctgtgccagaactgcttctggagaggccacgccggcggcccccacagcaaccagcaccagatgaaggagcacagcagctggaagagccccgccaagaagctgagccacgccatcagcaagagcctgggctgcgtgcccaccagagagcccccccaccccgtgttccccgagcagcccgagaagcccctggacctggcccacatcgtgccccccagacccctgaccaacatgaacgacaccatggtgagccacatgagcagcggcgtgcccacccccaccaagagactgcagtacagccaggacatccccagccacctggccgacgagcacgccctgatcgccagctacgtggccagactgcagcactgcgccagagtgctggacagccccagcagactggacgaggagcacagactgatcgccagatacgccgccagactggccgccgaggccggcaacgtgaccagaccccccaccgacctgagcttcaacttcgacgccaacaagcagcagagacagctgatcgccgagctggagaacaagaacagagagatcctgcaggagatccagagactgagactggagcacgagcaggccagccagcccacccccgagaaggcccagcagaaccccaccctgctggccgagctgagactgctgagacagagaaaggacgagctggagcagagaatgagcgccctgcaggagagcagaagagagctgatggtgcagctggaggagctgatgaagctgctgaaggcccaggccaccggcagcccccacaccagccccacccacggcggcggcagacccatgcccatgcccgtgagaagcaccagcgccggcagcacccccacccactgcccccaggacagcctgagcggcgtgggcggcgacgtgcaggaggccttcgcccagggcaccagaagaaacctgagaaacgacctgctggtggccgccgacagcatcaccaacaccatgagcagcctggtgaaggagctgcacagcgccgaggagggcgccgaggaggaggaggagaagatgcagaacggcaaggacagaggctag

SEQ ID NO: 79962 - DNA, 2688 bp, synthetic construct
  misc_feature 1..2688: note = Description of Artificial Sequence: Synthetic coding sequence
  source 1..2688: mol_type = other DNA
atgagaatgagcgtgggcctgagcctgctgctgcccctgagcggcagaaccttcctgctgctgctgagcgtggtgatggcccagagccactggcccagcgagcccagcgaggccgtgagagactgggagaaccagctggaggccagcatgcacagcgtgctgagcgacctgcacgaggccgtgcccaccgtggtgggcatccccgacggcaccgccgtggtgggcagaagcttcagagtgaccatccccaccgacctgatcgccagcagcggcgacatcatcaaggtgagcgccgccggcaaggaggccctgcccagctggctgcactgggacagccagagccacaccctggagggcctgcccctggacaccgacaagggcgtgcactacatcagcgtgagcgccaccagactgggcgccaacggcagccacatcccccagaccagcagcgtgttcagcatcgaggtgtaccccgaggaccacagcgagctgcagagcgtgagaaccgccagccccgaccccggcgaggtggtgagcagcgcctgcgccgccgacgagcccgtgaccgtgctgaccgtgatcctggacgccgacctgaccaagatgacccccaagcagagaatcgacctgctgcacagaatgagaagcttcagcgaggtggagctgcacaacatgaagctggtgcccgtggtgaacaacagactgttcgacatgagcgccttcatggccggccccggcaacgccaagaaggtggtggagaacggcgccctgctgagctggaagctgggctgcagcctgaaccagaacagcgtgcccgacatccacggcgtggaggcccccgccagagagggcgccatgagcgcccagctgggctaccccgtggtgggctggcacatcgccaacaagaagccccccctgcccaagagagtgagaagacagatccacgccacccccacccccgtgaccgccatcggcccccccaccaccgccatccaggagccccccagcagaatcgtgcccacccccaccagccccgccatcgccccccccaccgagaccatggccccccccgtgagagaccccgtgcccggcaagcccaccgtgaccatcagaaccagaggcgccatcatccagacccccaccctgggccccatccagcccaccagagtgagcgaggccggcaccaccgtgcccggccagatcagacccaccatgaccatccccggctacgtggagcccaccgccgtggccaccccccccaccaccaccaccaagaagcccagagtgagcacccccaagcccgccacccccagcaccgacagcaccaccaccaccaccagaagacccaccaagaagcccagaacccccagacccgtgcccagagtgaccaccaaggtgagcatcaccagactggagaccgccagcccccccaccagaatcagaaccaccaccagcggcgtgcccagaggcggcgagcccaaccagagacccgagctgaagaaccacatcgacagagtggacgcctgggtgggcacctacttcgaggtgaagatccccagcgacaccttctacgaccacgaggacaccaccaccgacaagctgaagctgaccctgaagctgagagagcagcagctggtgggcgagaagagctgggtgcagttcaacagcaacagccagctgatgtacggcctgcccgacagcagccacgtgggcaagcacgagtacttcatgcacgccaccgacaagggcggcctgagcgccgtggacgccttcgagatccacgtgcacagaagaccccagggcgacagagcccccgccagattcaaggccaagttcgtgggcgaccccgccctggtgctgaacgacatccacaagaagatcgccctggtgaagaagctggccttcgccttcggcgacagaaactgcagcaccatcaccctgcagaacatcaccagaggcagcatcgtggtggagtggaccaacaacaccctgcccctggagccctgccccaaggagcagatcgccggcctgagcagaagaatcgccgaggacgacggcaagcccagacccgccttcagcaacgccctggagcccgacttcaaggccaccagcatcaccgtgaccggcagcggcagctgcagacacctgcagttcatccccgtggtgccccccagaagagtgcccagcgaggccccccccaccgaggtgcccgacagagaccccgagaagagcagcgaggacgacgtgtacctgcacaccgtgatccccgccgtggtggtggccgccatcctgctgatcgccggcatcatcgccatgatctgctacagaaagaagagaaagggcaagctgaccctggaggaccaggccaccttcatcaagaagggcgtgcccatcatcttcgccgacgagctggacgacagcaagcccccccccagcagcagcatgcccctgatcctgcaggaggagaaggcccccctgcccccccccgagtaccccaaccagagcgtgcccgagaccacccccctgaaccaggacaccatgggcgagtacacccccctgagagacgaggaccccaacgcccccccctaccagccccccccccccttcaccgcccccatggagggcaagggcagcagacccaagaacatgaccccctacagaagcccccccccctacgtgcccccctag

SEQ ID NO: 79963 - DNA, 432 bp, synthetic construct
  misc_feature 1..432: note = Description of Artificial Sequence: Synthetic coding sequence
  source 1..432: mol_type = other DNA
atgacccccaagcagagaatcgacctgctgcacagaatgagaagcttcagcgaggtggagctgcacaacatgaagctggtgcccgtggtgaacaacagactgttcgacatgagcgccttcatggccggccccggcaacgccaagaaggtggtggagaacggcgccctgctgagctggaagctgggctgcagcctgaaccagaacagcgtgcccgacatccacggcgtggaggcccccgccagagagggcgccatgagcgcccagctgggctaccccgtggtgggctggcacatcgccaacaagaagccccccgccctgagcggcccccccaagccccagagcagctggagagacttcggcgacttcttcatcttcatcttctgcctgaccgccttcggcctgttcatcgagaacagcagcctgcacttctag

SEQ ID NO: 79964 - DNA, 267 bp, synthetic construct
  misc_feature 1..267: note = Description of Artificial Sequence: Synthetic coding sequence
  source 1..267: mol_type = other DNA
atgagaatgagcgtgggcctgagcctgctgctgcccctgagcggcagaaccttcctgctgctgctgagcgtggtgatggcccagagccactggcccagcgagcccagcgaggccgtgagagactgggagaaccagctggaggccagcatgcacagcgtgctgagcgacctgcacgaggccgtgcccaccgtggtgggcatccccgacggcaccgccgtggtgggcagaagcttcagagtgaccatccccaccgacctgatcgcctag

SEQ ID NO: 79965 - DNA, 48 bp, synthetic construct
  misc_feature 1..48: note = Description of Artificial Sequence: Synthetic coding sequence
  source 1..48: mol_type = other DNA
atgagaatgagcgtgggcctgagcctgctgctgcccctgagcggctag

SEQ ID NO: 79966 - DNA, 321 bp, synthetic construct
  misc_feature 1..321: note = Description of Artificial Sequence: Synthetic coding sequence
  source 1..321: mol_type = other DNA
atgagaatgagcgtgggcctgagcctgctgctgcccctgagcggcagaaccttcctgctgctgctgagcgtggtgatggcccagagccactggcccagcgagcccagcgaggccgtgagagactgggagaaccagctggaggccagcatgcacagcgtgctgagcgacctgcacgaggccgtgcccaccgtggtgggcatccccgacggcaccgccgtggtgggcagaagcttcagagtgaccatccccaccgacctgatcgccagcagcggcgacatcatcaaggtgagcgccgccggcaaggaggccctgcccagctag

SEQ ID NO: 79967 - DNA, 291 bp, synthetic construct
  misc_feature 1..291: note = Description of Artificial Sequence: Synthetic coding sequence
  source 1..291: mol_type = other DNA
atgagaatgagcgtgggcctgagcctgctgctgcccctgagcggcagaaccttcctgctgctgctgagcgtggtgatggcccagagccactggcccagcgagcccagcgaggccgtgagagactgggagaaccagctggaggccagcatgcacagcgtgctgagcgacctgcacgaggccgtgcccaccgtggtgggcatccccgacggcaccgccgtggtgggcagaagcttcagagtgaccatccccaccgacctgatcgccagcagcggcgacatcatcaaggtgtag

SEQ ID NO: 79968 - DNA, 30 bp, synthetic construct
  misc_feature 1..30: note = Description of Artificial Sequence: Synthetic coding sequence
  source 1..30: mol_type = other DNA
atgagaatgagcgtgggcctgagcctgtag

SEQ ID NO: 79969 - DNA, 354 bp, synthetic construct
  misc_feature 1..354: note = Description of Artificial Sequence: Synthetic coding sequence
  source 1..354: mol_type = other DNA
atgagaatgagcgtgggcctgagcctgctgctgcccctgagcggcagaaccttcctgctgctgctgagcgtggtgatggcccagagccactggcccagcgagcccagcgaggccgtgagagactgggagaaccagctggaggccagcatgcacagcgtgctgagcgacctgcacgaggccgtgcccaccgtggtgggcatccccgacggcaccgccgtggtgggcagaagcttcagagtgaccatccccaccgacctgatcgccagcagcggcgacatcatcaaggtgagcgccgccggcaaggaggccctgcccagctggctgcactgggacagccagagccacaccctgtag

SEQ ID NO: 79970 - DNA, 159 bp, synthetic construct
  misc_feature 1..159: note = Description of Artificial Sequence: Synthetic coding sequence
  source 1..159: mol_type = other DNA
atgagaatgagcgtgggcctgagcctgctgctgcccctgagcggcagaaccttcctgctgctgctgagcgtggtgatggcccagagccactggcccagcgagcccagcgaggccgtgagagactgggagaaccagctggaggccagcatgcacagctag

SEQ ID NO: 79971 - DNA, 261 bp, synthetic construct
  misc_feature 1..261: note = Description of Artificial Sequence: Synthetic coding sequence
  source 1..261: mol_type = other DNA
atgagaatgagcgtgggcctgagcctgctgctgcccctgagcggcagaaccttcctgctgctgctgagcgtggtgatggcccagagccactggcccagcgagcccagcgaggccgtgagagactgggagaaccagctggaggccagcatgcacagcgtgctgagcgacctgcacgaggccgtgcccaccgtggtgggcatccccgacggcaccgccgtggtgggcagaagcttcagagtgaccatccccaccgacctgtag

SEQ ID NO: 79972 - DNA, 126 bp, synthetic construct
  misc_feature 1..126: note = Description of Artificial Sequence: Synthetic coding sequence
  source 1..126: mol_type = other DNA
atgagaatgagcgtgggcctgagcctgctgctgcccctgagcggcagaaccttcctgctgctgctgagcgtggtgatggcccagagccactggcccagcgagcccagcgaggccgtgagagactag

SEQ ID NO: 79973 - DNA, 2688 bp, synthetic construct; identical to SEQ ID NO: 79962
  misc_feature 1..2688: note = Description of Artificial Sequence: Synthetic coding sequence
  source 1..2688: mol_type = other DNA

SEQ ID NO: 79974 - DNA, 2688 bp, synthetic construct; identical to SEQ ID NO: 79962
  misc_feature 1..2688: note = Description of Artificial Sequence: Synthetic coding sequence
  source 1..2688: mol_type = other DNA

SEQ ID NO: 79975 - DNA, 2688 bp, synthetic construct; identical to SEQ ID NO: 79962
  misc_feature 1..2688: note = Description of Artificial Sequence: Synthetic coding sequence
  source 1..2688: mol_type = other DNA

SEQ ID NO: 79976 - DNA, 2688 bp, synthetic construct; identical to SEQ ID NO: 79962
  misc_feature 1..2688: note = Description of Artificial Sequence: Synthetic coding sequence
  source 1..2688: mol_type = other DNA

SEQ ID NO: 79977 - DNA, 2688 bp, synthetic construct; identical to SEQ ID NO: 79962
  misc_feature 1..2688: note = Description of Artificial Sequence: Synthetic coding sequence
  source 1..2688: mol_type = other DNA

SEQ ID NO: 79978 - DNA, 2025 bp, synthetic construct
  misc_feature 1..2025: note = Description of Artificial Sequence: Synthetic coding sequence
  source 1..2025: mol_type = other DNA
atggccgccggcggcgccgagggcggcagcggccccggcgccgccatgggcgactgcgccgagatcaagagccagttcagaaccagagagggcttctacaagctgctgcccggcgacggcgccgccagaagaagcggccccgccagcgcccagacccccgtgcccccccagcccccccagcccccccccggccccgccagcgccagcggccccggcgccgccggccccgccagcagccccccccccgccggccccggccccggccccgccctgcccgccgtgagactgagcctggtgagactgggcgagcccgacagcgccggcgccggcgagccccccgccacccccgccggcctgggcagcggcggcgacagagtgtgcttcaacctgggcagagagctgtacttctaccccggctgctgcagaagaggcagccagagaagcatcgacctgaacaagcccatcgacaagagaatctacaagggcacccagcccacctgccacgacttcaaccagttcaccgccgccaccgagaccatcagcctgctggtgggcttcagcgccggccaggtgcagtacctggacctgatcaagaaggacaccagcaagctgttcaacgaggagagactgatcgacaagaccaaggtgacctacctgaagtggctgcccgagagcgagagcctgttcctggccagccacgccagcggccacctgtacctgtacaacgtgagccacccctgcgccagcgcccccccccagtacagcctgctgaagcagggcgagggcttcagcgtgtacgccgccaagagcaaggcccccagaaaccccctggccaagtgggccgtgggcgagggccccctgaacgagttcgccttcagccccgacggcagacacctggcctgcgtgagccaggacggctgcctgagagtgttccacttcgacagcatgctgctgagaggcctgatgaagagctacttcggcggcctgctgtgcgtgtgctggagccccgacggcagatacgtggtgaccggcggcgaggacgacctggtgaccgtgtggagcttcaccgagggcagagtggtggccagaggccacggccacaagagctgggtgaacgccgtggccttcgacccctacaccaccagagccgaggaggccgccaccgccgccggcgccgacggcgagagaagcggcgaggaggaggaggaggagcccgaggccgccggcaccggcagcgccggcggcgcccccctgagccccctgcccaaggccggcagcatcacctacagattcggcagcgccggccaggacacccagttctgcctgtgggacctgaccgaggacgtgctgtacccccacccccccctggccagaaccagaaccctgcccggcacccccggcaccaccccccccgccgccagcagcagcagaggcggcgagcccggccccggccccctgcccagaagcctgagcagaagcaacagcctgccccaccccgccggcggcggcaaggccggcggccccggcgtggccgccgagcccggcacccccttcagcatcggcagattcgccaccctgaccctgcaggagagaagagacagaggcgccgagaaggagcacaagagataccacagcctgggcaacatcagcagaggcggcagcggcggcagcggcagcggcggcgagaagcccagcggccccgtgcccagaagcagactggaccccgccaaggtgctgggcaccgccctgtgccccagaatccacgaggtgcccctgctggagcccctggtgtgcaagaagatcgcccaggagagactgaccgtgctgctgttcctggaggactgcatcatcaccgcctgccaggagggcctgatctgcacctgggccagacccggcaaggccttcaccgacgaggagaccgaggcccagaccggcgagggcagctggcccagaagccccagcaagagcgtggtggagggcatcagcagccagcccggcaacagccccagcggcaccgtggtgtag

SEQ ID NO: 79979 - DNA, 1890 bp, synthetic construct
  misc_feature 1..1890: note = Description of Artificial Sequence: Synthetic coding sequence
  source 1..1890: mol_type = other DNA
atgagcgccgaggtgagactgagaagactgcagcagctggtgctggaccccggcttcctgggcctggagcccctgctggacctgctgctgggcgtgcaccaggagctgggcgccagcgagctggcccaggacaagtacgtggccgacttcctgcagtgggccgagcccatcgtggtgagactgaaggaggtgagactgcagagagacgacttcgagatcctgaaggtgatcggcagaggcgccttcagcgaggtggccgtggtgaagatgaagcagaccggccaggtgtacgccatgaagatcatgaacaagtgggacatgctgaagagaggcgaggtgagctgcttcagagaggagagagacgtgctggtgaacggcgacagaagatggatcacccagctgcacttcgccttccaggacgagaactacctgtacctggtgatggagtactacgtgggcggcgacctgctgaccctgctgagcaagttcggcgagagaatccccgccgagatggccagattctacctggccgagatcgtgatggccatcgacagcgtgcacagactgggctacgtgcacagagacatcaagcccgacaacatcctgctggacagatgcggccacatcagactggccgacttcggcagctgcctgaagctgagagccgacggcaccgtgagaagcctggtggccgtgggcacccccgactacctgagccccgagatcctgcaggccgtgggcggcggccccggcaccggcagctacggccccgagtgcgactggtgggccctgggcgtgttcgcctacgagatgttctacggccagacccccttctacgccgacagcaccgccgagacctacggcaagatcgtgcactacaaggagcacctgagcctgcccctggtggacgagggcgtgcccgaggaggccagagacttcatccagagactgctgtgcccccccgagaccagactgggcagaggcggcgccggcgacttcagaacccaccccttcttcttcggcctggactgggacggcctgagagacagcgtgccccccttcacccccgacttcgagggcgccaccgacacctgcaacttcgacctggtggaggacggcctgaccgccatggtgagcggcggcggcgagaccctgagcgacatcagagagggcgcccccctgggcgtgcacctgcccttcgtgggctacagctacagctgcatggccctgagagacagcgaggtgcccggccccacccccatggagctggaggccgagcagctgctggagccccacgtgcaggcccccagcctggagcccagcgtgagcccccaggacgagaccgccgaggtggccgtgcccgccgccgtgcccgccgccgaggccgaggccgaggtgaccctgagagagctgcaggaggccctggaggaggaggtgctgaccagacagagcctgagcagagagatggaggccatcagaaccgacaaccagaacttcgccagccagctgagagaggccgaggccagaaacagagacctggaggcccacgtgagacagctgcaggagagaatggagctgctgcaggccgagggcgccaccgccgtgaccggcgtgcccagccccagagccaccgacccccccagccacctggacggcccccccgccgtggccgtgggccagtgccccctggtgggccccggccccatgcacagaagacacctgctgctgcccgccagagtgcccagacccggcctgagcgaggccctgagcctgctgctgttcgccgtggtgctgagcagagccgccgccctgggctgcatcggcctggtggcccacgccggccagctgaccgccgtgtggagaagacccggcgccgccagagccccctag

SEQ ID NO: 79980 - DNA, 1968 bp, synthetic construct
  misc_feature 1..1968: note = Description of Artificial Sequence: Synthetic coding sequence
  source 1..1968: mol_type = other DNA
atggtgctgcccgtgcagcacgtgagcagaggcgccgccgaggccgcccccgccgccggcgtgggccccggcctgcccggcgccggcgcccccgccagacccagccccggcagaccccccggcgccggcagactgagaaccggccccggccaggtgagaggcagactgctggccgtgggccccaagagcagagtgttccagagcgtggtgcaggagccccccgccagcgagagcagagccgagcccatcgtggtgagactgaaggaggtgagactgcagagagacgacttcgagatcctgaaggtgatcggcagaggcgccttcagcgaggtggccgtggtgaagatgaagcagaccggccaggtgtacgccatgaagatcatgaacaagtgggacatgctgaagagaggcgaggtgagctgcttcagagaggagagagacgtgctggtgaacggcgacagaagatggatcacccagctgcacttcgccttccaggacgagaactacctgtacctggtgatggagtactacgtgggcggcgacctgctgaccctgctgagcaagttcggcgagagaatccccgccgagatggccagattctacctggccgagatcgtgatggccatcgacagcgtgcacagactgggctacgtgcacagagacatcaagcccgacaacatcctgctggacagatgcggccacatcagactggccgacttcggcagctgcctgaagctgagagccgacggcaccgtgagaagcctggtggccgtgggcacccccgactacctgagccccgagatcctgcaggccgtgggcggcggccccggcaccggcagctacggccccgagtgcgactggtgggccctgggcgtgttcgcctacgagatgttctacggccagacccccttctacgccgacagcaccgccgagacctacggcaagatcgtgcactacaaggagcacctgagcctgcccctggtggacgagggcgtgcccgaggaggccagagacttcatccagagactgctgtgcccccccgagaccagactgggcagaggcggcgccggcgacttcagaacccaccccttcttcttcggcctggactgggacggcctgagagacagcgtgccccccttcacccccgacttcgagggcgccaccgacacctgcaacttcgacctggtggaggacggcctgaccgccatggtgagcggcggcggcgagaccctgagcgacatcagagagggcgcccccctgggcgtgcacctgcccttcgtgggctacagctacagctgcatggccctgagagacagcgaggtgcccggccccacccccatggagctggaggccgagcagctgctggagccccacgtgcaggcccccagcctggagcccagcgtgagcccccaggacgagaccgccgaggtggccgtgcccgccgccgtgcccgccgccgaggccgaggccgaggtgaccctgagagagctgcaggaggccctggaggaggaggtgctgaccagacagagcctgagcagagagatggaggccatcagaaccgacaaccagaacttcgccagccagctgagagaggccgaggccagaaacagagacctggaggcccacgtgagacagctgcaggagagaatggagctgctgcaggccgagggcgccaccgccgtgaccggcgtgcccagccccagagccaccgacccccccagccacctggacggcccccccgccgtggccgtgggccagtgccccctggtgggccccggccccatgcacagaagacacctgctgctgcccgccagagtgcccagacccggcctgagcgaggccctgagcctgctgctgttcgccgtggtgctgagcagagccgccgccctgggctgcatcggcctggtggcccacgccggccagctgaccgccgtgtggagaagacccggcgccgccagagccccctag

SEQ ID NO: 79981 - DNA, 1920 bp, synthetic construct
  misc_feature 1..1920: note = Description of Artificial Sequence: Synthetic coding sequence
  source 1..1920: mol_type = other DNA
atgggcggccacttctggccccccgagccctacaccgtgttcatgtggggcagcccctgggaggccgacagccccagagtgaagctgagaggcagagagaagggcagacagaccgagggcggcgccttccccctggtgagcagcgccctgagcggcgaccccagattcttcagccccaccaccccccccgccgagcccatcgtggtgagactgaaggaggtgagactgcagagagacgacttcgagatcctgaaggtgatcggcagaggcgccttcagcgaggtggccgtggtgaagatgaagcagaccggccaggtgtacgccatgaagatcatgaacaagtgggacatgctgaagagaggcgaggtgagctgcttcagagaggagagagacgtgctggtgaacggcgacagaagatggatcacccagctgcacttcgccttccaggacgagaactacctgtacctggtgatggagtactacgtgggcggcgacctgctgaccctgctgagcaagttcggcgagagaatccccgccgagatggccagattctacctggccgagatcgtgatggccatcgacagcgtgcacagactgggctacgtgcacagagacatcaagcccgacaacatcctgctggacagatgcggccacatcagactggccgacttcggcagctgcctgaagctgagagccgacggcaccgtgagaagcctggtggccgtgggcacccccgactacctgagccccgagatcctgcaggccgtgggcggcggccccggcaccggcagctacggccccgagtgcgactggtgggccctgggcgtgttcgcctacgagatgttctacggccagacccccttctacgccgacagcaccgccgagacctacggcaagatcgtgcactacaaggagcacctgagcctgcccctggtggacgagggcgtgcccgaggaggccagagacttcatccagagactgctgtgcccccccgagaccagactgggcagaggcggcgccggcgacttcagaacccaccccttcttcttcggcctggactgggacggcctgagagacagcgtgccccccttcacccccgacttcgagggcgccaccgacacctgcaacttcgacctggtggaggacggcctgaccgccatggtgagcggcggcggcgagaccctgagcgacatcagagagggcgcccccctgggcgtgcacctgcccttcgtgggctacagctacagctgcatggccctgagagacagcgaggtgcccggccccacccccatggagctggaggccgagcagctgctggagccccacgtgcaggcccccagcctggagcccagcgtgagcccccaggacgagaccgccgaggtggccgtgcccgccgccgtgcccgccgccgaggccgaggccgaggtgaccctgagagagctgcaggaggccctggaggaggaggtgctgaccagacagagcctgagcagagagatggaggccatcagaaccgacaaccagaacttcgccagccagctgagagaggccgaggccagaaacagagacctggaggcccacgtgagacagctgcaggagagaatggagctgctgcaggccgagggcgccaccgccgtgaccggcgtgcccagccccagagccaccgacccccccagccacctggacggcccccccgccgtggccgtgggccagtgccccctggtgggccccggccccatgcacagaagacacctgctgctgcccgccagagtgcccagacccggcctgagcgaggccctgagcctgctgctgttcgccgtggtgctgagcagagccgccgccctgggctgcatcggcctggtggcccacgccggccagctgaccgccgtgtggagaagacccggcgccgccagagccccctag

SEQ ID NO: 79982 - DNA, 1830 bp, synthetic construct
  misc_feature 1..1830: note = Description of Artificial Sequence: Synthetic coding sequence
  source 1..1830: mol_type = other DNA
atgggcggccacttctggccccccgagccctacaccgtgttcatgtggggcagcccctgggaggccgacagccccagagtgaagctgagaggcagagagaagggcagacagaccgagggcggcgccttccccctggtgagcagcgccctgagcggcgaccccagattcttcagccccaccaccccccccgccgagcccatcgtggtgagactgaaggaggtgagactgcagagagacgacttcgagatcctgaaggtgatcggcagaggcgccttcagcgaggtggccgtggtgaagatgaagcagaccggccaggtgtacgccatgaagatcatgaacaagtgggacatgctgaagagaggcgaggtgagctgcttcagagaggagagagacgtgctggtgaacggcgacagaagatggatcacccagctgcacttcgccttccaggacgagaactacctgtacctggtgatggagtactacgtgggcggcgacctgctgaccctgctgagcaagttcggcgagagaatccccgccgagatggccagattctacctggccgagatcgtgatggccatcgacagcgtgcacagactgggctacgtgcacagagacatcaagcccgacaacatcctgctggacagatgcggccacatcagactggccgacttcggcagctgcctgaagctgagagccgacggcaccgtgagaagcctggtggccgtgggcacccccgactacctgagccccgagatcctgcaggccgtgggcggcggccccggcaccggcagctacggccccgagtgcgactggtgggccctgggcgtgttcgcctacgagatgttctacggccagacccccttctacgccgacagcaccgccgagacctacggcaagatcgtgcactacaaggagcacctgagcctgcccctggtggacgagggcgtgcccgaggaggccagagacttcatccagagactgctgtgcccccccgagaccagactgggcagaggcggcgccggcgacttcagaacccaccccttcttcttcggcctggactgggacggcctgagagacagcgtgccccccttcacccccgacttcgagggcgccaccgacacctgcaacttcgacctggtggaggacggcctgaccgccatggtgagcggcggcggcgagaccctgagcgacatcagagagggcgcccccctgggcgtgcacctgcccttcgtgggctacagctacagctgcatggccctgagagacagcgaggtgcccggccccacccccatggagctggaggccgagcagctgctggagccccacgtgcaggcccccagcctggagcccagcgtgagcccccaggacgagaccgccgaggtggccgtgcccgccgccgtgcccgccgccgaggccgaggccgaggtgaccctgagagagctgcaggaggccctggaggaggaggtgctgaccagacagagcctgagcagagagatggaggccatcagaaccgacaaccagaacttcgccagccagctgagagaggccgaggccagaaacagagacctggaggcccacgtgagacagctgcaggagagaatggagctgctgcaggccgagggcgccaccgccgtgaccggcgtgcccagccccagagccaccgacccccccagccacgtgcccagacccggcctgagcgaggccctgagcctgctgctgttcgccgtggtgctgagcagagccgccgccctgggctgcatcggcctggtggcccacgccggccagctgaccgccgtgtggagaagacccggcgccgccagagccccctag

SEQ ID NO: 79983 - DNA, 1593 bp, synthetic construct
  misc_feature 1..1593: note = Description of Artificial Sequence: Synthetic coding sequence
  source 1..1593: mol_type = other DNA
atgagcgccgaggtgagactgagaagactgcagcagctggtgctggaccccggcttcctgggcctggagcccctgctggacctgctgctgggcgtgcaccaggagctgggcgccagcgagctggcccaggacaagtacgtggccgacttcctgcagtgggccgagcccatcgtggtgagactgaaggaggtgagactgcagagagacgacttcgagatcctgaaggtgatcggcagaggcgccttcagcgaggtggccgtggtgaagatgaagcagaccggccaggtgtacgccatgaagatcatgaacaagtgggacatgctgaagagaggcgaggtgagctgcttcagagaggagagagacgtgctggtgaacggcgacagaagatggatcacccagctgcacttcgccttccaggacgagaactacctgtacctggtgatggagtactacgtgggcggcgacctgctgaccctgctgagcaagttcggcgagagaatccccgccgagatggccagattctacctggccgagatcgtgatggccatcgacagcgtgcacagactgggctacgtgcacagagacatcaagcccgacaacatcctgctggacagatgcggccacatcagactggccgacttcggcagctgcctgaagctgagagccgacggcaccgtgagaagcctggtggccgtgggcacccccgactacctgagccccgagatcctgcaggccgtgggcggcggccccggcaccggcagctacggccccgagtgcgactggtgggccctgggcgtgttcgcctacgagatgttctacggccagacccccttctacgccgacagcaccgccgagacctacggcaagatcgtgcactacaaggagcacctgagcctgcccctggtggacgagggcgtgcccgaggaggccagagacttcatccagagactgctgtgcccccccgagaccagactgggcagaggcggcgccggcgacttcagaacccaccccttcttcttcggcctggactgggacggcctgagagacagcgtgccccccttcacccccgacttcgagggcgccaccgacacctgcaacttcgacctggtggaggacggcctgaccgccatggagaccctgagcgacatcagagagggcgcccccctgggcgtgcacctgcccttcgtgggctacagctacagctgcatggccctgagagacagcgaggtgcccggccccacccccatggagctggaggccgagcagctgctggagccccacgtgcaggcccccagcctggagcccagcgtgagcccccaggacgagaccgccgaggtggccgtgcccgccgccgtgcccgccgccgaggccgaggccgaggtgaccctgagagagctgcaggaggccctggaggaggaggtgctgaccagacagagcctgagcagagagatggaggccatcagaaccgacaaccagaacttcgccagccagctgagagaggccgaggccagaaacagagacctggaggcccacgtgagacagctgcaggagagaatggagctgctgcaggccgagggcgccaccggcccctag

SEQ ID NO: 79984 - DNA, 1866 bp, synthetic construct
  misc_feature 1..1866: note = Description of Artificial Sequence: Synthetic coding sequence
  source 1..1866: mol_type = other DNA
atgagcgccgaggtgagactgagaagactgcagcagctggtgctggaccccggcttcctgggcctggagcccctgctggacctgctgctgggcgtgcaccaggagctgggcgccagcgagctggcccaggacaagtacgtggccgacttcctgcagtgggccgagcccatcgtggtgagactgaaggaggtgagactgcagagagacgacttcgagatcctgaaggtgatcggcagaggcgccttcagcgaggtggccgtggtgaagatgaagcagaccggccaggtgtacgccatgaagatcatgaacaagtgggacatgctgaagagaggcgaggtgagctgcttcagagaggagagagacgtgctggtgaacggcgacagaagatggatcacccagctgcacttcgccttccaggacgagaactacctgtacctggtgatggagtactacgtgggcggcgacctgctgaccctgctgagcaagttcggcgagagaatccccgccgagatggccagattctacctggccgagatcgtgatggccatcgacagcgtgcacagactgggctacgtgcacagagacatcaagcccgacaacatcctgctggacagatgcggccacatcagactggccgacttcggcagctgcctgaagctgagagccgacggcaccgtgagaagcctggtggccgtgggcacccccgactacctgagccccgagatcctgcaggccgtgggcggcggccccggcaccggcagctacggccccgagtgcgactggtgggccctgggcgtgttcgcctacgagatgttctacggccagacccccttctacgccgacagcaccgccgagacctacggcaagatcgtgcactacaaggagcacctgagcctgcccctggtggacgagggcgtgcccgaggaggccagagacttcatccagagactgctgtgcccccccgagaccagactgggcagaggcggcgccggcgacttcagaacccaccccttcttcttcggcctggactgggacggcctgagagacagcgtgccccccttcacccccgacttcgagggcgccaccgacacctgcaacttcgacctggtggaggacggcctgaccgccatggagaccctgagcgacatcagagagggcgcccccctgggcgtgcacctgcccttcgtgggctacagctacagctgcatggccctgagagacagcgaggtgcccggccccacccccatggagctggaggccgagcagctgctggagccccacgtgcaggcccccagcctggagcccagcgtgagcccccaggacgagaccgccgaggtggccgtgcccgccgccgtgcccgccgccgaggccgaggccgaggtgaccctgagagagctgcaggaggccctggaggaggaggtgctgaccagacagagcctgagcagagagatggaggccatcagaaccgacaaccagaacttcgccagccagctgagagaggccgaggccagaaacagagacctggaggcccacgtgagacagctgcaggagagaatggagctgctgcaggccgagggcgccaccgccgtgaccggcgtgcccagccccagagccaccgacccccccagccacctggacggccccccctggctgtgggccagcgccagatggtggggccagatgcacagaagacacctgctgctgcccgccagagtgcccagacccggcctgagcgaggccctgagcctgctgctgttcgccgtggtgctgagcagagccgccgccctgggctgcatcggcctggtggcccacgccggccagctgaccgccgtgtggagaagacccggcgccgccagagccccctag

SEQ ID NO: 79985 - DNA, 1875 bp, synthetic construct
  misc_feature 1..1875: note = Description of Artificial Sequence: Synthetic coding sequence
  source 1..1875: mol_type = other DNA
atgagcgccgaggtgagactgagaagactgcagcagctggtgctggaccccggcttcctgggcctggagcccctgctggacctgctgctgggcgtgcaccaggagctgggcgccagcgagctggcccaggacaagtacgtggccgacttcctgcagtgggccgagcccatcgtggtgagactgaaggaggtgagactgcagagagacgacttcgagatcctgaaggtgatcggcagaggcgccttcagcgaggtggccgtggtgaagatgaagcagaccggccaggtgtacgccatgaagatcatgaacaagtgggacatgctgaagagaggcgaggtgagctgcttcagagaggagagagacgtgctggtgaacggcgacagaagatggatcacccagctgcacttcgccttccaggacgagaactacctgtacctggtgatggagtactacgtgggcggcgacctgctgaccctgctgagcaagttcggcgagagaatccccgccgagatggccagattctacctggccgagatcgtgatggccatcgacagcgtgcacagactgggctacgtgcacagagacatcaagcccgacaacatcctgctggacagatgcggccacatcagactggccgacttcggcagctgcctgaagctgagagccgacggcaccgtgagaagcctggtggccgtgggcacccccgactacctgagccccgagatcctgcaggccgtgggcggcggccccggcaccggcagctacggccccgagtgcgactggtgggccctgggcgtgttcgcctacgagatgttctacggccagacccccttctacgccgacagcaccgccgagacctacggcaagatcgtgcactacaaggagcacctgagcctgcccctggtggacgagggcgtgcccgaggaggccagagacttcatccagagactgctgtgcccccccgagaccagactgggcagaggcggcgccggcgacttcagaacccaccccttcttcttcggcctggactgggacggcctgagagacagcgtgccccccttcacccccgacttcgagggcgccaccgacacctgcaacttcgacctggtggaggacggcctgaccgccatggagaccctgagcgacatcagagagggcgcccccctgggcgtgcacctgcccttcgtgggctacagctacagctgcatggccctgagagacagcgaggtgcccggccccacccccatggagctggaggccgagcagctgctggagccccacgtgcaggcccccagcctggagcccagcgtgagcccccaggacgagaccgccgaggtggccgtgcccgccgccgtgcccgccgccgaggccgaggccgaggtgaccctgagagagctgcaggaggccctggaggaggaggtgctgaccagacagagcctgagcagagagatggaggccatcagaaccgacaaccagaacttcgccagccagctgagagaggccgaggccagaaacagagacctggaggcccacgtgagacagctgcaggagagaatggagctgctgcaggccgagggcgccaccgccgtgaccggcgtgcccagccccagagccaccgacccccccagccacctggacggcccccccgccgtggccgtgggccagtgccccctggtgggccccggccccatgcacagaagacacctgctgctgcccgccagagtgcccagacccggcctgagcgaggccctgagcctgctgctgttcgccgtggtgctgagcagagccgccgccctgggctgcatcggcctggtggcccacgccggccagctgaccgccgtgtggagaagacccggcgccgccagagccccctag

SEQ ID NO: 79986 - DNA, 1878 bp, synthetic construct
  misc_feature 1..1878: note = Description of Artificial Sequence: Synthetic coding sequence
  source 1..1878: mol_type = other DNA
atgagcgccgaggtgagactgagaagactgcagcagctggtgctggaccccggcttcctgggcctggagcccctgctggacctgctgctgggcgtgcaccaggagctgggcgccagcgagctggcccaggacaagtacgtggccgacttcctgcagtgggccgagcccatcgtggtgagactgaaggaggtgagactgcagagagacgacttcgagatcctgaaggtgatcggcagaggcgccttcagcgaggtggccgtggtgaagatgaagcagaccggccaggtgtacgccatgaagatcatgaacaagtgggacatgctgaagagaggcgaggtgagctgcttcagagaggagagagacgtgctggtgaacggcgacagaagatggatcacccagctgcacttcgccttccaggacgagaactacctgtacctggtgatggagtactacgtgggcggcgacctgctgaccctgctgagcaagttcggcgagagaatccccgccgagatggccagattctacctggccgagatcgtgatggccatcgacagcgtgcacagactgggctacgtgcacagagacatcaagcccgacaacatcctgctggacagatgcggccacatcagactggccgacttcggcagctgcctgaagctgagagccgacggcaccgtgagaagcctggtggccgtgggcacccccgactacctgagccccgagatcctgcaggccgtgggcggcggccccggcaccggcagctacggccccgagtgcgactggtgggccctgggcgtgttcgcctacgagatgttctacggccagacccccttctacgccgacagcaccgccgagacctacggcaagatcgtgcactacaaggagcacctgagcctgcccctggtggacgagggcgtgcccgaggaggccagagacttcatccagagactgctgtgcccccccgagaccagactgggcagaggcggcgccggcgacttcagaacccaccccttcttcttcggcctggactgggacggcctgagagacagcgtgccccccttcacccccgacttcgagggcgccaccgacacctgcaacttcgacctggtggaggacggcctgaccgccatggagaccctgagcgacatcagagagggcgcccccctgggcgtgcacctgcccttcgtgggctacagctacagctgcatggccctgagagacagcgaggtgcccggccccacccccatggagctggaggccgagcagctgctggagccccacgtgcaggcccccagcctggagcccagcgtgagcccccaggacgagaccgccgaggtggccgtgcccgccgccgtgcccgccgccgaggccgaggccgaggtgaccctgagagagctgcaggaggccctggaggaggaggtgctgaccagacagagcctgagcagagagatggaggccatcagaaccgacaaccagaacttcgccagccagctgagagaggccgaggccagaaacagagacctggaggcccacgtgagacagctgcaggagagaatggagctgctgcaggccgagggcgccaccgccgtgaccggcgtgcccagccccagagccaccgacccccccagccacatggcccccagaccctggctgtgggccagcgccagatggtggggccaggccccctgcaccgccgccacctgctgcagcctgcccggcagcctgggcctggcctacagaagaagattcccctgcagctgcagccccctgttctgcctggtgccccccccctgggccgccctgggctggtggcccacccccgccaacagcccccagagcggcgccgcccaggagccccccgccctgcccgagccctag

SEQ ID NO: 79987 - DNA, 129 bp, synthetic construct
  misc_feature 1..129: note = Description of Artificial Sequence: Synthetic coding sequence
  source 1..129: mol_type = other DNA
atggagctgctgcaggccgagggcgccaccgccagatggccccccggcagaggctgcggccccgtgcccgccggcggcgccagaccccacgccccccccccccccgccgccccctgccagggcccctag

SEQ ID NO: 79988 - DNA, 3402 bp, synthetic construct
  misc_feature 1..3402: note = Description of Artificial Sequence: Synthetic coding sequence
  source 1..3402: mol_type = other DNA
atgcccagcagcctgatgctggaggtgcccgccctggccgacttcaacagagcctggaccgagctgaccgactggctgagcctgctggaccaggtgatcaagagccagagagtgatggtgggcgacctggaggacatcaacgagatgatcatcaagcagaaggccaccatgcaggacctggagcagagaagaccccagctggaggagctgatcaccgccgcccagaacctgaagaacaagaccagcaaccaggaggccagaaccatcatcaccgacagaatcgagagaatccagaaccagtgggacgaggtgcaggagcacctgcagaacagaagacagcagctgaacgagatgctgaaggacagcacccagtggctggaggccaaggaggaggccgagcaggtgctgggccaggccagagccaagctggagagctggaaggagggcccctacaccgtggacgccatccagaagaagatcaccgagaccaagcagctggccaaggacctgagacagtggcagaccaacgtggacgtggccaacgacctggccctgaagctgctgagagactacagcgccgacgacaccagaaaggtgcacatgatcaccgagaacatcaacgccagctggagaagcatccacaagagagtgagcgagagagaggccgccctggaggagacccacagactgctgcagcagttccccctggacctggagaagttcctggcctggctgaccgaggccgagaccaccgccaacgtgctgcaggacgccaccagaaaggagagactgctggaggacagcaagggcgtgaaggagctgatgaagcagtggcaggacctgcagggcgagatcgaggcccacaccgacgtgtaccacaacctggacgagaacagccagaagatcctgagaagcctggagggcagcgacgacgccgtgctgctgcagagaagactggacaacatgaacttcaagtggagcgagctgagaaagaagagcctgaacatcagaagccacctggaggccagcagcgaccagtggaagagactgcacctgagcctgcaggagctgctggtgtggctgcagctgaaggacgacgagctgagcagacaggcccccatcggcggcgacttccccgccgtgcagaagcagaacgacgtgcacagagccttcaagagagagctgaagaccaaggagcccgtgatcatgagcaccctggagaccgtgagaatcttcctgaccgagcagcccctggagggcctggagaagctgtaccaggagcccagagagctgccccccgaggagagagcccagaacgtgaccagactgctgagaaagcaggccgaggaggtgaacaccgagtgggagaagctgaacctgcacagcgccgactggcagagaaagatcgacgagaccctggagagactgagagagctgcaggaggccaccgacgagctggacctgaagctgagacaggccgaggtgatcaagggcagctggcagcccgtgggcgacctgctgatcgacagcctgcaggaccacctggagaaggtgaaggccctgagaggcgagatcgcccccctgaaggagaacgtgagccacgtgaacgacctggccagacagctgaccaccctgggcatccagctgagcccctacaacctgagcaccctggaggacctgaacaccagatggaagctgctgcaggtggccgtggaggacagagtgagacagctgcacgaggcccacagagacttcggccccgccagccagcacttcctgagcaccagcgtgcagggcccctgggagagagccatcagccccaacaaggtgccctactacatcaaccacgagacccagaccacctgctgggaccaccccaagatgaccgagctgtaccagagcctggccgacctgaacaacgtgagattcagcgcctacagaaccgccatgaagctgagaagactgcagaaggccctgtgcctggacctgctgagcctgagcgccgcctgcgacgccctggaccagcacaacctgaagcagaacgaccagcccatggacatcctgcagatcatcaactgcctgaccaccatctacgacagactggagcaggagcacaacaacctggtgaacgtgcccctgtgcgtggacatgtgcctgaactggctgctgaacgtgtacgacaccggcagaaccggcagaatcagagtgctgagcttcaagaccggcatcatcagcctgtgcaaggcccacctggaggacaagtacagatacctgttcaagcaggtggccagcagcaccggcttctgcgaccagagaagactgggcctgctgctgcacgacagcatccagatccccagacagctgggcgaggtggccagcttcggcggcagcaacatcgagcccagcgtgagaagctgcttccagttcgccaacaacaagcccgagatcgaggccgccctgttcctggactggatgagactggagccccagagcatggtgtggctgcccgtgctgcacagagtggccgccgccgagaccgccaagcaccaggccaagtgcaacatctgcaaggagtgccccatcatcggcttcagatacagaagcctgaagcacttcaactacgacatctgccagagctgcttcttcagcggcagagtggccaagggccacaagatgcactaccccatggtggagtactgcacccccaccaccagcggcgaggacgtgagagacttcgccaaggtgctgaagaacaagttcagaaccaagagatacttcgccaagcaccccagaatgggctacctgcccgtgcagaccgtgctggagggcgacaacatggagaccaacctgcaggccgagtacgacagactgaagcagcagcacgagcacaagggcctgagccccctgcccagcccccccgagatgatgcccaccagcccccagagccccagagacgccgagctgatcgccgaggccaagctgctgagacagcacaagggcagactggaggccagaatgcagatcctggaggaccacaacaagcagctggagagccagctgcacagactgagacagctgctggagcagccccaggccgaggccaaggtgaacggcaccaccgtgagcagccccagcaccagcctgcagagaagcgacagcagccagcccatgctgctgagagtggtgggcagccagaccagcgacagcatgggcgaggaggacctgctgagccccccccaggacaccagcaccggcctggaggaggtgatggagcagctgaacaacagcttccccagcagcagaggccacaacgtgggcagcctgttccacatggccgacgacctgggcagagccatggagagcctggtgagcgtgatgaccgacgaggagggcgccgagtag

SEQ ID NO: 79989 - DNA, 11058 bp, synthetic construct
  misc_feature 1..11058: note = Description of Artificial Sequence: Synthetic coding sequence
  source 1..11058: mol_type = other DNA
atgctgtggtgggaggaggtggaggactgctacgagagagaggacgtgcagaagaagaccttcaccaagtgggtgaacgcccagttcagcaagttcggcaagcagcacatcgagaacctgttcagcgacctgcaggacggcagaagactgctggacctgctggagggcctgaccggccagaagctgcccaaggagaagggcagcaccagagtgcacgccctgaacaacgtgaacaaggccctgagagtgctgcagaacaacaacgtggacctggtgaacatcggcagcaccgacatcgtggacggcaaccacaagctgaccctgggcctgatctggaacatcatcctgcactggcaggtgaagaacgtgatgaagaacatcatggccggcctgcagcagaccaacagcgagaagatcctgctgagctgggtgagacagagcaccagaaactacccccaggtgaacgtgatcaacttcaccaccagctggagcgacggcctggccctgaacgccctgatccacagccacagacccgacctgttcgactggaacagcgtggtgtgccagcagagcgccacccagagactggagcacgccttcaacatcgccagataccagctgggcatcgagaagctgctggaccccgaggacgtggacaccacctaccccgacaagaagagcatcctgatgtacatcaccagcctgttccaggtgctgccccagcaggtgagcatcgaggccatccaggaggtggagatgctgcccagaccccccaaggtgaccaaggaggagcacttccagctgcaccaccagatgcactacagccagcagatcaccgtgagcctggcccagggctacgagagaaccagcagccccaagcccagattcaagagctacgcctacacccaggccgcctacgtgaccaccagcgaccccaccagaagccccttccccagccagcacctggaggcccccgaggacaagagcttcggcagcagcctgatggagagcgaggtgaacctggacagataccagaccgccctggaggaggtgctgagctggctgctgagcgccgaggacaccctgcaggcccagggcgagatcagcaacgacgtggaggtggtgaaggaccagttccacacccacgagggctacatgatggacctgaccgcccaccagggcagagtgggcaacatcctgcagctgggcagcaagctgatcggcaccggcaagctgagcgaggacgaggagaccgaggtgcaggagcagatgaacctgctgaacagcagatgggagtgcctgagagtggccagcatggagaagcagagcaacctgcacagagtgctgatggacctgcagaaccagaagctgaaggagctgaacgactggctgaccaagaccgaggagagaaccagaaagatggaggaggagcccctgggccccgacctggaggacctgaagagacaggtgcagcagcacaaggtgctgcaggaggacctggagcaggagcaggtgagagtgaacagcctgacccacatggtggtggtggtggacgagagcagcggcgaccacgccaccgccgccctggaggagcagctgaaggtgctgggcgacagatgggccaacatctgcagatggaccgaggacagatgggtgctgctgcaggacatcctgctgaagtggcagagactgaccgaggagcagtgcctgttcagcgcctggctgagcgagaaggaggacgccgtgaacaagatccacaccaccggcttcaaggaccagaacgagatgctgagcagcctgcagaagctggccgtgctgaaggccgacctggagaagaagaagcagagcatgggcaagctgtacagcctgaagcaggacctgctgagcaccctgaagaacaagagcgtgacccagaagaccgaggcctggctggacaacttcgccagatgctgggacaacctggtgcagaagctggagaagagcaccgcccagatcagccaggccgtgaccaccacccagcccagcctgacccagaccaccgtgatggagaccgtgaccaccgtgaccaccagagagcagatcctggtgaagcacgcccaggaggagctgccccccccccccccccagaagaagagacagatcaccgtggacagcgagatcagaaagagactggacgtggacatcaccgagctgcacagctggatcaccagaagcgaggccgtgctgcagagccccgagttcgccatcttcagaaaggagggcaacttcagcgacctgaaggagaaggtgaacgccatcgagagagagaaggccgagaagttcagaaagctgcaggacgccagcagaagcgcccaggccctggtggagcagatggtgaacgagggcgtgaacgccgacagcatcaagcaggccagcgagcagctgaacagcagatggatcgagttctgccagctgctgagcgagagactgaactggctggagtaccagaacaacatcatcgccttctacaaccagctgcagcagctggagcagatgaccaccaccgccgagaactggctgaagatccagcccaccacccccagcgagcccaccgccatcaagagccagctgaagatctgcaaggacgaggtgaacagactgagcgacctgcagccccagatcgagagactgaagatccagagcatcgccctgaaggagaagggccagggccccatgttcctggacgccgacttcgtggccttcaccaaccacttcaagcaggtgttcagcgacgtgcaggccagagagaaggagctgcagaccatcttcgacaccctgccccccatgagataccaggagaccatgagcgccatcagaacctgggtgcagcagagcgagaccaagctgagcatcccccagctgagcgtgaccgactacgagatcatggagcagagactgggcgagctgcaggccctgcagagcagcctgcaggagcagcagagcggcctgtactacctgagcaccaccgtgaaggagatgagcaagaaggcccccagcgagatcagcagaaagtaccagagcgagttcgaggagatcgagggcagatggaagaagctgagcagccagctggtggagcactgccagaagctggaggagcagatgaacaagctgagaaagatccagaaccacatccagaccctgaagaagtggatggccgaggtggacgtgttcctgaaggaggagtggcccgccctgggcgacagcgagatcctgaagaagcagctgaagcagtgcagactgctggtgagcgacatccagaccatccagcccagcctgaacagcgtgaacgagggcggccagaagatcaagaacgaggccgagcccgagttcgccagcagactggagaccgagctgaaggagctgaacacccagtgggaccacatgtgccagcaggtgtacgccagaaaggaggccctgaagggcggcctggagaagaccgtgagcctgcagaaggacctgagcgagatgcacgagtggatgacccaggccgaggaggagtacctggagagagacttcgagtacaagacccccgacgagctgcagaaggccgtggaggagatgaagagagccaaggaggaggcccagcagaaggaggccaaggtgaagctgctgaccgagagcgtgaacagcgtgatcgcccaggccccccccgtggcccaggaggccctgaagaaggagctggagaccctgaccaccaactaccagtggctgtgcaccagactgaacggcaagtgcaagaccctggaggaggtgtgggcctgctggcacgagctgctgagctacctggagaaggccaacaagtggctgaacgaggtggagttcaagctgaagaccaccgagaacatccccggcggcgccgaggagatcagcgaggtgctggacagcctggagaacctgatgagacacagcgaggacaaccccaaccagatcagaatcctggcccagaccctgaccgacggcggcgtgatggacgagctgatcaacgaggagctggagaccttcaacagcagatggagagagctgcacgaggaggccgtgagaagacagaagctgctggagcagagcatccagagcgcccaggagaccgagaagagcctgcacctgatccaggagagcctgaccttcatcgacaagcagctggccgcctacatcgccgacaaggtggacgccgcccagatgccccaggaggcccagaagatccagagcgacctgaccagccacgagatcagcctggaggagatgaagaagcacaaccagggcaaggaggccgcccagagagtgctgagccagatcgacgtggcccagaagaagctgcaggacgtgagcatgaagttcagactgttccagaagcccgccaacttcgagcagagactgcaggagagcaagatgatcctggacgaggtgaagatgcacctgcccgccctggagaccaagagcgtggagcaggaggtggtgcagagccagctgaaccactgcgtgaacctgtacaagagcctgagcgaggtgaagagcgaggtggagatggtgatcaagaccggcagacagatcgtgcagaagaagcagaccgagaaccccaaggagctggacgagagagtgaccgccctgaagctgcactacaacgagctgggcgccaaggtgaccgagagaaagcagcagctggagaagtgcctgaagctgagcagaaagatgagaaaggagatgaacgtgctgaccgagtggctggccgccaccgacatggagctgaccaagagaagcgccgtggagggcatgcccagcaacctggacagcgaggtggcctggggcaaggccacccagaaggagatcgagaagcagaaggtgcacctgaagagcatcaccgaggtgggcgaggccctgaagaccgtgctgggcaagaaggagaccctggtggaggacaagctgagcctgctgaacagcaactggatcgccgtgaccagcagagccgaggagtggctgaacctgctgctggagtaccagaagcacatggagaccttcgaccagaacgtggaccacatcaccaagtggatcatccaggccgacaccctgctggacgagagcgagaagaagaagccccagcagaaggaggacgtgctgaagagactgaaggccgagctgaacgacatcagacccaaggtggacagcaccagagaccaggccgccaacctgatggccaacagaggcgaccactgcagaaagctggtggagccccagatcagcgagctgaaccacagattcgccgccatcagccacagaatcaagaccggcaaggccagcatccccctgaaggagctggagcagttcaacagcgacatccagaagctgctggagcccctggaggccgagatccagcagggcgtgaacctgaaggaggaggacttcaacaaggacatgaacgaggacaacgagggcaccgtgaaggagctgctgcagagaggcgacaacctgcagcagagaatcaccgacgagagaaagagagaggagatcaagatcaagcagcagctgctgcagaccaagcacaacgccctgaaggacctgagaagccagagaagaaagaaggccctggagatcagccaccagtggtaccagtacaagagacaggccgacgacctgctgaagtgcctggacgacatcgagaagaagctggccagcctgcccgagcccagagacgagagaaagatcaaggagatcgacagagagctgcagaagaagaaggaggagctgaacgccgtgagaagacaggccgagggcctgagcgaggacggcgccgccatggccgtggagcccacccagatccagctgagcaagagatggagagagatcgagagcaagttcgcccagttcagaagactgaacttcgcccagatccacaccgtgagagaggagaccatgatggtgatgaccgaggacatgcccctggagatcagctacgtgcccagcacctacctgaccgagatcacccacgtgagccaggccctgctggaggtggagcagctgctgaacgcccccgacctgtgcgccaaggacttcgaggacctgttcaagcaggaggagagcctgaagaacatcaaggacagcctgcagcagagcagcggcagaatcgacatcatccacagcaagaagaccgccgccctgcagagcgccacccccgtggagagagtgaagctgcaggaggccctgagccagctggacttccagtgggagaaggtgaacaagatgtacaaggacagacagggcagattcgacagaagcgtggagaagtggagaagattccactacgacatcaagatcttcaaccagtggctgaccgaggccgagcagttcctgagaaagacccagatccccgagaactgggagcacgccaagtacaagtggtacctgaaggagctgcaggacggcatcggccagagacagaccgtggtgagaaccctgaacgccaccggcgaggagatcatccagcagagcagcaagaccgacgccagcatcctgcaggagaagctgggcagcctgaacctgagatggcaggaggtgtgcaagcagctgagcgacagaaagaagagactggaggagcagaagaacatcctgagcgagttccagagagacctgaacgagttcgtgctgtggctggaggaggccgacaacatcgccagcatccccctggagcccggcaaggagcagcagctgaaggagaagctggagcaggtgaagctgctggtggaggagctgcccctgagacagggcatcctgaagcagctgaacgagaccggcggccccgtgctggtgagcgcccccatcagccccgaggagcaggacaagctggagaacaagctgaagcagaccaacctgcagtggatcaaggtgagcagagccctgcccgagaagcagggcgagatcgaggcccagatcaaggacctgggccagctggagaagaagctggaggacctggaggagcagctgaaccacctgctgctgtggctgagccccatcagaaaccagctggagatctacaaccagcccaaccaggagggccccttcgacgtgaaggagaccgagatcgccgtgcaggccaagcagcccgacgtggaggagatcctgagcaagggccagcacctgtacaaggagaagcccgccacccagcccgtgaagagaaagctggaggacctgagcagcgagtggaaggccgtgaacagactgctgcaggagctgagagccaagcagcccgacctggcccccggcctgaccaccatcggcgccagccccacccagaccgtgaccctggtgacccagcccgtggtgaccaaggagaccgccatcagcaagctggagatgcccagcagcctgatgctggaggtgcccgccctggccgacttcaacagagcctggaccgagctgaccgactggctgagcctgctggaccaggtgatcaagagccagagagtgatggtgggcgacctggaggacatcaacgagatgatcatcaagcagaaggccaccatgcaggacctggagcagagaagaccccagctggaggagctgatcaccgccgcccagaacctgaagaacaagaccagcaaccaggaggccagaaccatcatcaccgacagaatcgagagaatccagaaccagtgggacgaggtgcaggagcacctgcagaacagaagacagcagctgaacgagatgctgaaggacagcacccagtggctggaggccaaggaggaggccgagcaggtgctgggccaggccagagccaagctggagagctggaaggagggcccctacaccgtggacgccatccagaagaagatcaccgagaccaagcagctggccaaggacctgagacagtggcagaccaacgtggacgtggccaacgacctggccctgaagctgctgagagactacagcgccgacgacaccagaaaggtgcacatgatcaccgagaacatcaacgccagctggagaagcatccacaagagagtgagcgagagagaggccgccctggaggagacccacagactgctgcagcagttccccctggacctggagaagttcctggcctggctgaccgaggccgagaccaccgccaacgtgctgcaggacgccaccagaaaggagagactgctggaggacagcaagggcgtgaaggagctgatgaagcagtggcaggacctgcagggcgagatcgaggcccacaccgacgtgtaccacaacctggacgagaacagccagaagatcctgagaagcctggagggcagcgacgacgccgtgctgctgcagagaagactggacaacatgaacttcaagtggagcgagctgagaaagaagagcctgaacatcagaagccacctggaggccagcagcgaccagtggaagagactgcacctgagcctgcaggagctgctggtgtggctgcagctgaaggacgacgagctgagcagacaggcccccatcggcggcgacttccccgccgtgcagaagcagaacgacgtgcacagagccttcaagagagagctgaagaccaaggagcccgtgatcatgagcaccctggagaccgtgagaatcttcctgaccgagcagcccctggagggcctggagaagctgtaccaggagcccagagagctgccccccgaggagagagcccagaacgtgaccagactgctgagaaagcaggccgaggaggtgaacaccgagtgggagaagctgaacctgcacagcgccgactggcagagaaagatcgacgagaccctggagagactgagagagctgcaggaggccaccgacgagctggacctgaagctgagacaggccgaggtgatcaagggcagctggcagcccgtgggcgacctgctgatcgacagcctgcaggaccacctggagaaggtgaaggccctgagaggcgagatcgcccccctgaaggagaacgtgagccacgtgaacgacctggccagacagctgaccaccctgggcatccagctgagcccctacaacctgagcaccctggaggacctgaacaccagatggaagctgctgcaggtggccgtggaggacagagtgagacagctgcacgaggcccacagagacttcggccccgccagccagcacttcctgagcaccagcgtgcagggcccctgggagagagccatcagccccaacaaggtgccctactacatcaaccacgagacccagaccacctgctgggaccaccccaagatgaccgagctgtaccagagcctggccgacctgaacaacgtgagattcagcgcctacagaaccgccatgaagctgagaagactgcagaaggccctgtgcctggacctgctgagcctgagcgccgcctgcgacgccctggaccagcacaacctgaagcagaacgaccagcccatggacatcctgcagatcatcaactgcctgaccaccatctacgacagactggagcaggagcacaacaacctggtgaacgtgcccctgtgcgtggacatgtgcctgaactggctgctgaacgtgtacgacaccggcagaaccggcagaatcagagtgctgagcttcaagaccggcatcatcagcctgtgcaaggcccacctggaggacaagtacagatacctgttcaagcaggtggccagcagcaccggcttctgcgaccagagaagactgggcctgctgctgcacgacagcatccagatccccagacagctgggcgaggtggccagcttcggcggcagcaacatcgagcccagcgtgagaagctgcttccagttcgccaacaacaagcccgagatcgaggccgccctgttcctggactggatgagactggagccccagagcatggtgtggctgcccgtgctgcacagagtggccgccgccgagaccgccaagcaccaggccaagtgcaacatctgcaaggagtgccccatcatcggcttcagatacagaagcctgaagcacttcaactacgacatctgccagagctgcttcttcagcggcagagtggccaagggccacaagatgcactaccccatggtggagtactgcacccccaccaccagcggcgaggacgtgagagacttcgccaaggtgctgaagaacaagttcagaaccaagagatacttcgccaagcaccccagaatgggctacctgcccgtgcagaccgtgctggagggcgacaacatggagacccccgtgaccctgatcaacttctggcccgtggacagcgcccccgccagcagcccccagctgagccacgacgacacccacagcagaatcgagcactacgccagcagactggccgagatggagaacagcaacggcagctacctgaacgacagcatcagccccaacgagagcatcgacgacgagcacctgctgatccagcactactgccagagcctgaaccaggacagccccctgagccagcccagaagccccgcccagatcctgatcagcctggagagcgaggagagaggcgagctggagagaatcctggccgacctggaggaggagaacagaaacctgcaggccgagtacgacagactgaagcagcagcacgagcacaagggcctgagccccctgcccagcccccccgagatgatgcccaccagcccccagagccccagagacgccgagctgatcgccgaggccaagctgctgagacagcacaagggcagactggaggccagaatgcagatcctggaggaccacaacaagcagctggagagccagctgcacagactgagacagctgctggagcagccccaggccgaggccaaggtgaacggcaccaccgtgagcagccccagcaccagcctgcagagaagcgacagcagccagcccatgctgctgagagtggtgggcagccagaccagcgacagcatgggcgaggaggacctgctgagccccccccaggacaccagcaccggcctggaggaggtgatggagcagctgaacaacagcttccccagcagcagaggcagaaacacccccggcaagcccatgagagaggacaccatgtag

SEQ ID NO: 79990 - DNA, 3693 bp, synthetic construct
  misc_feature 1..3693: note = Description of Artificial Sequence: Synthetic coding sequence
  source 1..3693: mol_type = other DNA
atgcccagcagcctgatgctggaggtgcccgccctggccgacttcaacagagcctggaccgagctgaccgactggctgagcctgctggaccaggtgatcaagagccagagagtgatggtgggcgacctggaggacatcaacgagatgatcatcaagcagaaggccaccatgcaggacctggagcagagaagaccccagctggaggagctgatcaccgccgcccagaacctgaagaacaagaccagcaaccaggaggccagaaccatcatcaccgacagaatcgagagaatccagaaccagtgggacgaggtgcaggagcacctgcagaacagaagacagcagctgaacgagatgctgaaggacagcacccagtggctggaggccaaggaggaggccgagcaggtgctgggccaggccagagccaagctggagagctggaaggagggcccctacaccgtggacgccatccagaagaagatcaccgagaccaagcagctggccaaggacctgagacagtggcagaccaacgtggacgtggccaacgacctggccctgaagctgctgagagactacagcgccgacgacaccagaaaggtgcacatgatcaccgagaacatcaacgccagctggagaagcatccacaagagagtgagcgagagagaggccgccctggaggagacccacagactgctgcagcagttccccctggacctggagaagttcctggcctggctgaccgaggccgagaccaccgccaacgtgctgcaggacgccaccagaaaggagagactgctggaggacagcaagggcgtgaaggagctgatgaagcagtggcaggacctgcagggcgagatcgaggcccacaccgacgtgtaccacaacctggacgagaacagccagaagatcctgagaagcctggagggcagcgacgacgccgtgctgctgcagagaagactggacaacatgaacttcaagtggagcgagctgagaaagaagagcctgaacatcagaagccacctggaggccagcagcgaccagtggaagagactgcacctgagcctgcaggagctgctggtgtggctgcagctgaaggacgacgagctgagcagacaggcccccatcggcggcgacttccccgccgtgcagaagcagaacgacgtgcacagagccttcaagagagagctgaagaccaaggagcccgtgatcatgagcaccctggagaccgtgagaatcttcctgaccgagcagcccctggagggcctggagaagctgtaccaggagcccagagagctgccccccgaggagagagcccagaacgtgaccagactgctgagaaagcaggccgaggaggtgaacaccgagtgggagaagctgaacctgcacagcgccgactggcagagaaagatcgacgagaccctggagagactgagagagctgcaggaggccaccgacgagctggacctgaagctgagacaggccgaggtgatcaagggcagctggcagcccgtgggcgacctgctgatcgacagcctgcaggaccacctggagaaggtgaaggccctgagaggcgagatcgcccccctgaaggagaacgtgagccacgtgaacgacctggccagacagctgaccaccctgggcatccagctgagcccctacaacctgagcaccctggaggacctgaacaccagatggaagctgctgcaggtggccgtggaggacagagtgagacagctgcacgaggcccacagagacttcggccccgccagccagcacttcctgagcaccagcgtgcagggcccctgggagagagccatcagccccaacaaggtgccctactacatcaaccacgagacccagaccacctgctgggaccaccccaagatgaccgagctgtaccagagcctggccgacctgaacaacgtgagattcagcgcctacagaaccgccatgaagctgagaagactgcagaaggccctgtgcctggacctgctgagcctgagcgccgcctgcgacgccctggaccagcacaacctgaagcagaacgaccagcccatggacatcctgcagatcatcaactgcctgaccaccatctacgacagactggagcaggagcacaacaacctggtgaacgtgcccctgtgcgtggacatgtgcctgaactggctgctgaacgtgtacgacaccggcagaaccggcagaatcagagtgctgagcttcaagaccggcatcatcagcctgtgcaaggcccacctggaggacaagtacagatacctgttcaagcaggtggccagcagcaccggcttctgcgaccagagaagactgggcctgctgctgcacgacagcatccagatccccagacagctgggcgaggtggccagcttcggcggcagcaacatcgagcccagcgtgagaagctgcttccagttcgccaacaacaagcccgagatcgaggccgccctgttcctggactggatgagactggagccccagagcatggtgtggctgcccgtgctgcacagagtggccgccgccgagaccgccaagcaccaggccaagtgcaacatctgcaaggagtgccccatcatcggcttcagatacagaagcctgaagcacttcaactacgacatctgccagagctgcttcttcagcggcagagtggccaagggccacaagatgcactaccccatggtggagtactgcacccccaccaccagcggcgaggacgtgagagacttcgccaaggtgctgaagaacaagttcagaaccaagagatacttcgccaagcaccccagaatgggctacctgcccgtgcagaccgtgctggagggcgacaacatggagacccccgccagcagcccccagctgagccacgacgacacccacagcagaatcgagcactacgccagcagactggccgagatggagaacagcaacggcagctacctgaacgacagcatcagccccaacgagagcatcgacgacgagcacctgctgatccagcactactgccagagcctgaaccaggacagccccctgagccagcccagaagccccgcccagatcctgatcagcctggagagcgaggagagaggcgagctggagagaatcctggccgacctggaggaggagaacagaaacctgcaggccgagtacgacagactgaagcagcagcacgagcacaagggcctgagccccctgcccagcccccccgagatgatgcccaccagcccccagagccccagagacgccgagctgatcgccgaggccaagctgctgagacagcacaagggcagactggaggccagaatgcagatcctggaggaccacaacaagcagctggagagccagctgcacagactgagacagctgctggagcagccccaggccgaggccaaggtgaacggcaccaccgtgagcagccccagcaccagcctgcagagaagcgacagcagccagcccatgctgctgagagtggtgggcagccagaccagcgacagcatgggcgaggaggacctgctgagccccccccaggacaccagcaccggcctggaggaggtgatggagcagctgaacaacagcttccccagcagcagaggccacaacgtgggcagcctgttccacatggccgacgacctgggcagagccatggagagcctggtgagcgtgatgaccgacgaggagggcgccgagtag

SEQ ID NO: 79991 - DNA, 1869 bp, synthetic construct
  misc_feature 1..1869: note = Description of Artificial Sequence: Synthetic coding sequence
  source 1..1869: mol_type = other DNA
atgagagagcagctgaagggccacgagacccagaccacctgctgggaccaccccaagatgaccgagctgtaccagagcctggccgacctgaacaacgtgagattcagcgcctacagaaccgccatgaagctgagaagactgcagaaggccctgtgcctggacctgctgagcctgagcgccgcctgcgacgccctggaccagcacaacctgaagcagaacgaccagcccatggacatcctgcagatcatcaactgcctgaccaccatctacgacagactggagcaggagcacaacaacctggtgaacgtgcccctgtgcgtggacatgtgcctgaactggctgctgaacgtgtacgacaccggcagaaccggcagaatcagagtgctgagcttcaagaccggcatcatcagcctgtgcaaggcccacctggaggacaagtacagatacctgttcaagcaggtggccagcagcaccggcttctgcgaccagagaagactgggcctgctgctgcacgacagcatccagatccccagacagctgggcgaggtggccagcttcggcggcagcaacatcgagcccagcgtgagaagctgcttccagttcgccaacaacaagcccgagatcgaggccgccctgttcctggactggatgagactggagccccagagcatggtgtggctgcccgtgctgcacagagtggccgccgccgagaccgccaagcaccaggccaagtgcaacatctgcaaggagtgccccatcatcggcttcagatacagaagcctgaagcacttcaactacgacatctgccagagctgcttcttcagcggcagagtggccaagggccacaagatgcactaccccatggtggagtactgcacccccaccaccagcggcgaggacgtgagagacttcgccaaggtgctgaagaacaagttcagaaccaagagatacttcgccaagcaccccagaatgggctacctgcccgtgcagaccgtgctggagggcgacaacatggagacccccgccagcagcccccagctgagccacgacgacacccacagcagaatcgagcactacgccagcagactggccgagatggagaacagcaacggcagctacctgaacgacagcatcagccccaacgagagcatcgacgacgagcacctgctgatccagcactactgccagagcctgaaccaggacagccccctgagccagcccagaagccccgcccagatcctgatcagcctggagagcgaggagagaggcgagctggagagaatcctggccgacctggaggaggagaacagaaacctgcaggccgagtacgacagactgaagcagcagcacgagcacaagggcctgagccccctgcccagcccccccgagatgatgcccaccagcccccagagccccagagacgccgagctgatcgccgaggccaagctgctgagacagcacaagggcagactggaggccagaatgcagatcctggaggaccacaacaagcagctggagagccagctgcacagactgagacagctgctggagcagccccaggccgaggccaaggtgaacggcaccaccgtgagcagccccagcaccagcctgcagagaagcgacagcagccagcccatgctgctgagagtggtgggcagccagaccagcgacagcatgggcgaggaggacctgctgagccccccccaggacaccagcaccggcctggaggaggtgatggagcagctgaacaacagcttccccagcagcagaggccacaacgtgggcagcctgttccacatggccgacgacctgggcagagccatggagagcctggtgagcgtgatgaccgacgaggagggcgccgagtag

SEQ ID NO: 79992 - DNA, 11046 bp, synthetic construct
  misc_feature 1..11046: note = Description of Artificial Sequence: Synthetic coding sequence
  source 1..11046: mol_type = other DNA
atgagcgaggtgagcagcgacgagagagaggacgtgcagaagaagaccttcaccaagtgggtgaacgcccagttcagcaagttcggcaagcagcacatcgagaacctgttcagcgacctgcaggacggcagaagactgctggacctgctggagggcctgaccggccagaagctgcccaaggagaagggcagcaccagagtgcacgccctgaacaacgtgaacaaggccctgagagtgctgcagaacaacaacgtggacctggtgaacatcggcagcaccgacatcgtggacggcaaccacaagctgaccctgggcctgatctggaacatcatcctgcactggcaggtgaagaacgtgatgaagaacatcatggccggcctgcagcagaccaacagcgagaagatcctgctgagctgggtgagacagagcaccagaaactacccccaggtgaacgtgatcaacttcaccaccagctggagcgacggcctggccctgaacgccctgatccacagccacagacccgacctgttcgactggaacagcgtggtgtgccagcagagcgccacccagagactggagcacgccttcaacatcgccagataccagctgggcatcgagaagctgctggaccccgaggacgtggacaccacctaccccgacaagaagagcatcctgatgtacatcaccagcctgttccaggtgctgccccagcaggtgagcatcgaggccatccaggaggtggagatgctgcccagaccccccaaggtgaccaaggaggagcacttccagctgcaccaccagatgcactacagccagcagatcaccgtgagcctggcccagggctacgagagaaccagcagccccaagcccagattcaagagctacgcctacacccaggccgcctacgtgaccaccagcgaccccaccagaagccccttccccagccagcacctggaggcccccgaggacaagagcttcggcagcagcctgatggagagcgaggtgaacctggacagataccagaccgccctggaggaggtgctgagctggctgctgagcgccgaggacaccctgcaggcccagggcgagatcagcaacgacgtggaggtggtgaaggaccagttccacacccacgagggctacatgatggacctgaccgcccaccagggcagagtgggcaacatcctgcagctgggcagcaagctgatcggcaccggcaagctgagcgaggacgaggagaccgaggtgcaggagcagatgaacctgctgaacagcagatgggagtgcctgagagtggccagcatggagaagcagagcaacctgcacagagtgctgatggacctgcagaaccagaagctgaaggagctgaacgactggctgaccaagaccgaggagagaaccagaaagatggaggaggagcccctgggccccgacctggaggacctgaagagacaggtgcagcagcacaaggtgctgcaggaggacctggagcaggagcaggtgagagtgaacagcctgacccacatggtggtggtggtggacgagagcagcggcgaccacgccaccgccgccctggaggagcagctgaaggtgctgggcgacagatgggccaacatctgcagatggaccgaggacagatgggtgctgctgcaggacatcctgctgaagtggcagagactgaccgaggagcagtgcctgttcagcgcctggctgagcgagaaggaggacgccgtgaacaagatccacaccaccggcttcaaggaccagaacgagatgctgagcagcctgcagaagctggccgtgctgaaggccgacctggagaagaagaagcagagcatgggcaagctgtacagcctgaagcaggacctgctgagcaccctgaagaacaagagcgtgacccagaagaccgaggcctggctggacaacttcgccagatgctgggacaacctggtgcagaagctggagaagagcaccgcccagatcagccaggccgtgaccaccacccagcccagcctgacccagaccaccgtgatggagaccgtgaccaccgtgaccaccagagagcagatcctggtgaagcacgcccaggaggagctgccccccccccccccccagaagaagagacagatcaccgtggacagcgagatcagaaagagactggacgtggacatcaccgagctgcacagctggatcaccagaagcgaggccgtgctgcagagccccgagttcgccatcttcagaaaggagggcaacttcagcgacctgaaggagaaggtgaacgccatcgagagagagaaggccgagaagttcagaaagctgcaggacgccagcagaagcgcccaggccctggtggagcagatggtgaacgagggcgtgaacgccgacagcatcaagcaggccagcgagcagctgaacagcagatggatcgagttctgccagctgctgagcgagagactgaactggctggagtaccagaacaacatcatcgccttctacaaccagctgcagcagctggagcagatgaccaccaccgccgagaactggctgaagatccagcccaccacccccagcgagcccaccgccatcaagagccagctgaagatctgcaaggacgaggtgaacagactgagcgacctgcagccccagatcgagagactgaagatccagagcatcgccctgaaggagaagggccagggccccatgttcctggacgccgacttcgtggccttcaccaaccacttcaagcaggtgttcagcgacgtgcaggccagagagaaggagctgcagaccatcttcgacaccctgccccccatgagataccaggagaccatgagcgccatcagaacctgggtgcagcagagcgagaccaagctgagcatcccccagctgagcgtgaccgactacgagatcatggagcagagactgggcgagctgcaggccctgcagagcagcctgcaggagcagcagagcggcctgtactacctgagcaccaccgtgaaggagatgagcaagaaggcccccagcgagatcagcagaaagtaccagagcgagttcgaggagatcgagggcagatggaagaagctgagcagccagctggtggagcactgccagaagctggaggagcagatgaacaagctgagaaagatccagaaccacatccagaccctgaagaagtggatggccgaggtggacgtgttcctgaaggaggagtggcccgccctgggcgacagcgagatcctgaagaagcagctgaagcagtgcagactgctggtgagcgacatccagaccatccagcccagcctgaacagcgtgaacgagggcggccagaagatcaagaacgaggccgagcccgagttcgccagcagactggagaccgagctgaaggagctgaacacccagtgggaccacatgtgccagcaggtgtacgccagaaaggaggccctgaagggcggcctggagaagaccgtgagcctgcagaaggacctgagcgagatgcacgagtggatgacccaggccgaggaggagtacctggagagagacttcgagtacaagacccccgacgagctgcagaaggccgtggaggagatgaagagagccaaggaggaggcccagcagaaggaggccaaggtgaagctgctgaccgagagcgtgaacagcgtgatcgcccaggccccccccgtggcccaggaggccctgaagaaggagctggagaccctgaccaccaactaccagtggctgtgcaccagactgaacggcaagtgcaagaccctggaggaggtgtgggcctgctggcacgagctgctgagctacctggagaaggccaacaagtggctgaacgaggtggagttcaagctgaagaccaccgagaacatccccggcggcgccgaggagatcagcgaggtgctggacagcctggagaacctgatgagacacagcgaggacaaccccaaccagatcagaatcctggcccagaccctgaccgacggcggcgtgatggacgagctgatcaacgaggagctggagaccttcaacagcagatggagagagctgcacgaggaggccgtgagaagacagaagctgctggagcagagcatccagagcgcccaggagaccgagaagagcctgcacctgatccaggagagcctgaccttcatcgacaagcagctggccgcctacatcgccgacaaggtggacgccgcccagatgccccaggaggcccagaagatccagagcgacctgaccagccacgagatcagcctggaggagatgaagaagcacaaccagggcaaggaggccgcccagagagtgctgagccagatcgacgtggcccagaagaagctgcaggacgtgagcatgaagttcagactgttccagaagcccgccaacttcgagcagagactgcaggagagcaagatgatcctggacgaggtgaagatgcacctgcccgccctggagaccaagagcgtggagcaggaggtggtgcagagccagctgaaccactgcgtgaacctgtacaagagcctgagcgaggtgaagagcgaggtggagatggtgatcaagaccggcagacagatcgtgcagaagaagcagaccgagaaccccaaggagctggacgagagagtgaccgccctgaagctgcactacaacgagctgggcgccaaggtgaccgagagaaagcagcagctggagaagtgcctgaagctgagcagaaagatgagaaaggagatgaacgtgctgaccgagtggctggccgccaccgacatggagctgaccaagagaagcgccgtggagggcatgcccagcaacctggacagcgaggtggcctggggcaaggccacccagaaggagatcgagaagcagaaggtgcacctgaagagcatcaccgaggtgggcgaggccctgaagaccgtgctgggcaagaaggagaccctggtggaggacaagctgagcctgctgaacagcaactggatcgccgtgaccagcagagccgaggagtggctgaacctgctgctggagtaccagaagcacatggagaccttcgaccagaacgtggaccacatcaccaagtggatcatccaggccgacaccctgctggacgagagcgagaagaagaagccccagcagaaggaggacgtgctgaagagactgaaggccgagctgaacgacatcagacccaaggtggacagcaccagagaccaggccgccaacctgatggccaacagaggcgaccactgcagaaagctggtggagccccagatcagcgagctgaaccacagattcgccgccatcagccacagaatcaagaccggcaaggccagcatccccctgaaggagctggagcagttcaacagcgacatccagaagctgctggagcccctggaggccgagatccagcagggcgtgaacctgaaggaggaggacttcaacaaggacatgaacgaggacaacgagggcaccgtgaaggagctgctgcagagaggcgacaacctgcagcagagaatcaccgacgagagaaagagagaggagatcaagatcaagcagcagctgctgcagaccaagcacaacgccctgaaggacctgagaagccagagaagaaagaaggccctggagatcagccaccagtggtaccagtacaagagacaggccgacgacctgctgaagtgcctggacgacatcgagaagaagctggccagcctgcccgagcccagagacgagagaaagatcaaggagatcgacagagagctgcagaagaagaaggaggagctgaacgccgtgagaagacaggccgagggcctgagcgaggacggcgccgccatggccgtggagcccacccagatccagctgagcaagagatggagagagatcgagagcaagttcgcccagttcagaagactgaacttcgcccagatccacaccgtgagagaggagaccatgatggtgatgaccgaggacatgcccctggagatcagctacgtgcccagcacctacctgaccgagatcacccacgtgagccaggccctgctggaggtggagcagctgctgaacgcccccgacctgtgcgccaaggacttcgaggacctgttcaagcaggaggagagcctgaagaacatcaaggacagcctgcagcagagcagcggcagaatcgacatcatccacagcaagaagaccgccgccctgcagagcgccacccccgtggagagagtgaagctgcaggaggccctgagccagctggacttccagtgggagaaggtgaacaagatgtacaaggacagacagggcagattcgacagaagcgtggagaagtggagaagattccactacgacatcaagatcttcaaccagtggctgaccgaggccgagcagttcctgagaaagacccagatccccgagaactgggagcacgccaagtacaagtggtacctgaaggagctgcaggacggcatcggccagagacagaccgtggtgagaaccctgaacgccaccggcgaggagatcatccagcagagcagcaagaccgacgccagcatcctgcaggagaagctgggcagcctgaacctgagatggcaggaggtgtgcaagcagctgagcgacagaaagaagagactggaggagcagaagaacatcctgagcgagttccagagagacctgaacgagttcgtgctgtggctggaggaggccgacaacatcgccagcatccccctggagcccggcaaggagcagcagctgaaggagaagctggagcaggtgaagctgctggtggaggagctgcccctgagacagggcatcctgaagcagctgaacgagaccggcggccccgtgctggtgagcgcccccatcagccccgaggagcaggacaagctggagaacaagctgaagcagaccaacctgcagtggatcaaggtgagcagagccctgcccgagaagcagggcgagatcgaggcccagatcaaggacctgggccagctggagaagaagctggaggacctggaggagcagctgaaccacctgctgctgtggctgagccccatcagaaaccagctggagatctacaaccagcccaaccaggagggccccttcgacgtgaaggagaccgagatcgccgtgcaggccaagcagcccgacgtggaggagatcctgagcaagggccagcacctgtacaaggagaagcccgccacccagcccgtgaagagaaagctggaggacctgagcagcgagtggaaggccgtgaacagactgctgcaggagctgagagccaagcagcccgacctggcccccggcctgaccaccatcggcgccagccccacccagaccgtgaccctggtgacccagcccgtggtgaccaaggagaccgccatcagcaagctggagatgcccagcagcctgatgctggaggtgcccgccctggccgacttcaacagagcctggaccgagctgaccgactggctgagcctgctggaccaggtgatcaagagccagagagtgatggtgggcgacctggaggacatcaacgagatgatcatcaagcagaaggccaccatgcaggacctggagcagagaagaccccagctggaggagctgatcaccgccgcccagaacctgaagaacaagaccagcaaccaggaggccagaaccatcatcaccgacagaatcgagagaatccagaaccagtgggacgaggtgcaggagcacctgcagaacagaagacagcagctgaacgagatgctgaaggacagcacccagtggctggaggccaaggaggaggccgagcaggtgctgggccaggccagagccaagctggagagctggaaggagggcccctacaccgtggacgccatccagaagaagatcaccgagaccaagcagctggccaaggacctgagacagtggcagaccaacgtggacgtggccaacgacctggccctgaagctgctgagagactacagcgccgacgacaccagaaaggtgcacatgatcaccgagaacatcaacgccagctggagaagcatccacaagagagtgagcgagagagaggccgccctggaggagacccacagactgctgcagcagttccccctggacctggagaagttcctggcctggctgaccgaggccgagaccaccgccaacgtgctgcaggacgccaccagaaaggagagactgctggaggacagcaagggcgtgaaggagctgatgaagcagtggcaggacctgcagggcgagatcgaggcccacaccgacgtgtaccacaacctggacgagaacagccagaagatcctgagaagcctggagggcagcgacgacgccgtgctgctgcagagaagactggacaacatgaacttcaagtggagcgagctgagaaagaagagcctgaacatcagaagccacctggaggccagcagcgaccagtggaagagactgcacctgagcctgcaggagctgctggtgtggctgcagctgaaggacgacgagctgagcagacaggcccccatcggcggcgacttccccgccgtgcagaagcagaacgacgtgcacagagccttcaagagagagctgaagaccaaggagcccgtgatcatgagcaccctggagaccgtgagaatcttcctgaccgagcagcccctggagggcctggagaagctgtaccaggagcccagagagctgccccccgaggagagagcccagaacgtgaccagactgctgagaaagcaggccgaggaggtgaacaccgagtgggagaagctgaacctgcacagcgccgactggcagagaaagatcgacgagaccctggagagactgagagagctgcaggaggccaccgacgagctggacctgaagctgagacaggccgaggtgatcaagggcagctggcagcccgtgggcgacctgctgatcgacagcctgcaggaccacctggagaaggtgaaggccctgagaggcgagatcgcccccctgaaggagaacgtgagccacgtgaacgacctggccagacagctgaccaccctgggcatccagctgagcccctacaacctgagcaccctggaggacctgaacaccagatggaagctgctgcaggtggccgtggaggacagagtgagacagctgcacgaggcccacagagacttcggccccgccagccagcacttcctgagcaccagcgtgcagggcccctgggagagagccatcagccccaacaaggtgccctactacatcaaccacgagacccagaccacctgctgggaccaccccaagatgaccgagctgtaccagagcctggccgacctgaacaacgtgagattcagcgcctacagaaccgccatgaagctgagaagactgcagaaggccctgtgcctggacctgctgagcctgagcgccgcctgcgacgccctggaccagcacaacctgaagcagaacgaccagcccatggacatcctgcagatcatcaactgcctgaccaccatctacgacagactggagcaggagcacaacaacctggtgaacgtgcccctgtgcgtggacatgtgcctgaactggctgctgaacgtgtacgacaccggcagaaccggcagaatcagagtgctgagcttcaagaccggcatcatcagcctgtgcaaggcccacctggaggacaagtacagatacctgttcaagcaggtggccagcagcaccggcttctgcgaccagagaagactgggcctgctgctgcacgacagcatccagatccccagacagctgggcgaggtggccagcttcggcggcagcaacatcgagcccagcgtgagaagctgcttccagttcgccaacaacaagcccgagatcgaggccgccctgttcctggactggatgagactggagccccagagcatggtgtggctgcccgtgctgcacagagtggccgccgccgagaccgccaagcaccaggccaagtgcaacatctgcaaggagtgccccatcatcggcttcagatacagaagcctgaagcacttcaactacgacatctgccagagctgcttcttcagcggcagagtggccaagggccacaagatgcactaccccatggtggagtactgcacccccaccaccagcggcgaggacgtgagagacttcgccaaggtgctgaagaacaagttcagaaccaagagatacttcgccaagcaccccagaatgggctacctgcccgtgcagaccgtgctggagggcgacaacatggagacccccgtgaccctgatcaacttctggcccgtggacagcgcccccgccagcagcccccagctgagccacgacgacacccacagcagaatcgagcactacgccagcagactggccgagatggagaacagcaacggcagctacctgaacgacagcatcagccccaacgagagcatcgacgacgagcacctgctgatccagcactactgccagagcctgaaccaggacagccccctgagccagcccagaagccccgcccagatcctgatcagcctggagagcgaggagagaggcgagctggagagaatcctggccgacctggaggaggagaacagaaacctgcaggccgagtacgacagactgaagcagcagcacgagcacaagggcctgagccccctgcccagcccccccgagatgatgcccaccagcccccagagccccagagacgccgagctgatcgccgaggccaagctgctgagacagcacaagggcagactggaggccagaatgcagatcctggaggaccacaacaagcagctggagagccagctgcacagactgagacagctgctggagcagccccaggccgaggccaaggtgaacggcaccaccgtgagcagccccagcaccagcctgcagagaagcgacagcagccagcccatgctgctgagagtggtgggcagccagaccagcgacagcatgggcgaggaggacctgctgagccccccccaggacaccagcaccggcctggaggaggtgatggagcagctgaacaacagcttccccagcagcagaggcagaaacacccccggcaagcccatgagagaggacaccatgtag

SEQ ID NO: 79993 - DNA, 7035 bp, synthetic construct
  misc_feature 1..7035: note = Description of Artificial Sequence: Synthetic coding sequence
  source 1..7035: mol_type = other DNA
atgaccgagatgatcctgctgatcttcttccccgcctacttcctgaacgccgtgagaagacagaagctgctggagcagagcatccagagcgcccaggagaccgagaagagcctgcacctgatccaggagagcctgaccttcatcgacaagcagctggccgcctacatcgccgacaaggtggacgccgcccagatgccccaggaggcccagaagatccagagcgacctgaccagccacgagatcagcctggaggagatgaagaagcacaaccagggcaaggaggccgcccagagagtgctgagccagatcgacgtggcccagaagaagctgcaggacgtgagcatgaagttcagactgttccagaagcccgccaacttcgagcagagactgcaggagagcaagatgatcctggacgaggtgaagatgcacctgcccgccctggagaccaagagcgtggagcaggaggtggtgcagagccagctgaaccactgcgtgaacctgtacaagagcctgagcgaggtgaagagcgaggtggagatggtgatcaagaccggcagacagatcgtgcagaagaagcagaccgagaaccccaaggagctggacgagagagtgaccgccctgaagctgcactacaacgagctgggcgccaaggtgaccgagagaaagcagcagctggagaagtgcctgaagctgagcagaaagatgagaaaggagatgaacgtgctgaccgagtggctggccgccaccgacatggagctgaccaagagaagcgccgtggagggcatgcccagcaacctggacagcgaggtggcctggggcaaggccacccagaaggagatcgagaagcagaaggtgcacctgaagagcatcaccgaggtgggcgaggccctgaagaccgtgctgggcaagaaggagaccctggtggaggacaagctgagcctgctgaacagcaactggatcgccgtgaccagcagagccgaggagtggctgaacctgctgctggagtaccagaagcacatggagaccttcgaccagaacgtggaccacatcaccaagtggatcatccaggccgacaccctgctggacgagagcgagaagaagaagccccagcagaaggaggacgtgctgaagagactgaaggccgagctgaacgacatcagacccaaggtggacagcaccagagaccaggccgccaacctgatggccaacagaggcgaccactgcagaaagctggtggagccccagatcagcgagctgaaccacagattcgccgccatcagccacagaatcaagaccggcaaggccagcatccccctgaaggagctggagcagttcaacagcgacatccagaagctgctggagcccctggaggccgagatccagcagggcgtgaacctgaaggaggaggacttcaacaaggacatgaacgaggacaacgagggcaccgtgaaggagctgctgcagagaggcgacaacctgcagcagagaatcaccgacgagagaaagagagaggagatcaagatcaagcagcagctgctgcagaccaagcacaacgccctgaaggacctgagaagccagagaagaaagaaggccctggagatcagccaccagtggtaccagtacaagagacaggccgacgacctgctgaagtgcctggacgacatcgagaagaagctggccagcctgcccgagcccagagacgagagaaagatcaaggagatcgacagagagctgcagaagaagaaggaggagctgaacgccgtgagaagacaggccgagggcctgagcgaggacggcgccgccatggccgtggagcccacccagatccagctgagcaagagatggagagagatcgagagcaagttcgcccagttcagaagactgaacttcgcccagatccacaccgtgagagaggagaccatgatggtgatgaccgaggacatgcccctggagatcagctacgtgcccagcacctacctgaccgagatcacccacgtgagccaggccctgctggaggtggagcagctgctgaacgcccccgacctgtgcgccaaggacttcgaggacctgttcaagcaggaggagagcctgaagaacatcaaggacagcctgcagcagagcagcggcagaatcgacatcatccacagcaagaagaccgccgccctgcagagcgccacccccgtggagagagtgaagctgcaggaggccctgagccagctggacttccagtgggagaaggtgaacaagatgtacaaggacagacagggcagattcgacagaagcgtggagaagtggagaagattccactacgacatcaagatcttcaaccagtggctgaccgaggccgagcagttcctgagaaagacccagatccccgagaactgggagcacgccaagtacaagtggtacctgaaggagctgcaggacggcatcggccagagacagaccgtggtgagaaccctgaacgccaccggcgaggagatcatccagcagagcagcaagaccgacgccagcatcctgcaggagaagctgggcagcctgaacctgagatggcaggaggtgtgcaagcagctgagcgacagaaagaagagactggaggagcagaagaacatcctgagcgagttccagagagacctgaacgagttcgtgctgtggctggaggaggccgacaacatcgccagcatccccctggagcccggcaaggagcagcagctgaaggagaagctggagcaggtgaagctgctggtggaggagctgcccctgagacagggcatcctgaagcagctgaacgagaccggcggccccgtgctggtgagcgcccccatcagccccgaggagcaggacaagctggagaacaagctgaagcagaccaacctgcagtggatcaaggtgagcagagccctgcccgagaagcagggcgagatcgaggcccagatcaaggacctgggccagctggagaagaagctggaggacctggaggagcagctgaaccacctgctgctgtggctgagccccatcagaaaccagctggagatctacaaccagcccaaccaggagggccccttcgacgtgaaggagaccgagatcgccgtgcaggccaagcagcccgacgtggaggagatcctgagcaagggccagcacctgtacaaggagaagcccgccacccagcccgtgaagagaaagctggaggacctgagcagcgagtggaaggccgtgaacagactgctgcaggagctgagagccaagcagcccgacctggcccccggcctgaccaccatcggcgccagccccacccagaccgtgaccctggtgacccagcccgtggtgaccaaggagaccgccatcagcaagctggagatgcccagcagcctgatgctggaggtgcccgccctggccgacttcaacagagcctggaccgagctgaccgactggctgagcctgctggaccaggtgatcaagagccagagagtgatggtgggcgacctggaggacatcaacgagatgatcatcaagcagaaggccaccatgcaggacctggagcagagaagaccccagctggaggagctgatcaccgccgcccagaacctgaagaacaagaccagcaaccaggaggccagaaccatcatcaccgacagaatcgagagaatccagaaccagtgggacgaggtgcaggagcacctgcagaacagaagacagcagctgaacgagatgctgaaggacagcacccagtggctggaggccaaggaggaggccgagcaggtgctgggccaggccagagccaagctggagagctggaaggagggcccctacaccgtggacgccatccagaagaagatcaccgagaccaagcagctggccaaggacctgagacagtggcagaccaacgtggacgtggccaacgacctggccctgaagctgctgagagactacagcgccgacgacaccagaaaggtgcacatgatcaccgagaacatcaacgccagctggagaagcatccacaagagagtgagcgagagagaggccgccctggaggagacccacagactgctgcagcagttccccctggacctggagaagttcctggcctggctgaccgaggccgagaccaccgccaacgtgctgcaggacgccaccagaaaggagagactgctggaggacagcaagggcgtgaaggagctgatgaagcagtggcaggacctgcagggcgagatcgaggcccacaccgacgtgtaccacaacctggacgagaacagccagaagatcctgagaagcctggagggcagcgacgacgccgtgctgctgcagagaagactggacaacatgaacttcaagtggagcgagctgagaaagaagagcctgaacatcagaagccacctggaggccagcagcgaccagtggaagagactgcacctgagcctgcaggagctgctggtgtggctgcagctgaaggacgacgagctgagcagacaggcccccatcggcggcgacttccccgccgtgcagaagcagaacgacgtgcacagagccttcaagagagagctgaagaccaaggagcccgtgatcatgagcaccctggagaccgtgagaatcttcctgaccgagcagcccctggagggcctggagaagctgtaccaggagcccagagagctgccccccgaggagagagcccagaacgtgaccagactgctgagaaagcaggccgaggaggtgaacaccgagtgggagaagctgaacctgcacagcgccgactggcagagaaagatcgacgagaccctggagagactgagagagctgcaggaggccaccgacgagctggacctgaagctgagacaggccgaggtgatcaagggcagctggcagcccgtgggcgacctgctgatcgacagcctgcaggaccacctggagaaggtgaaggccctgagaggcgagatcgcccccctgaaggagaacgtgagccacgtgaacgacctggccagacagctgaccaccctgggcatccagctgagcccctacaacctgagcaccctggaggacctgaacaccagatggaagctgctgcaggtggccgtggaggacagagtgagacagctgcacgaggcccacagagacttcggccccgccagccagcacttcctgagcaccagcgtgcagggcccctgggagagagccatcagccccaacaaggtgccctactacatcaaccacgagacccagaccacctgctgggaccaccccaagatgaccgagctgtaccagagcctggccgacctgaacaacgtgagattcagcgcctacagaaccgccatgaagctgagaagactgcagaaggccctgtgcctggacctgctgagcctgagcgccgcctgcgacgccctggaccagcacaacctgaagcagaacgaccagcccatggacatcctgcagatcatcaactgcctgaccaccatctacgacagactggagcaggagcacaacaacctggtgaacgtgcccctgtgcgtggacatgtgcctgaactggctgctgaacgtgtacgacaccggcagaaccggcagaatcagagtgctgagcttcaagaccggcatcatcagcctgtgcaaggcccacctggaggacaagtacagatacctgttcaagcaggtggccagcagcaccggcttctgcgaccagagaagactgggcctgctgctgcacgacagcatccagatccccagacagctgggcgaggtggccagcttcggcggcagcaacatcgagcccagcgtgagaagctgcttccagttcgccaacaacaagcccgagatcgaggccgccctgttcctggactggatgagactggagccccagagcatggtgtggctgcccgtgctgcacagagtggccgccgccgagaccgccaagcaccaggccaagtgcaacatctgcaaggagtgccccatcatcggcttcagatacagaagcctgaagcacttcaactacgacatctgccagagctgcttcttcagcggcagagtggccaagggccacaagatgcactaccccatggtggagtactgcacccccaccaccagcggcgaggacgtgagagacttcgccaaggtgctgaagaacaagttcagaaccaagagatacttcgccaagcaccccagaatgggctacctgcccgtgcagaccgtgctggagggcgacaacatggagacccccgtgaccctgatcaacttctggcccgtggacagcgcccccgccagcagcccccagctgagccacgacgacacccacagcagaatcgagcactacgccagcagactggccgagatggagaacagcaacggcagctacctgaacgacagcatcagccccaacgagagcatcgacgacgagcacctgctgatccagcactactgccagagcctgaaccaggacagccccctgagccagcccagaagccccgcccagatcctgatcagcctggagagcgaggagagaggcgagctggagagaatcctggccgacctggaggaggagaacagaaacctgcaggccgagtacgacagactgaagcagcagcacgagcacaagggcctgagccccctgcccagcccccccgagatgatgcccaccagcccccagagccccagagacgccgagctgatcgccgaggccaagctgctgagacagcacaagggcagactggaggccagaatgcagatcctggaggaccacaacaagcagctggagagccagctgcacagactgagacagctgctggagcagccccaggccgaggccaaggtgaacggcaccaccgtgagcagccccagcaccagcctgcagagaagcgacagcagccagcccatgctgctgagagtggtgggcagccagaccagcgacagcatgggcgaggaggacctgctgagccccccccaggacaccagcaccggcctggaggaggtgatggagcagctgaacaacagcttccccagcagcagaggcagaaacacccccggcaagcccatgagagaggacaccccctag

SEQ ID NO: 79994 - DNA, 7026 bp, synthetic construct
  misc_feature 1..7026: note = Description of Artificial Sequence: Synthetic coding sequence
  source 1..7026: mol_type = other DNA
atgagcgccagaaagctgagaaacctgagctacaagaaggccgtgagaagacagaagctgctggagcagagcatccagagcgcccaggagaccgagaagagcctgcacctgatccaggagagcctgaccttcatcgacaagcagctggccgcctacatcgccgacaaggtggacgccgcccagatgccccaggaggcccagaagatccagagcgacctgaccagccacgagatcagcctggaggagatgaagaagcacaaccagggcaaggaggccgcccagagagtgctgagccagatcgacgtggcccagaagaagctgcaggacgtgagcatgaagttcagactgttccagaagcccgccaacttcgagcagagactgcaggagagcaagatgatcctggacgaggtgaagatgcacctgcccgccctggagaccaagagcgtggagcaggaggtggtgcagagccagctgaaccactgcgtgaacctgtacaagagcctgagcgaggtgaagagcgaggtggagatggtgatcaagaccggcagacagatcgtgcagaagaagcagaccgagaaccccaaggagctggacgagagagtgaccgccctgaagctgcactacaacgagctgggcgccaaggtgaccgagagaaagcagcagctggagaagtgcctgaagctgagcagaaagatgagaaaggagatgaacgtgctgaccgagtggctggccgccaccgacatggagctgaccaagagaagcgccgtggagggcatgcccagcaacctggacagcgaggtggcctggggcaaggccacccagaaggagatcgagaagcagaaggtgcacctgaagagcatcaccgaggtgggcgaggccctgaagaccgtgctgggcaagaaggagaccctggtggaggacaagctgagcctgctgaacagcaactggatcgccgtgaccagcagagccgaggagtggctgaacctgctgctggagtaccagaagcacatggagaccttcgaccagaacgtggaccacatcaccaagtggatcatccaggccgacaccctgctggacgagagcgagaagaagaagccccagcagaaggaggacgtgctgaagagactgaaggccgagctgaacgacatcagacccaaggtggacagcaccagagaccaggccgccaacctgatggccaacagaggcgaccactgcagaaagctggtggagccccagatcagcgagctgaaccacagattcgccgccatcagccacagaatcaagaccggcaaggccagcatccccctgaaggagctggagcagttcaacagcgacatccagaagctgctggagcccctggaggccgagatccagcagggcgtgaacctgaaggaggaggacttcaacaaggacatgaacgaggacaacgagggcaccgtgaaggagctgctgcagagaggcgacaacctgcagcagagaatcaccgacgagagaaagagagaggagatcaagatcaagcagcagctgctgcagaccaagcacaacgccctgaaggacctgagaagccagagaagaaagaaggccctggagatcagccaccagtggtaccagtacaagagacaggccgacgacctgctgaagtgcctggacgacatcgagaagaagctggccagcctgcccgagcccagagacgagagaaagatcaaggagatcgacagagagctgcagaagaagaaggaggagctgaacgccgtgagaagacaggccgagggcctgagcgaggacggcgccgccatggccgtggagcccacccagatccagctgagcaagagatggagagagatcgagagcaagttcgcccagttcagaagactgaacttcgcccagatccacaccgtgagagaggagaccatgatggtgatgaccgaggacatgcccctggagatcagctacgtgcccagcacctacctgaccgagatcacccacgtgagccaggccctgctggaggtggagcagctgctgaacgcccccgacctgtgcgccaaggacttcgaggacctgttcaagcaggaggagagcctgaagaacatcaaggacagcctgcagcagagcagcggcagaatcgacatcatccacagcaagaagaccgccgccctgcagagcgccacccccgtggagagagtgaagctgcaggaggccctgagccagctggacttccagtgggagaaggtgaacaagatgtacaaggacagacagggcagattcgacagaagcgtggagaagtggagaagattccactacgacatcaagatcttcaaccagtggctgaccgaggccgagcagttcctgagaaagacccagatccccgagaactgggagcacgccaagtacaagtggtacctgaaggagctgcaggacggcatcggccagagacagaccgtggtgagaaccctgaacgccaccggcgaggagatcatccagcagagcagcaagaccgacgccagcatcctgcaggagaagctgggcagcctgaacctgagatggcaggaggtgtgcaagcagctgagcgacagaaagaagagactggaggagcagaagaacatcctgagcgagttccagagagacctgaacgagttcgtgctgtggctggaggaggccgacaacatcgccagcatccccctggagcccggcaaggagcagcagctgaaggagaagctggagcaggtgaagctgctggtggaggagctgcccctgagacagggcatcctgaagcagctgaacgagaccggcggccccgtgctggtgagcgcccccatcagccccgaggagcaggacaagctggagaacaagctgaagcagaccaacctgcagtggatcaaggtgagcagagccctgcccgagaagcagggcgagatcgaggcccagatcaaggacctgggccagctggagaagaagctggaggacctggaggagcagctgaaccacctgctgctgtggctgagccccatcagaaaccagctggagatctacaaccagcccaaccaggagggccccttcgacgtgaaggagaccgagatcgccgtgcaggccaagcagcccgacgtggaggagatcctgagcaagggccagcacctgtacaaggagaagcccgccacccagcccgtgaagagaaagctggaggacctgagcagcgagtggaaggccgtgaacagactgctgcaggagctgagagccaagcagcccgacctggcccccggcctgaccaccatcggcgccagccccacccagaccgtgaccctggtgacccagcccgtggtgaccaaggagaccgccatcagcaagctggagatgcccagcagcctgatgctggaggtgcccgccctggccgacttcaacagagcctggaccgagctgaccgactggctgagcctgctggaccaggtgatcaagagccagagagtgatggtgggcgacctggaggacatcaacgagatgatcatcaagcagaaggccaccatgcaggacctggagcagagaagaccccagctggaggagctgatcaccgccgcccagaacctgaagaacaagaccagcaaccaggaggccagaaccatcatcaccgacagaatcgagagaatccagaaccagtgggacgaggtgcaggagcacctgcagaacagaagacagcagctgaacgagatgctgaaggacagcacccagtggctggaggccaaggaggaggccgagcaggtgctgggccaggccagagccaagctggagagctggaaggagggcccctacaccgtggacgccatccagaagaagatcaccgagaccaagcagctggccaaggacctgagacagtggcagaccaacgtggacgtggccaacgacctggccctgaagctgctgagagactacagcgccgacgacaccagaaaggtgcacatgatcaccgagaacatcaacgccagctggagaagcatccacaagagagtgagcgagagagaggccgccctggaggagacccacagactgctgcagcagttccccctggacctggagaagttcctggcctggctgaccgaggccgagaccaccgccaacgtgctgcaggacgccaccagaaaggagagactgctggaggacagcaagggcgtgaaggagctgatgaagcagtggcaggacctgcagggcgagatcgaggcccacaccgacgtgtaccacaacctggacgagaacagccagaagatcctgagaagcctggagggcagcgacgacgccgtgctgctgcagagaagactggacaacatgaacttcaagtggagcgagctgagaaagaagagcctgaacatcagaagccacctggaggccagcagcgaccagtggaagagactgcacctgagcctgcaggagctgctggtgtggctgcagctgaaggacgacgagctgagcagacaggcccccatcggcggcgacttccccgccgtgcagaagcagaacgacgtgcacagagccttcaagagagagctgaagaccaaggagcccgtgatcatgagcaccctggagaccgtgagaatcttcctgaccgagcagcccctggagggcctggagaagctgtaccaggagcccagagagctgccccccgaggagagagcccagaacgtgaccagactgctgagaaagcaggccgaggaggtgaacaccgagtgggagaagctgaacctgcacagcgccgactggcagagaaagatcgacgagaccctggagagactgagagagctgcaggaggccaccgacgagctggacctgaagctgagacaggccgaggtgatcaagggcagctggcagcccgtgggcgacctgctgatcgacagcctgcaggaccacctggagaaggtgaaggccctgagaggcgagatcgcccccctgaaggagaacgtgagccacgtgaacgacctggccagacagctgaccaccctgggcatccagctgagcccctacaacctgagcaccctggaggacctgaacaccagatggaagctgctgcaggtggccgtggaggacagagtgagacagctgcacgaggcccacagagacttcggccccgccagccagcacttcctgagcaccagcgtgcagggcccctgggagagagccatcagccccaacaaggtgccctactacatcaaccacgagacccagaccacctgctgggaccaccccaagatgaccgagctgtaccagagcctggccgacctgaacaacgtgagattcagcgcctacagaaccgccatgaagctgagaagactgcagaaggccctgtgcctggacctgctgagcctgagcgccgcctgcgacgccctggaccagcacaacctgaagcagaacgaccagcccatggacatcctgcagatcatcaactgcctgaccaccatctacgacagactggagcaggagcacaacaacctggtgaacgtgcccctgtgcgtggacatgtgcctgaactggctgctgaacgtgtacgacaccggcagaaccggcagaatcagagtgctgagcttcaagaccggcatcatcagcctgtgcaaggcccacctggaggacaagtacagatacctgttcaagcaggtggccagcagcaccggcttctgcgaccagagaagactgggcctgctgctgcacgacagcatccagatccccagacagctgggcgaggtggccagcttcggcggcagcaacatcgagcccagcgtgagaagctgcttccagttcgccaacaacaagcccgagatcgaggccgccctgttcctggactggatgagactggagccccagagcatggtgtggctgcccgtgctgcacagagtggccgccgccgagaccgccaagcaccaggccaagtgcaacatctgcaaggagtgccccatcatcggcttcagatacagaagcctgaagcacttcaactacgacatctgccagagctgcttcttcagcggcagagtggccaagggccacaagatgcactaccccatggtggagtactgcacccccaccaccagcggcgaggacgtgagagacttcgccaaggtgctgaagaacaagttcagaaccaagagatacttcgccaagcaccccagaatgggctacctgcccgtgcagaccgtgctggagggcgacaacatggagacccccgtgaccctgatcaacttctggcccgtggacagcgcccccgccagcagcccccagctgagccacgacgacacccacagcagaatcgagcactacgccagcagactggccgagatggagaacagcaacggcagctacctgaacgacagcatcagccccaacgagagcatcgacgacgagcacctgctgatccagcactactgccagagcctgaaccaggacagccccctgagccagcccagaagccccgcccagatcctgatcagcctggagagcgaggagagaggcgagctggagagaatcctggccgacctggaggaggagaacagaaacctgcaggccgagtacgacagactgaagcagcagcacgagcacaagggcctgagccccctgcccagcccccccgagatgatgcccaccagcccccagagccccagagacgccgagctgatcgccgaggccaagctgctgagacagcacaagggcagactggaggccagaatgcagatcctggaggaccacaacaagcagctggagagccagctgcacagactgagacagctgctggagcagccccaggccgaggccaaggtgaacggcaccaccgtgagcagccccagcaccagcctgcagagaagcgacagcagccagcccatgctgctgagagtggtgggcagccagaccagcgacagcatgggcgaggaggacctgctgagccccccccaggacaccagcaccggcctggaggaggtgatggagcagctgaacaacagcttccccagcagcagaggcagaaacacccccggcaagcccatgagagaggacaccccctag

SEQ ID NO: 79995 - DNA, 1854 bp, synthetic construct
  misc_feature 1..1854: note = Description of Artificial Sequence: Synthetic coding sequence
  source 1..1854: mol_type = other DNA
atgagagagcagctgaagggccacgagacccagaccacctgctgggaccaccccaagatgaccgagctgtaccagagcctggccgacctgaacaacgtgagattcagcgcctacagaaccgccatgaagctgagaagactgcagaaggccctgtgcctggacctgctgagcctgagcgccgcctgcgacgccctggaccagcacaacctgaagcagaacgaccagcccatggacatcctgcagatcatcaactgcctgaccaccatctacgacagactggagcaggagcacaacaacctggtgaacgtgcccctgtgcgtggacatgtgcctgaactggctgctgaacgtgtacgacaccggcagaaccggcagaatcagagtgctgagcttcaagaccggcatcatcagcctgtgcaaggcccacctggaggacaagtacagatacctgttcaagcaggtggccagcagcaccggcttctgcgaccagagaagactgggcctgctgctgcacgacagcatccagatccccagacagctgggcgaggtggccagcttcggcggcagcaacatcgagcccagcgtgagaagctgcttccagttcgccaacaacaagcccgagatcgaggccgccctgttcctggactggatgagactggagccccagagcatggtgtggctgcccgtgctgcacagagtggccgccgccgagaccgccaagcaccaggccaagtgcaacatctgcaaggagtgccccatcatcggcttcagatacagaagcctgaagcacttcaactacgacatctgccagagctgcttcttcagcggcagagtggccaagggccacaagatgcactaccccatggtggagtactgcacccccaccaccagcggcgaggacgtgagagacttcgccaaggtgctgaagaacaagttcagaaccaagagatacttcgccaagcaccccagaatgggctacctgcccgtgcagaccgtgctggagggcgacaacatggagacccccgtgaccctgatcaacttctggcccgtggacagcgcccccgccagcagcccccagctgagccacgacgacacccacagcagaatcgagcactacgccagcagactggccgagatggagaacagcaacggcagctacctgaacgacagcatcagccccaacgagagcatcgacgacgagcacctgctgatccagcactactgccagagcctgaaccaggacagccccctgagccagcccagaagccccgcccagatcctgatcagcctggagagcgaggagagaggcgagctggagagaatcctggccgacctggaggaggagaacagaaacctgcaggccgagtacgacagactgaagcagcagcacgagcacaagggcctgagccccctgcccagcccccccgagatgatgcccaccagcccccagagccccagagacgccgagctgatcgccgaggccaagctgctgagacagcacaagggcagactggaggccagaatgcagatcctggaggaccacaacaagcagctggagagccagctgcacagactgagacagctgctggagcagccccaggccgaggccaaggtgaacggcaccaccgtgagcagccccagcaccagcctgcagagaagcgacagcagccagcccatgctgctgagagtggtgggcagccagaccagcgacagcatgggcgaggaggacctgctgagccccccccaggacaccagcaccggcctggaggaggtgatggagcagctgaacaacagcttccccagcagcagaggcagaaacacccccggcaagcccatgagagaggacaccatgtag

SEQ ID NO: 79996 - DNA, 3678 bp, synthetic construct
  misc_feature 1..3678: note = Description of Artificial Sequence: Synthetic coding sequence
  source 1..3678: mol_type = other DNA
atgcccagcagcctgatgctggaggtgcccgccctggccgacttcaacagagcctggaccgagctgaccgactggctgagcctgctggaccaggtgatcaagagccagagagtgatggtgggcgacctggaggacatcaacgagatgatcatcaagcagaaggccaccatgcaggacctggagcagagaagaccccagctggaggagctgatcaccgccgcccagaacctgaagaacaagaccagcaaccaggaggccagaaccatcatcaccgacagaatcgagagaatccagaaccagtgggacgaggtgcaggagcacctgcagaacagaagacagcagctgaacgagatgctgaaggacagcacccagtggctggaggccaaggaggaggccgagcaggtgctgggccaggccagagccaagctggagagctggaaggagggcccctacaccgtggacgccatccagaagaagatcaccgagaccaagcagctggccaaggacctgagacagtggcagaccaacgtggacgtggccaacgacctggccctgaagctgctgagagactacagcgccgacgacaccagaaaggtgcacatgatcaccgagaacatcaacgccagctggagaagcatccacaagagagtgagcgagagagaggccgccctggaggagacccacagactgctgcagcagttccccctggacctggagaagttcctggcctggctgaccgaggccgagaccaccgccaacgtgctgcaggacgccaccagaaaggagagactgctggaggacagcaagggcgtgaaggagctgatgaagcagtggcaggacctgcagggcgagatcgaggcccacaccgacgtgtaccacaacctggacgagaacagccagaagatcctgagaagcctggagggcagcgacgacgccgtgctgctgcagagaagactggacaacatgaacttcaagtggagcgagctgagaaagaagagcctgaacatcagaagccacctggaggccagcagcgaccagtggaagagactgcacctgagcctgcaggagctgctggtgtggctgcagctgaaggacgacgagctgagcagacaggcccccatcggcggcgacttccccgccgtgcagaagcagaacgacgtgcacagagccttcaagagagagctgaagaccaaggagcccgtgatcatgagcaccctggagaccgtgagaatcttcctgaccgagcagcccctggagggcctggagaagctgtaccaggagcccagagagctgccccccgaggagagagcccagaacgtgaccagactgctgagaaagcaggccgaggaggtgaacaccgagtgggagaagctgaacctgcacagcgccgactggcagagaaagatcgacgagaccctggagagactgagagagctgcaggaggccaccgacgagctggacctgaagctgagacaggccgaggtgatcaagggcagctggcagcccgtgggcgacctgctgatcgacagcctgcaggaccacctggagaaggtgaaggccctgagaggcgagatcgcccccctgaaggagaacgtgagccacgtgaacgacctggccagacagctgaccaccctgggcatccagctgagcccctacaacctgagcaccctggaggacctgaacaccagatggaagctgctgcaggtggccgtggaggacagagtgagacagctgcacgaggcccacagagacttcggccccgccagccagcacttcctgagcaccagcgtgcagggcccctgggagagagccatcagccccaacaaggtgccctactacatcaaccacgagacccagaccacctgctgggaccaccccaagatgaccgagctgtaccagagcctggccgacctgaacaacgtgagattcagcgcctacagaaccgccatgaagctgagaagactgcagaaggccctgtgcctggacctgctgagcctgagcgccgcctgcgacgccctggaccagcacaacctgaagcagaacgaccagcccatggacatcctgcagatcatcaactgcctgaccaccatctacgacagactggagcaggagcacaacaacctggtgaacgtgcccctgtgcgtggacatgtgcctgaactggctgctgaacgtgtacgacaccggcagaaccggcagaatcagagtgctgagcttcaagaccggcatcatcagcctgtgcaaggcccacctggaggacaagtacagatacctgttcaagcaggtggccagcagcaccggcttctgcgaccagagaagactgggcctgctgctgcacgacagcatccagatccccagacagctgggcgaggtggccagcttcggcggcagcaacatcgagcccagcgtgagaagctgcttccagttcgccaacaacaagcccgagatcgaggccgccctgttcctggactggatgagactggagccccagagcatggtgtggctgcccgtgctgcacagagtggccgccgccgagaccgccaagcaccaggccaagtgcaacatctgcaaggagtgccccatcatcggcttcagatacagaagcctgaagcacttcaactacgacatctgccagagctgcttcttcagcggcagagtggccaagggccacaagatgcactaccccatggtggagtactgcacccccaccaccagcggcgaggacgtgagagacttcgccaaggtgctgaagaacaagttcagaaccaagagatacttcgccaagcaccccagaatgggctacctgcccgtgcagaccgtgctggagggcgacaacatggagacccccgtgaccctgatcaacttctggcccgtggacagcgcccccgccagcagcccccagctgagccacgacgacacccacagcagaatcgagcactacgccagcagactggccgagatggagaacagcaacggcagctacctgaacgacagcatcagccccaacgagagcatcgacgacgagcacctgctgatccagcactactgccagagcctgaaccaggacagccccctgagccagcccagaagccccgcccagatcctgatcagcctggagagcgaggagagaggcgagctggagagaatcctggccgacctggaggaggagaacagaaacctgcaggccgagtacgacagactgaagcagcagcacgagcacaagggcctgagccccctgcccagcccccccgagatgatgcccaccagcccccagagccccagagacgccgagctgatcgccgaggccaagctgctgagacagcacaagggcagactggaggccagaatgcagatcctggaggaccacaacaagcagctggagagccagctgcacagactgagacagctgctggagcagccccaggccgaggccaaggtgaacggcaccaccgtgagcagccccagcaccagcctgcagagaagcgacagcagccagcccatgctgctgagagtggtgggcagccagaccagcgacagcatgggcgaggaggacctgctgagccccccccaggacaccagcaccggcctggaggaggtgatggagcagctgaacaacagcttccccagcagcagaggcagaaacacccccggcaagcccatgagagaggacaccatgtag

SEQ ID NO: 79997 - DNA, 1908 bp, synthetic construct
  misc_feature 1..1908: note = Description of Artificial Sequence: Synthetic coding sequence
  source 1..1908: mol_type = other DNA
atgagagagcagctgaagggccacgagacccagaccacctgctgggaccaccccaagatgaccgagctgtaccagagcctggccgacctgaacaacgtgagattcagcgcctacagaaccgccatgaagctgagaagactgcagaaggccctgtgcctggacctgctgagcctgagcgccgcctgcgacgccctggaccagcacaacctgaagcagaacgaccagcccatggacatcctgcagatcatcaactgcctgaccaccatctacgacagactggagcaggagcacaacaacctggtgaacgtgcccctgtgcgtggacatgtgcctgaactggctgctgaacgtgtacgacaccggcagaaccggcagaatcagagtgctgagcttcaagaccggcatcatcagcctgtgcaaggcccacctggaggacaagtacagatacctgttcaagcaggtggccagcagcaccggcttctgcgaccagagaagactgggcctgctgctgcacgacagcatccagatccccagacagctgggcgaggtggccagcttcggcggcagcaacatcgagcccagcgtgagaagctgcttccagttcgccaacaacaagcccgagatcgaggccgccctgttcctggactggatgagactggagccccagagcatggtgtggctgcccgtgctgcacagagtggccgccgccgagaccgccaagcaccaggccaagtgcaacatctgcaaggagtgccccatcatcggcttcagatacagaagcctgaagcacttcaactacgacatctgccagagctgcttcttcagcggcagagtggccaagggccacaagatgcactaccccatggtggagtactgcacccccaccaccagcggcgaggacgtgagagacttcgccaaggtgctgaagaacaagttcagaaccaagagatacttcgccaagcaccccagaatgggctacctgcccgtgcagaccgtgctggagggcgacaacatggagacccccgtgaccctgatcaacttctggcccgtggacagcgcccccgccagcagcccccagctgagccacgacgacacccacagcagaatcgagcactacgccagcagactggccgagatggagaacagcaacggcagctacctgaacgacagcatcagccccaacgagagcatcgacgacgagcacctgctgatccagcactactgccagagcctgaaccaggacagccccctgagccagcccagaagccccgcccagatcctgatcagcctggagagcgaggagagaggcgagctggagagaatcctggccgacctggaggaggagaacagaaacctgcaggccgagtacgacagactgaagcagcagcacgagcacaagggcctgagccccctgcccagcccccccgagatgatgcccaccagcccccagagccccagagacgccgagctgatcgccgaggccaagctgctgagacagcacaagggcagactggaggccagaatgcagatcctggaggaccacaacaagcagctggagagccagctgcacagactgagacagctgctggagcagccccaggccgaggccaaggtgaacggcaccaccgtgagcagccccagcaccagcctgcagagaagcgacagcagccagcccatgctgctgagagtggtgggcagccagaccagcgacagcatgggcgaggaggacctgctgagccccccccaggacaccagcaccggcctggaggaggtgatggagcagctgaacaacagcttccccagcagcagaggccacaacgtgggcagcctgttccacatggccgacgacctgggcagagccatggagagcctggtgagcgtgatgaccgacgaggagggcgccgagtag

SEQ ID NO: 79998 - DNA, 3732 bp, synthetic construct
  misc_feature 1..3732: note = Description of Artificial Sequence: Synthetic coding sequence
  source 1..3732: mol_type = other DNA
atgcccagcagcctgatgctggaggtgcccgccctggccgacttcaacagagcctggaccgagctgaccgactggctgagcctgctggaccaggtgatcaagagccagagagtgatggtgggcgacctggaggacatcaacgagatgatcatcaagcagaaggccaccatgcaggacctggagcagagaagaccccagctggaggagctgatcaccgccgcccagaacctgaagaacaagaccagcaaccaggaggccagaaccatcatcaccgacagaatcgagagaatccagaaccagtgggacgaggtgcaggagcacctgcagaacagaagacagcagctgaacgagatgctgaaggacagcacccagtggctggaggccaaggaggaggccgagcaggtgctgggccaggccagagccaagctggagagctggaaggagggcccctacaccgtggacgccatccagaagaagatcaccgagaccaagcagctggccaaggacctgagacagtggcagaccaacgtggacgtggccaacgacctggccctgaagctgctgagagactacagcgccgacgacaccagaaaggtgcacatgatcaccgagaacatcaacgccagctggagaagcatccacaagagagtgagcgagagagaggccgccctggaggagacccacagactgctgcagcagttccccctggacctggagaagttcctggcctggctgaccgaggccgagaccaccgccaacgtgctgcaggacgccaccagaaaggagagactgctggaggacagcaagggcgtgaaggagctgatgaagcagtggcaggacctgcagggcgagatcgaggcccacaccgacgtgtaccacaacctggacgagaacagccagaagatcctgagaagcctggagggcagcgacgacgccgtgctgctgcagagaagactggacaacatgaacttcaagtggagcgagctgagaaagaagagcctgaacatcagaagccacctggaggccagcagcgaccagtggaagagactgcacctgagcctgcaggagctgctggtgtggctgcagctgaaggacgacgagctgagcagacaggcccccatcggcggcgacttccccgccgtgcagaagcagaacgacgtgcacagagccttcaagagagagctgaagaccaaggagcccgtgatcatgagcaccctggagaccgtgagaatcttcctgaccgagcagcccctggagggcctggagaagctgtaccaggagcccagagagctgccccccgaggagagagcccagaacgtgaccagactgctgagaaagcaggccgaggaggtgaacaccgagtgggagaagctgaacctgcacagcgccgactggcagagaaagatcgacgagaccctggagagactgagagagctgcaggaggccaccgacgagctggacctgaagctgagacaggccgaggtgatcaagggcagctggcagcccgtgggcgacctgctgatcgacagcctgcaggaccacctggagaaggtgaaggccctgagaggcgagatcgcccccctgaaggagaacgtgagccacgtgaacgacctggccagacagctgaccaccctgggcatccagctgagcccctacaacctgagcaccctggaggacctgaacaccagatggaagctgctgcaggtggccgtggaggacagagtgagacagctgcacgaggcccacagagacttcggccccgccagccagcacttcctgagcaccagcgtgcagggcccctgggagagagccatcagccccaacaaggtgccctactacatcaaccacgagacccagaccacctgctgggaccaccccaagatgaccgagctgtaccagagcctggccgacctgaacaacgtgagattcagcgcctacagaaccgccatgaagctgagaagactgcagaaggccctgtgcctggacctgctgagcctgagcgccgcctgcgacgccctggaccagcacaacctgaagcagaacgaccagcccatggacatcctgcagatcatcaactgcctgaccaccatctacgacagactggagcaggagcacaacaacctggtgaacgtgcccctgtgcgtggacatgtgcctgaactggctgctgaacgtgtacgacaccggcagaaccggcagaatcagagtgctgagcttcaagaccggcatcatcagcctgtgcaaggcccacctggaggacaagtacagatacctgttcaagcaggtggccagcagcaccggcttctgcgaccagagaagactgggcctgctgctgcacgacagcatccagatccccagacagctgggcgaggtggccagcttcggcggcagcaacatcgagcccagcgtgagaagctgcttccagttcgccaacaacaagcccgagatcgaggccgccctgttcctggactggatgagactggagccccagagcatggtgtggctgcccgtgctgcacagagtggccgccgccgagaccgccaagcaccaggccaagtgcaacatctgcaaggagtgccccatcatcggcttcagatacagaagcctgaagcacttcaactacgacatctgccagagctgcttcttcagcggcagagtggccaagggccacaagatgcactaccccatggtggagtactgcacccccaccaccagcggcgaggacgtgagagacttcgccaaggtgctgaagaacaagttcagaaccaagagatacttcgccaagcaccccagaatgggctacctgcccgtgcagaccgtgctggagggcgacaacatggagacccccgtgaccctgatcaacttctggcccgtggacagcgcccccgccagcagcccccagctgagccacgacgacacccacagcagaatcgagcactacgccagcagactggccgagatggagaacagcaacggcagctacctgaacgacagcatcagccccaacgagagcatcgacgacgagcacctgctgatccagcactactgccagagcctgaaccaggacagccccctgagccagcccagaagccccgcccagatcctgatcagcctggagagcgaggagagaggcgagctggagagaatcctggccgacctggaggaggagaacagaaacctgcaggccgagtacgacagactgaagcagcagcacgagcacaagggcctgagccccctgcccagcccccccgagatgatgcccaccagcccccagagccccagagacgccgagctgatcgccgaggccaagctgctgagacagcacaagggcagactggaggccagaatgcagatcctggaggaccacaacaagcagctggagagccagctgcacagactgagacagctgctggagcagccccaggccgaggccaaggtgaacggcaccaccgtgagcagccccagcaccagcctgcagagaagcgacagcagccagcccatgctgctgagagtggtgggcagccagaccagcgacagcatgggcgaggaggacctgctgagccccccccaggacaccagcaccggcctggaggaggtgatggagcagctgaacaacagcttccccagcagcagaggccacaacgtgggcagcctgttccacatggccgacgacctgggcagagccatggagagcctggtgagcgtgatgaccgacgaggagggcgccgagtag

SEQ ID NO: 79999 - DNA, 11034 bp, synthetic construct
  misc_feature 1..11034: note = Description of Artificial Sequence: Synthetic coding sequence
  source 1..11034: mol_type = other DNA
atcctggacgagagagaggacgtgcagaagaagaccttcaccaagtgggtgaacgcccagttcagcaagttcggcaagcagcacatcgagaacctgttcagcgacctgcaggacggcagaagactgctggacctgctggagggcctgaccggccagaagctgcccaaggagaagggcagcaccagagtgcacgccctgaacaacgtgaacaaggccctgagagtgctgcagaacaacaacgtggacctggtgaacatcggcagcaccgacatcgtggacggcaaccacaagctgaccctgggcctgatctggaacatcatcctgcactggcaggtgaagaacgtgatgaagaacatcatggccggcctgcagcagaccaacagcgagaagatcctgctgagctgggtgagacagagcaccagaaactacccccaggtgaacgtgatcaacttcaccaccagctggagcgacggcctggccctgaacgccctgatccacagccacagacccgacctgttcgactggaacagcgtggtgtgccagcagagcgccacccagagactggagcacgccttcaacatcgccagataccagctgggcatcgagaagctgctggaccccgaggacgtggacaccacctaccccgacaagaagagcatcctgatgtacatcaccagcctgttccaggtgctgccccagcaggtgagcatcgaggccatccaggaggtggagatgctgcccagaccccccaaggtgaccaaggaggagcacttccagctgcaccaccagatgcactacagccagcagatcaccgtgagcctggcccagggctacgagagaaccagcagccccaagcccagattcaagagctacgcctacacccaggccgcctacgtgaccaccagcgaccccaccagaagccccttccccagccagcacctggaggcccccgaggacaagagcttcggcagcagcctgatggagagcgaggtgaacctggacagataccagaccgccctggaggaggtgctgagctggctgctgagcgccgaggacaccctgcaggcccagggcgagatcagcaacgacgtggaggtggtgaaggaccagttccacacccacgagggctacatgatggacctgaccgcccaccagggcagagtgggcaacatcctgcagctgggcagcaagctgatcggcaccggcaagctgagcgaggacgaggagaccgaggtgcaggagcagatgaacctgctgaacagcagatgggagtgcctgagagtggccagcatggagaagcagagcaacctgcacagagtgctgatggacctgcagaaccagaagctgaaggagctgaacgactggctgaccaagaccgaggagagaaccagaaagatggaggaggagcccctgggccccgacctggaggacctgaagagacaggtgcagcagcacaaggtgctgcaggaggacctggagcaggagcaggtgagagtgaacagcctgacccacatggtggtggtggtggacgagagcagcggcgaccacgccaccgccgccctggaggagcagctgaaggtgctgggcgacagatgggccaacatctgcagatggaccgaggacagatgggtgctgctgcaggacatcctgctgaagtggcagagactgaccgaggagcagtgcctgttcagcgcctggctgagcgagaaggaggacgccgtgaacaagatccacaccaccggcttcaaggaccagaacgagatgctgagcagcctgcagaagctggccgtgctgaaggccgacctggagaagaagaagcagagcatgggcaagctgtacagcctgaagcaggacctgctgagcaccctgaagaacaagagcgtgacccagaagaccgaggcctggctggacaacttcgccagatgctgggacaacctggtgcagaagctggagaagagcaccgcccagatcagccaggccgtgaccaccacccagcccagcctgacccagaccaccgtgatggagaccgtgaccaccgtgaccaccagagagcagatcctggtgaagcacgcccaggaggagctgccccccccccccccccagaagaagagacagatcaccgtggacagcgagatcagaaagagactggacgtggacatcaccgagctgcacagctggatcaccagaagcgaggccgtgctgcagagccccgagttcgccatcttcagaaaggagggcaacttcagcgacctgaaggagaaggtgaacgccatcgagagagagaaggccgagaagttcagaaagctgcaggacgccagcagaagcgcccaggccctggtggagcagatggtgaacgagggcgtgaacgccgacagcatcaagcaggccagcgagcagctgaacagcagatggatcgagttctgccagctgctgagcgagagactgaactggctggagtaccagaacaacatcatcgccttctacaaccagctgcagcagctggagcagatgaccaccaccgccgagaactggctgaagatccagcccaccacccccagcgagcccaccgccatcaagagccagctgaagatctgcaaggacgaggtgaacagactgagcgacctgcagccccagatcgagagactgaagatccagagcatcgccctgaaggagaagggccagggccccatgttcctggacgccgacttcgtggccttcaccaaccacttcaagcaggtgttcagcgacgtgcaggccagagagaaggagctgcagaccatcttcgacaccctgccccccatgagataccaggagaccatgagcgccatcagaacctgggtgcagcagagcgagaccaagctgagcatcccccagctgagcgtgaccgactacgagatcatggagcagagactgggcgagctgcaggccctgcagagcagcctgcaggagcagcagagcggcctgtactacctgagcaccaccgtgaaggagatgagcaagaaggcccccagcgagatcagcagaaagtaccagagcgagttcgaggagatcgagggcagatggaagaagctgagcagccagctggtggagcactgccagaagctggaggagcagatgaacaagctgagaaagatccagaaccacatccagaccctgaagaagtggatggccgaggtggacgtgttcctgaaggaggagtggcccgccctgggcgacagcgagatcctgaagaagcagctgaagcagtgcagactgctggtgagcgacatccagaccatccagcccagcctgaacagcgtgaacgagggcggccagaagatcaagaacgaggccgagcccgagttcgccagcagactggagaccgagctgaaggagctgaacacccagtgggaccacatgtgccagcaggtgtacgccagaaaggaggccctgaagggcggcctggagaagaccgtgagcctgcagaaggacctgagcgagatgcacgagtggatgacccaggccgaggaggagtacctggagagagacttcgagtacaagacccccgacgagctgcagaaggccgtggaggagatgaagagagccaaggaggaggcccagcagaaggaggccaaggtgaagctgctgaccgagagcgtgaacagcgtgatcgcccaggccccccccgtggcccaggaggccctgaagaaggagctggagaccctgaccaccaactaccagtggctgtgcaccagactgaacggcaagtgcaagaccctggaggaggtgtgggcctgctggcacgagctgctgagctacctggagaaggccaacaagtggctgaacgaggtggagttcaagctgaagaccaccgagaacatccccggcggcgccgaggagatcagcgaggtgctggacagcctggagaacctgatgagacacagcgaggacaaccccaaccagatcagaatcctggcccagaccctgaccgacggcggcgtgatggacgagctgatcaacgaggagctggagaccttcaacagcagatggagagagctgcacgaggaggccgtgagaagacagaagctgctggagcagagcatccagagcgcccaggagaccgagaagagcctgcacctgatccaggagagcctgaccttcatcgacaagcagctggccgcctacatcgccgacaaggtggacgccgcccagatgccccaggaggcccagaagatccagagcgacctgaccagccacgagatcagcctggaggagatgaagaagcacaaccagggcaaggaggccgcccagagagtgctgagccagatcgacgtggcccagaagaagctgcaggacgtgagcatgaagttcagactgttccagaagcccgccaacttcgagcagagactgcaggagagcaagatgatcctggacgaggtgaagatgcacctgcccgccctggagaccaagagcgtggagcaggaggtggtgcagagccagctgaaccactgcgtgaacctgtacaagagcctgagcgaggtgaagagcgaggtggagatggtgatcaagaccggcagacagatcgtgcagaagaagcagaccgagaaccccaaggagctggacgagagagtgaccgccctgaagctgcactacaacgagctgggcgccaaggtgaccgagagaaagcagcagctggagaagtgcctgaagctgagcagaaagatgagaaaggagatgaacgtgctgaccgagtggctggccgccaccgacatggagctgaccaagagaagcgccgtggagggcatgcccagcaacctggacagcgaggtggcctggggcaaggccacccagaaggagatcgagaagcagaaggtgcacctgaagagcatcaccgaggtgggcgaggccctgaagaccgtgctgggcaagaaggagaccctggtggaggacaagctgagcctgctgaacagcaactggatcgccgtgaccagcagagccgaggagtggctgaacctgctgctggagtaccagaagcacatggagaccttcgaccagaacgtggaccacatcaccaagtggatcatccaggccgacaccctgctggacgagagcgagaagaagaagccccagcagaaggaggacgtgctgaagagactgaaggccgagctgaacgacatcagacccaaggtggacagcaccagagaccaggccgccaacctgatggccaacagaggcgaccactgcagaaagctggtggagccccagatcagcgagctgaaccacagattcgccgccatcagccacagaatcaagaccggcaaggccagcatccccctgaaggagctggagcagttcaacagcgacatccagaagctgctggagcccctggaggccgagatccagcagggcgtgaacctgaaggaggaggacttcaacaaggacatgaacgaggacaacgagggcaccgtgaaggagctgctgcagagaggcgacaacctgcagcagagaatcaccgacgagagaaagagagaggagatcaagatcaagcagcagctgctgcagaccaagcacaacgccctgaaggacctgagaagccagagaagaaagaaggccctggagatcagccaccagtggtaccagtacaagagacaggccgacgacctgctgaagtgcctggacgacatcgagaagaagctggccagcctgcccgagcccagagacgagagaaagatcaaggagatcgacagagagctgcagaagaagaaggaggagctgaacgccgtgagaagacaggccgagggcctgagcgaggacggcgccgccatggccgtggagcccacccagatccagctgagcaagagatggagagagatcgagagcaagttcgcccagttcagaagactgaacttcgcccagatccacaccgtgagagaggagaccatgatggtgatgaccgaggacatgcccctggagatcagctacgtgcccagcacctacctgaccgagatcacccacgtgagccaggccctgctggaggtggagcagctgctgaacgcccccgacctgtgcgccaaggacttcgaggacctgttcaagcaggaggagagcctgaagaacatcaaggacagcctgcagcagagcagcggcagaatcgacatcatccacagcaagaagaccgccgccctgcagagcgccacccccgtggagagagtgaagctgcaggaggccctgagccagctggacttccagtgggagaaggtgaacaagatgtacaaggacagacagggcagattcgacagaagcgtggagaagtggagaagattccactacgacatcaagatcttcaaccagtggctgaccgaggccgagcagttcctgagaaagacccagatccccgagaactgggagcacgccaagtacaagtggtacctgaaggagctgcaggacggcatcggccagagacagaccgtggtgagaaccctgaacgccaccggcgaggagatcatccagcagagcagcaagaccgacgccagcatcctgcaggagaagctgggcagcctgaacctgagatggcaggaggtgtgcaagcagctgagcgacagaaagaagagactggaggagcagaagaacatcctgagcgagttccagagagacctgaacgagttcgtgctgtggctggaggaggccgacaacatcgccagcatccccctggagcccggcaaggagcagcagctgaaggagaagctggagcaggtgaagctgctggtggaggagctgcccctgagacagggcatcctgaagcagctgaacgagaccggcggccccgtgctggtgagcgcccccatcagccccgaggagcaggacaagctggagaacaagctgaagcagaccaacctgcagtggatcaaggtgagcagagccctgcccgagaagcagggcgagatcgaggcccagatcaaggacctgggccagctggagaagaagctggaggacctggaggagcagctgaaccacctgctgctgtggctgagccccatcagaaaccagctggagatctacaaccagcccaaccaggagggccccttcgacgtgaaggagaccgagatcgccgtgcaggccaagcagcccgacgtggaggagatcctgagcaagggccagcacctgtacaaggagaagcccgccacccagcccgtgaagagaaagctggaggacctgagcagcgagtggaaggccgtgaacagactgctgcaggagctgagagccaagcagcccgacctggcccccggcctgaccaccatcggcgccagccccacccagaccgtgaccctggtgacccagcccgtggtgaccaaggagaccgccatcagcaagctggagatgcccagcagcctgatgctggaggtgcccgccctggccgacttcaacagagcctggaccgagctgaccgactggctgagcctgctggaccaggtgatcaagagccagagagtgatggtgggcgacctggaggacatcaacgagatgatcatcaagcagaaggccaccatgcaggacctggagcagagaagaccccagctggaggagctgatcaccgccgcccagaacctgaagaacaagaccagcaaccaggaggccagaaccatcatcaccgacagaatcgagagaatccagaaccagtgggacgaggtgcaggagcacctgcagaacagaagacagcagctgaacgagatgctgaaggacagcacccagtggctggaggccaaggaggaggccgagcaggtgctgggccaggccagagccaagctggagagctggaaggagggcccctacaccgtggacgccatccagaagaagatcaccgagaccaagcagctggccaaggacctgagacagtggcagaccaacgtggacgtggccaacgacctggccctgaagctgctgagagactacagcgccgacgacaccagaaaggtgcacatgatcaccgagaacatcaacgccagctggagaagcatccacaagagagtgagcgagagagaggccgccctggaggagacccacagactgctgcagcagttccccctggacctggagaagttcctggcctggctgaccgaggccgagaccaccgccaacgtgctgcaggacgccaccagaaaggagagactgctggaggacagcaagggcgtgaaggagctgatgaagcagtggcaggacctgcagggcgagatcgaggcccacaccgacgtgtaccacaacctggacgagaacagccagaagatcctgagaagcctggagggcagcgacgacgccgtgctgctgcagagaagactggacaacatgaacttcaagtggagcgagctgagaaagaagagcctgaacatcagaagccacctggaggccagcagcgaccagtggaagagactgcacctgagcctgcaggagctgctggtgtggctgcagctgaaggacgacgagctgagcagacaggcccccatcggcggcgacttccccgccgtgcagaagcagaacgacgtgcacagagccttcaagagagagctgaagaccaaggagcccgtgatcatgagcaccctggagaccgtgagaatcttcctgaccgagcagcccctggagggcctggagaagctgtaccaggagcccagagagctgccccccgaggagagagcccagaacgtgaccagactgctgagaaagcaggccgaggaggtgaacaccgagtgggagaagctgaacctgcacagcgccgactggcagagaaagatcgacgagaccctggagagactgagagagctgcaggaggccaccgacgagctggacctgaagctgagacaggccgaggtgatcaagggcagctggcagcccgtgggcgacctgctgatcgacagcctgcaggaccacctggagaaggtgaaggccctgagaggcgagatcgcccccctgaaggagaacgtgagccacgtgaacgacctggccagacagctgaccaccctgggcatccagctgagcccctacaacctgagcaccctggaggacctgaacaccagatggaagctgctgcaggtggccgtggaggacagagtgagacagctgcacgaggcccacagagacttcggccccgccagccagcacttcctgagcaccagcgtgcagggcccctgggagagagccatcagccccaacaaggtgccctactacatcaaccacgagacccagaccacctgctgggaccaccccaagatgaccgagctgtaccagagcctggccgacctgaacaacgtgagattcagcgcctacagaaccgccatgaagctgagaagactgcagaaggccctgtgcctggacctgctgagcctgagcgccgcctgcgacgccctggaccagcacaacctgaagcagaacgaccagcccatggacatcctgcagatcatcaactgcctgaccaccatctacgacagactggagcaggagcacaacaacctggtgaacgtgcccctgtgcgtggacatgtgcctgaactggctgctgaacgtgtacgacaccggcagaaccggcagaatcagagtgctgagcttcaagaccggcatcatcagcctgtgcaaggcccacctggaggacaagtacagatacctgttcaagcaggtggccagcagcaccggcttctgcgaccagagaagactgggcctgctgctgcacgacagcatccagatccccagacagctgggcgaggtggccagcttcggcggcagcaacatcgagcccagcgtgagaagctgcttccagttcgccaacaacaagcccgagatcgaggccgccctgttcctggactggatgagactggagccccagagcatggtgtggctgcccgtgctgcacagagtggccgccgccgagaccgccaagcaccaggccaagtgcaacatctgcaaggagtgccccatcatcggcttcagatacagaagcctgaagcacttcaactacgacatctgccagagctgcttcttcagcggcagagtggccaagggccacaagatgcactaccccatggtggagtactgcacccccaccaccagcggcgaggacgtgagagacttcgccaaggtgctgaagaacaagttcagaaccaagagatacttcgccaagcaccccagaatgggctacctgcccgtgcagaccgtgctggagggcgacaacatggagacccccgtgaccctgatcaacttctggcccgtggacagcgcccccgccagcagcccccagctgagccacgacgacacccacagcagaatcgagcactacgccagcagactggccgagatggagaacagcaacggcagctacctgaacgacagcatcagccccaacgagagcatcgacgacgagcacctgctgatccagcactactgccagagcctgaaccaggacagccccctgagccagcccagaagccccgcccagatcctgatcagcctggagagcgaggagagaggcgagctggagagaatcctggccgacctggaggaggagaacagaaacctgcaggccgagtacgacagactgaagcagcagcacgagcacaagggcctgagccccctgcccagcccccccgagatgatgcccaccagcccccagagccccagagacgccgagctgatcgccgaggccaagctgctgagacagcacaagggcagactggaggccagaatgcagatcctggaggaccacaacaagcagctggagagccagctgcacagactgagacagctgctggagcagccccaggccgaggccaaggtgaacggcaccaccgtgagcagccccagcaccagcctgcagagaagcgacagcagccagcccatgctgctgagagtggtgggcagccagaccagcgacagcatgggcgaggaggacctgctgagccccccccaggacaccagcaccggcctggaggaggtgatggagcagctgaacaacagcttccccagcagcagaggcagaaacacccccggcaagcccatgagagaggacaccccctag

SEQ ID NO: 80000 - DNA, 10689 bp, synthetic construct
  misc_feature 1..10689: note = Description of Artificial Sequence: Synthetic coding sequence
  source 1..10689: mol_type = other DNA
atgaagaacatcatggccggcctgcagcagaccaacagcgagaagatcctgctgagctgggtgagacagagcaccagaaactacccccaggtgaacgtgatcaacttcaccaccagctggagcgacggcctggccctgaacgccctgatccacagccacagacccgacctgttcgactggaacagcgtggtgtgccagcagagcgccacccagagactggagcacgccttcaacatcgccagataccagctgggcatcgagaagctgctggaccccgaggacgtggacaccacctaccccgacaagaagagcatcctgatgtacatcaccagcctgttccaggtgctgccccagcaggtgagcatcgaggccatccaggaggtggagatgctgcccagaccccccaaggtgaccaaggaggagcacttccagctgcaccaccagatgcactacagccagcagatcaccgtgagcctggcccagggctacgagagaaccagcagccccaagcccagattcaagagctacgcctacacccaggccgcctacgtgaccaccagcgaccccaccagaagccccttccccagccagcacctggaggcccccgaggacaagagcttcggcagcagcctgatggagagcgaggtgaacctggacagataccagaccgccctggaggaggtgctgagctggctgctgagcgccgaggacaccctgcaggcccagggcgagatcagcaacgacgtggaggtggtgaaggaccagttccacacccacgagggctacatgatggacctgaccgcccaccagggcagagtgggcaacatcctgcagctgggcagcaagctgatcggcaccggcaagctgagcgaggacgaggagaccgaggtgcaggagcagatgaacctgctgaacagcagatgggagtgcctgagagtggccagcatggagaagcagagcaacctgcacagagtgctgatggacctgcagaaccagaagctgaaggagctgaacgactggctgaccaagaccgaggagagaaccagaaagatggaggaggagcccctgggccccgacctggaggacctgaagagacaggtgcagcagcacaaggtgctgcaggaggacctggagcaggagcaggtgagagtgaacagcctgacccacatggtggtggtggtggacgagagcagcggcgaccacgccaccgccgccctggaggagcagctgaaggtgctgggcgacagatgggccaacatctgcagatggaccgaggacagatgggtgctgctgcaggacatcctgctgaagtggcagagactgaccgaggagcagtgcctgttcagcgcctggctgagcgagaaggaggacgccgtgaacaagatccacaccaccggcttcaaggaccagaacgagatgctgagcagcctgcagaagctggccgtgctgaaggccgacctggagaagaagaagcagagcatgggcaagctgtacagcctgaagcaggacctgctgagcaccctgaagaacaagagcgtgacccagaagaccgaggcctggctggacaacttcgccagatgctgggacaacctggtgcagaagctggagaagagcaccgcccagatcagccaggccgtgaccaccacccagcccagcctgacccagaccaccgtgatggagaccgtgaccaccgtgaccaccagagagcagatcctggtgaagcacgcccaggaggagctgccccccccccccccccagaagaagagacagatcaccgtggacagcgagatcagaaagagactggacgtggacatcaccgagctgcacagctggatcaccagaagcgaggccgtgctgcagagccccgagttcgccatcttcagaaaggagggcaacttcagcgacctgaaggagaaggtgaacgccatcgagagagagaaggccgagaagttcagaaagctgcaggacgccagcagaagcgcccaggccctggtggagcagatggtgaacgagggcgtgaacgccgacagcatcaagcaggccagcgagcagctgaacagcagatggatcgagttctgccagctgctgagcgagagactgaactggctggagtaccagaacaacatcatcgccttctacaaccagctgcagcagctggagcagatgaccaccaccgccgagaactggctgaagatccagcccaccacccccagcgagcccaccgccatcaagagccagctgaagatctgcaaggacgaggtgaacagactgagcgacctgcagccccagatcgagagactgaagatccagagcatcgccctgaaggagaagggccagggccccatgttcctggacgccgacttcgtggccttcaccaaccacttcaagcaggtgttcagcgacgtgcaggccagagagaaggagctgcagaccatcttcgacaccctgccccccatgagataccaggagaccatgagcgccatcagaacctgggtgcagcagagcgagaccaagctgagcatcccccagctgagcgtgaccgactacgagatcatggagcagagactgggcgagctgcaggccctgcagagcagcctgcaggagcagcagagcggcctgtactacctgagcaccaccgtgaaggagatgagcaagaaggcccccagcgagatcagcagaaagtaccagagcgagttcgaggagatcgagggcagatggaagaagctgagcagccagctggtggagcactgccagaagctggaggagcagatgaacaagctgagaaagatccagaaccacatccagaccctgaagaagtggatggccgaggtggacgtgttcctgaaggaggagtggcccgccctgggcgacagcgagatcctgaagaagcagctgaagcagtgcagactgctggtgagcgacatccagaccatccagcccagcctgaacagcgtgaacgagggcggccagaagatcaagaacgaggccgagcccgagttcgccagcagactggagaccgagctgaaggagctgaacacccagtgggaccacatgtgccagcaggtgtacgccagaaaggaggccctgaagggcggcctggagaagaccgtgagcctgcagaaggacctgagcgagatgcacgagtggatgacccaggccgaggaggagtacctggagagagacttcgagtacaagacccccgacgagctgcagaaggccgtggaggagatgaagagagccaaggaggaggcccagcagaaggaggccaaggtgaagctgctgaccgagagcgtgaacagcgtgatcgcccaggccccccccgtggcccaggaggccctgaagaaggagctggagaccctgaccaccaactaccagtggctgtgcaccagactgaacggcaagtgcaagaccctggaggaggtgtgggcctgctggcacgagctgctgagctacctggagaaggccaacaagtggctgaacgaggtggagttcaagctgaagaccaccgagaacatccccggcggcgccgaggagatcagcgaggtgctggacagcctggagaacctgatgagacacagcgaggacaaccccaaccagatcagaatcctggcccagaccctgaccgacggcggcgtgatggacgagctgatcaacgaggagctggagaccttcaacagcagatggagagagctgcacgaggaggccgtgagaagacagaagctgctggagcagagcatccagagcgcccaggagaccgagaagagcctgcacctgatccaggagagcctgaccttcatcgacaagcagctggccgcctacatcgccgacaaggtggacgccgcccagatgccccaggaggcccagaagatccagagcgacctgaccagccacgagatcagcctggaggagatgaagaagcacaaccagggcaaggaggccgcccagagagtgctgagccagatcgacgtggcccagaagaagctgcaggacgtgagcatgaagttcagactgttccagaagcccgccaacttcgagcagagactgcaggagagcaagatgatcctggacgaggtgaagatgcacctgcccgccctggagaccaagagcgtggagcaggaggtggtgcagagccagctgaaccactgcgtgaacctgtacaagagcctgagcgaggtgaagagcgaggtggagatggtgatcaagaccggcagacagatcgtgcagaagaagcagaccgagaaccccaaggagctggacgagagagtgaccgccctgaagctgcactacaacgagctgggcgccaaggtgaccgagagaaagcagcagctggagaagtgcctgaagctgagcagaaagatgagaaaggagatgaacgtgctgaccgagtggctggccgccaccgacatggagctgaccaagagaagcgccgtggagggcatgcccagcaacctggacagcgaggtggcctggggcaaggccacccagaaggagatcgagaagcagaaggtgcacctgaagagcatcaccgaggtgggcgaggccctgaagaccgtgctgggcaagaaggagaccctggtggaggacaagctgagcctgctgaacagcaactggatcgccgtgaccagcagagccgaggagtggctgaacctgctgctggagtaccagaagcacatggagaccttcgaccagaacgtggaccacatcaccaagtggatcatccaggccgacaccctgctggacgagagcgagaagaagaagccccagcagaaggaggacgtgctgaagagactgaaggccgagctgaacgacatcagacccaaggtggacagcaccagagaccaggccgccaacctgatggccaacagaggcgaccactgcagaaagctggtggagccccagatcagcgagctgaaccacagattcgccgccatcagccacagaatcaagaccggcaaggccagcatccccctgaaggagctggagcagttcaacagcgacatccagaagctgctggagcccctggaggccgagatccagcagggcgtgaacctgaaggaggaggacttcaacaaggacatgaacgaggacaacgagggcaccgtgaaggagctgctgcagagaggcgacaacctgcagcagagaatcaccgacgagagaaagagagaggagatcaagatcaagcagcagctgctgcagaccaagcacaacgccctgaaggacctgagaagccagagaagaaagaaggccctggagatcagccaccagtggtaccagtacaagagacaggccgacgacctgctgaagtgcctggacgacatcgagaagaagctggccagcctgcccgagcccagagacgagagaaagatcaaggagatcgacagagagctgcagaagaagaaggaggagctgaacgccgtgagaagacaggccgagggcctgagcgaggacggcgccgccatggccgtggagcccacccagatccagctgagcaagagatggagagagatcgagagcaagttcgcccagttcagaagactgaacttcgcccagatccacaccgtgagagaggagaccatgatggtgatgaccgaggacatgcccctggagatcagctacgtgcccagcacctacctgaccgagatcacccacgtgagccaggccctgctggaggtggagcagctgctgaacgcccccgacctgtgcgccaaggacttcgaggacctgttcaagcaggaggagagcctgaagaacatcaaggacagcctgcagcagagcagcggcagaatcgacatcatccacagcaagaagaccgccgccctgcagagcgccacccccgtggagagagtgaagctgcaggaggccctgagccagctggacttccagtgggagaaggtgaacaagatgtacaaggacagacagggcagattcgacagaagcgtggagaagtggagaagattccactacgacatcaagatcttcaaccagtggctgaccgaggccgagcagttcctgagaaagacccagatccccgagaactgggagcacgccaagtacaagtggtacctgatcgccctgaaggacggcatcggccagagacagaccgtggtgagaaccctgaacgccaccggcgaggagatcatccagcagagcagcaagaccgacgccagcatcctgcaggagaagctgggcagcctgaacctgagatggcaggaggtgtgcaagcagctgagcgacagaaagaagagactggaggagcagaagaacatcctgagcgagttccagagagacctgaacgagttcgtgctgtggctggaggaggccgacaacatcgccagcatccccctggagcccggcaaggagcagcagctgaaggagaagctggagcaggtgaagctgctggtggaggagctgcccctgagacagggcatcctgaagcagctgaacgagaccggcggccccgtgctggtgagcgcccccatcagccccgaggagcaggacaagctggagaacaagctgaagcagaccaacctgcagtggatcaaggtgagcagagccctgcccgagaagcagggcgagatcgaggcccagatcaaggacctgggccagctggagaagaagctggaggacctggaggagcagctgaaccacctgctgctgtggctgagccccatcagaaaccagctggagatctacaaccagcccaaccaggagggccccttcgacgtgaaggagaccgagatcgccgtgcaggccaagcagcccgacgtggaggagatcctgagcaagggccagcacctgtacaaggagaagcccgccacccagcccgtgaagagaaagctggaggacctgagcagcgagtggaaggccgtgaacagactgctgcaggagctgagagccaagcagcccgacctggcccccggcctgaccaccatcggcgccagccccacccagaccgtgaccctggtgacccagcccgtggtgaccaaggagaccgccatcagcaagctggagatgcccagcagcctgatgctggaggtgcccgccctggccgacttcaacagagcctggaccgagctgaccgactggctgagcctgctggaccaggtgatcaagagccagagagtgatggtgggcgacctggaggacatcaacgagatgatcatcaagcagaaggccaccatgcaggacctggagcagagaagaccccagctggaggagctgatcaccgccgcccagaacctgaagaacaagaccagcaaccaggaggccagaaccatcatcaccgacagaatcgagagaatccagaaccagtgggacgaggtgcaggagcacctgcagaacagaagacagcagctgaacgagatgctgaaggacagcacccagtggctggaggccaaggaggaggccgagcaggtgctgggccaggccagagccaagctggagagctggaaggagggcccctacaccgtggacgccatccagaagaagatcaccgagaccaagcagctggccaaggacctgagacagtggcagaccaacgtggacgtggccaacgacctggccctgaagctgctgagagactacagcgccgacgacaccagaaaggtgcacatgatcaccgagaacatcaacgccagctggagaagcatccacaagagagtgagcgagagagaggccgccctggaggagacccacagactgctgcagcagttccccctggacctggagaagttcctggcctggctgaccgaggccgagaccaccgccaacgtgctgcaggacgccaccagaaaggagagactgctggaggacagcaagggcgtgaaggagctgatgaagcagtggcaggacctgcagggcgagatcgaggcccacaccgacgtgtaccacaacctggacgagaacagccagaagatcctgagaagcctggagggcagcgacgacgccgtgctgctgcagagaagactggacaacatgaacttcaagtggagcgagctgagaaagaagagcctgaacatcagaagccacctggaggccagcagcgaccagtggaagagactgcacctgagcctgcaggagctgctggtgtggctgcagctgaaggacgacgagctgagcagacaggcccccatcggcggcgacttccccgccgtgcagaagcagaacgacgtgcacagagccttcaagagagagctgaagaccaaggagcccgtgatcatgagcaccctggagaccgtgagaatcttcctgaccgagcagcccctggagggcctggagaagctgtaccaggagcccagagagctgccccccgaggagagagcccagaacgtgaccagactgctgagaaagcaggccgaggaggtgaacaccgagtgggagaagctgaacctgcacagcgccgactggcagagaaagatcgacgagaccctggagagactgagagagctgcaggaggccaccgacgagctggacctgaagctgagacaggccgaggtgatcaagggcagctggcagcccgtgggcgacctgctgatcgacagcctgcaggaccacctggagaaggtgaaggccctgagaggcgagatcgcccccctgaaggagaacgtgagccacgtgaacgacctggccagacagctgaccaccctgggcatccagctgagcccctacaacctgagcaccctggaggacctgaacaccagatggaagctgctgcaggtggccgtggaggacagagtgagacagctgcacgaggcccacagagacttcggccccgccagccagcacttcctgagcaccagcgtgcagggcccctgggagagagccatcagccccaacaaggtgccctactacatcaaccacgagacccagaccacctgctgggaccaccccaagatgaccgagctgtaccagagcctggccgacctgaacaacgtgagattcagcgcctacagaaccgccatgaagctgagaagactgcagaaggccctgtgcctggacctgctgagcctgagcgccgcctgcgacgccctggaccagcacaacctgaagcagaacgaccagcccatggacatcctgcagatcatcaactgcctgaccaccatctacgacagactggagcaggagcacaacaacctggtgaacgtgcccctgtgcgtggacatgtgcctgaactggctgctgaacgtgtacgacaccggcagaaccggcagaatcagagtgctgagcttcaagaccggcatcatcagcctgtgcaaggcccacctggaggacaagtacagatacctgttcaagcaggtggccagcagcaccggcttctgcgaccagagaagactgggcctgctgctgcacgacagcatccagatccccagacagctgggcgaggtggccagcttcggcggcagcaacatcgagcccagcgtgagaagctgcttccagttcgccaacaacaagcccgagatcgaggccgccctgttcctggactggatgagactggagccccagagcatggtgtggctgcccgtgctgcacagagtggccgccgccgagaccgccaagcaccaggccaagtgcaacatctgcaaggagtgccccatcatcggcttcagatacagaagcctgaagcacttcaactacgacatctgccagagctgcttcttcagcggcagagtggccaagggccacaagatgcactaccccatggtggagtactgcacccccaccaccagcggcgaggacgtgagagacttcgccaaggtgctgaagaacaagttcagaaccaagagatacttcgccaagcaccccagaatgggctacctgcccgtgcagaccgtgctggagggcgacaacatggagacccccgtgaccctgatcaacttctggcccgtggacagcgcccccgccagcagcccccagctgagccacgacgacacccacagcagaatcgagcactacgccagcagactggccgagatggagaacagcaacggcagctacctgaacgacagcatcagccccaacgagagcatcgacgacgagcacctgctgatccagcactactgccagagcctgaaccaggacagccccctgagccagcccagaagccccgcccagatcctgatcagcctggagagcgaggagagaggcgagctggagagaatcctggccgacctggaggaggagaacagaaacctgcaggccgagtacgacagactgaagcagcagcacgagcacaagggcctgagccccctgcccagcccccccgagatgatgcccaccagcccccagagccccagagacgccgagctgatcgccgaggccaagctgctgagacagcacaagggcagactggaggccagaatgcagatcctggaggaccacaacaagcagctggagagccagctgcacagactgagacagctgctggagcagccccaggccgaggccaaggtgaacggcaccaccgtgagcagccccagcaccagcctgcagagaagcgacagcagccagcccatgctgctgagagtggtgggcagccagaccagcgacagcatgggcgaggaggacctgctgagccccccccaggacaccagcaccggcctggaggaggtgatggagcagctgaacaacagcttccccagcagcagaggcagaaacacccccggcaagcccatgagagaggacaccatgtag

SEQ ID NO: 80001 - DNA, 3348 bp, synthetic construct
  misc_feature 1..3348: note = Description of Artificial Sequence: Synthetic coding sequence
  source 1..3348: mol_type = other DNA
atgcccagcagcctgatgctggaggtgcccgccctggccgacttcaacagagcctggaccgagctgaccgactggctgagcctgctggaccaggtgatcaagagccagagagtgatggtgggcgacctggaggacatcaacgagatgatcatcaagcagaaggccaccatgcaggacctggagcagagaagaccccagctggaggagctgatcaccgccgcccagaacctgaagaacaagaccagcaaccaggaggccagaaccatcatcaccgacagaatcgagagaatccagaaccagtgggacgaggtgcaggagcacctgcagaacagaagacagcagctgaacgagatgctgaaggacagcacccagtggctggaggccaaggaggaggccgagcaggtgctgggccaggccagagccaagctggagagctggaaggagggcccctacaccgtggacgccatccagaagaagatcaccgagaccaagcagctggccaaggacctgagacagtggcagaccaacgtggacgtggccaacgacctggccctgaagctgctgagagactacagcgccgacgacaccagaaaggtgcacatgatcaccgagaacatcaacgccagctggagaagcatccacaagagagtgagcgagagagaggccgccctggaggagacccacagactgctgcagcagttccccctggacctggagaagttcctggcctggctgaccgaggccgagaccaccgccaacgtgctgcaggacgccaccagaaaggagagactgctggaggacagcaagggcgtgaaggagctgatgaagcagtggcaggacctgcagggcgagatcgaggcccacaccgacgtgtaccacaacctggacgagaacagccagaagatcctgagaagcctggagggcagcgacgacgccgtgctgctgcagagaagactggacaacatgaacttcaagtggagcgagctgagaaagaagagcctgaacatcagaagccacctggaggccagcagcgaccagtggaagagactgcacctgagcctgcaggagctgctggtgtggctgcagctgaaggacgacgagctgagcagacaggcccccatcggcggcgacttccccgccgtgcagaagcagaacgacgtgcacagagccttcaagagagagctgaagaccaaggagcccgtgatcatgagcaccctggagaccgtgagaatcttcctgaccgagcagcccctggagggcctggagaagctgtaccaggagcccagagagctgccccccgaggagagagcccagaacgtgaccagactgctgagaaagcaggccgaggaggtgaacaccgagtgggagaagctgaacctgcacagcgccgactggcagagaaagatcgacgagaccctggagagactgagagagctgcaggaggccaccgacgagctggacctgaagctgagacaggccgaggtgatcaagggcagctggcagcccgtgggcgacctgctgatcgacagcctgcaggaccacctggagaaggtgaaggccctgagaggcgagatcgcccccctgaaggagaacgtgagccacgtgaacgacctggccagacagctgaccaccctgggcatccagctgagcccctacaacctgagcaccctggaggacctgaacaccagatggaagctgctgcaggtggccgtggaggacagagtgagacagctgcacgaggcccacagagacttcggccccgccagccagcacttcctgagcaccagcgtgcagggcccctgggagagagccatcagccccaacaaggtgccctactacatcaaccacgagacccagaccacctgctgggaccaccccaagatgaccgagctgtaccagagcctggccgacctgaacaacgtgagattcagcgcctacagaaccgccatgaagctgagaagactgcagaaggccctgtgcctggacctgctgagcctgagcgccgcctgcgacgccctggaccagcacaacctgaagcagaacgaccagcccatggacatcctgcagatcatcaactgcctgaccaccatctacgacagactggagcaggagcacaacaacctggtgaacgtgcccctgtgcgtggacatgtgcctgaactggctgctgaacgtgtacgacaccggcagaaccggcagaatcagagtgctgagcttcaagaccggcatcatcagcctgtgcaaggcccacctggaggacaagtacagatacctgttcaagcaggtggccagcagcaccggcttctgcgaccagagaagactgggcctgctgctgcacgacagcatccagatccccagacagctgggcgaggtggccagcttcggcggcagcaacatcgagcccagcgtgagaagctgcttccagttcgccaacaacaagcccgagatcgaggccgccctgttcctggactggatgagactggagccccagagcatggtgtggctgcccgtgctgcacagagtggccgccgccgagaccgccaagcaccaggccaagtgcaacatctgcaaggagtgccccatcatcggcttcagatacagaagcctgaagcacttcaactacgacatctgccagagctgcttcttcagcggcagagtggccaagggccacaagatgcactaccccatggtggagtactgcacccccaccaccagcggcgaggacgtgagagacttcgccaaggtgctgaagaacaagttcagaaccaagagatacttcgccaagcaccccagaatgggctacctgcccgtgcagaccgtgctggagggcgacaacatggagaccaacctgcaggccgagtacgacagactgaagcagcagcacgagcacaagggcctgagccccctgcccagcccccccgagatgatgcccaccagcccccagagccccagagacgccgagctgatcgccgaggccaagctgctgagacagcacaagggcagactggaggccagaatgcagatcctggaggaccacaacaagcagctggagagccagctgcacagactgagacagctgctggagcagccccaggccgaggccaaggtgaacggcaccaccgtgagcagccccagcaccagcctgcagagaagcgacagcagccagcccatgctgctgagagtggtgggcagccagaccagcgacagcatgggcgaggaggacctgctgagccccccccaggacaccagcaccggcctggaggaggtgatggagcagctgaacaacagcttccccagcagcagaggcagaaacacccccggcaagcccatgagagaggacaccatgtag

SEQ ID NO: 80002 - DNA, 11058 bp, synthetic construct
  misc_feature 1..11058: note = Description of Artificial Sequence: Synthetic coding sequence
  source 1..11058: mol_type = other DNA
atgctgtggtgggaggaggtggaggactgctacgagagagaggacgtgcagaagaagaccttcaccaagtgggtgaacgcccagttcagcaagttcggcaagcagcacatcgagaacctgttcagcgacctgcaggacggcagaagactgctggacctgctggagggcctgaccggccagaagctgcccaaggagaagggcagcaccagagtgcacgccctgaacaacgtgaacaaggccctgagagtgctgcagaacaacaacgtggacctggtgaacatcggcagcaccgacatcgtggacggcaaccacaagctgaccctgggcctgatctggaacatcatcctgcactggcaggtgaagaacgtgatgaagaacatcatggccggcctgcagcagaccaacagcgagaagatcctgctgagctgggtgagacagagcaccagaaactacccccaggtgaacgtgatcaacttcaccaccagctggagcgacggcctggccctgaacgccctgatccacagccacagacccgacctgttcgactggaacagcgtggtgtgccagcagagcgccacccagagactggagcacgccttcaacatcgccagataccagctgggcatcgagaagctgctggaccccgaggacgtggacaccacctaccccgacaagaagagcatcctgatgtacatcaccagcctgttccaggtgctgccccagcaggtgagcatcgaggccatccaggaggtggagatgctgcccagaccccccaaggtgaccaaggaggagcacttccagctgcaccaccagatgcactacagccagcagatcaccgtgagcctggcccagggctacgagagaaccagcagccccaagcccagattcaagagctacgcctacacccaggccgcctacgtgaccaccagcgaccccaccagaagccccttccccagccagcacctggaggcccccgaggacaagagcttcggcagcagcctgatggagagcgaggtgaacctggacagataccagaccgccctggaggaggtgctgagctggctgctgagcgccgaggacaccctgcaggcccagggcgagatcagcaacgacgtggaggtggtgaaggaccagttccacacccacgagggctacatgatggacctgaccgcccaccagggcagagtgggcaacatcctgcagctgggcagcaagctgatcggcaccggcaagctgagcgaggacgaggagaccgaggtgcaggagcagatgaacctgctgaacagcagatgggagtgcctgagagtggccagcatggagaagcagagcaacctgcacagagtgctgatggacctgcagaaccagaagctgaaggagctgaacgactggctgaccaagaccgaggagagaaccagaaagatggaggaggagcccctgggccccgacctggaggacctgaagagacaggtgcagcagcacaaggtgctgcaggaggacctggagcaggagcaggtgagagtgaacagcctgacccacatggtggtggtggtggacgagagcagcggcgaccacgccaccgccgccctggaggagcagctgaaggtgctgggcgacagatgggccaacatctgcagatggaccgaggacagatgggtgctgctgcaggacatcctgctgaagtggcagagactgaccgaggagcagtgcctgttcagcgcctggctgagcgagaaggaggacgccgtgaacaagatccacaccaccggcttcaaggaccagaacgagatgctgagcagcctgcagaagctggccgtgctgaaggccgacctggagaagaagaagcagagcatgggcaagctgtacagcctgaagcaggacctgctgagcaccctgaagaacaagagcgtgacccagaagaccgaggcctggctggacaacttcgccagatgctgggacaacctggtgcagaagctggagaagagcaccgcccagatcagccaggccgtgaccaccacccagcccagcctgacccagaccaccgtgatggagaccgtgaccaccgtgaccaccagagagcagatcctggtgaagcacgcccaggaggagctgccccccccccccccccagaagaagagacagatcaccgtggacagcgagatcagaaagagactggacgtggacatcaccgagctgcacagctggatcaccagaagcgaggccgtgctgcagagccccgagttcgccatcttcagaaaggagggcaacttcagcgacctgaaggagaaggtgaacgccatcgagagagagaaggccgagaagttcagaaagctgcaggacgccagcagaagcgcccaggccctggtggagcagatggtgaacgagggcgtgaacgccgacagcatcaagcaggccagcgagcagctgaacagcagatggatcgagttctgccagctgctgagcgagagactgaactggctggagtaccagaacaacatcatcgccttctacaaccagctgcagcagctggagcagatgaccaccaccgccgagaactggctgaagatccagcccaccacccccagcgagcccaccgccatcaagagccagctgaagatctgcaaggacgaggtgaacagactgagcgacctgcagccccagatcgagagactgaagatccagagcatcgccctgaaggagaagggccagggccccatgttcctggacgccgacttcgtggccttcaccaaccacttcaagcaggtgttcagcgacgtgcaggccagagagaaggagctgcagaccatcttcgacaccctgccccccatgagataccaggagaccatgagcgccatcagaacctgggtgcagcagagcgagaccaagctgagcatcccccagctgagcgtgaccgactacgagatcatggagcagagactgggcgagctgcaggccctgcagagcagcctgcaggagcagcagagcggcctgtactacctgagcaccaccgtgaaggagatgagcaagaaggcccccagcgagatcagcagaaagtaccagagcgagttcgaggagatcgagggcagatggaagaagctgagcagccagctggtggagcactgccagaagctggaggagcagatgaacaagctgagaaagatccagaaccacatccagaccctgaagaagtggatggccgaggtggacgtgttcctgaaggaggagtggcccgccctgggcgacagcgagatcctgaagaagcagctgaagcagtgcagactgctggtgagcgacatccagaccatccagcccagcctgaacagcgtgaacgagggcggccagaagatcaagaacgaggccgagcccgagttcgccagcagactggagaccgagctgaaggagctgaacacccagtgggaccacatgtgccagcaggtgtacgccagaaaggaggccctgaagggcggcctggagaagaccgtgagcctgcagaaggacctgagcgagatgcacgagtggatgacccaggccgaggaggagtacctggagagagacttcgagtacaagacccccgacgagctgcagaaggccgtggaggagatgaagagagccaaggaggaggcccagcagaaggaggccaaggtgaagctgctgaccgagagcgtgaacagcgtgatcgcccaggccccccccgtggcccaggaggccctgaagaaggagctggagaccctgaccaccaactaccagtggctgtgcaccagactgaacggcaagtgcaagaccctggaggaggtgtgggcctgctggcacgagctgctgagctacctggagaaggccaacaagtggctgaacgaggtggagttcaagctgaagaccaccgagaacatccccggcggcgccgaggagatcagcgaggtgctggacagcctggagaacctgatgagacacagcgaggacaaccccaaccagatcagaatcctggcccagaccctgaccgacggcggcgtgatggacgagctgatcaacgaggagctggagaccttcaacagcagatggagagagctgcacgaggaggccgtgagaagacagaagctgctggagcagagcatccagagcgcccaggagaccgagaagagcctgcacctgatccaggagagcctgaccttcatcgacaagcagctggccgcctacatcgccgacaaggtggacgccgcccagatgccccaggaggcccagaagatccagagcgacctgaccagccacgagatcagcctggaggagatgaagaagcacaaccagggcaaggaggccgcccagagagtgctgagccagatcgacgtggcccagaagaagctgcaggacgtgagcatgaagttcagactgttccagaagcccgccaacttcgagcagagactgcaggagagcaagatgatcctggacgaggtgaagatgcacctgcccgccctggagaccaagagcgtggagcaggaggtggtgcagagccagctgaaccactgcgtgaacctgtacaagagcctgagcgaggtgaagagcgaggtggagatggtgatcaagaccggcagacagatcgtgcagaagaagcagaccgagaaccccaaggagctggacgagagagtgaccgccctgaagctgcactacaacgagctgggcgccaaggtgaccgagagaaagcagcagctggagaagtgcctgaagctgagcagaaagatgagaaaggagatgaacgtgctgaccgagtggctggccgccaccgacatggagctgaccaagagaagcgccgtggagggcatgcccagcaacctggacagcgaggtggcctggggcaaggccacccagaaggagatcgagaagcagaaggtgcacctgaagagcatcaccgaggtgggcgaggccctgaagaccgtgctgggcaagaaggagaccctggtggaggacaagctgagcctgctgaacagcaactggatcgccgtgaccagcagagccgaggagtggctgaacctgctgctggagtaccagaagcacatggagaccttcgaccagaacgtggaccacatcaccaagtggatcatccaggccgacaccctgctggacgagagcgagaagaagaagccccagcagaaggaggacgtgctgaagagactgaaggccgagctgaacgacatcagacccaaggtggacagcaccagagaccaggccgccaacctgatggccaacagaggcgaccactgcagaaagctggtggagccccagatcagcgagctgaaccacagattcgccgccatcagccacagaatcaagaccggcaaggccagcatccccctgaaggagctggagcagttcaacagcgacatccagaagctgctggagcccctggaggccgagatccagcagggcgtgaacctgaaggaggaggacttcaacaaggacatgaacgaggacaacgagggcaccgtgaaggagctgctgcagagaggcgacaacctgcagcagagaatcaccgacgagagaaagagagaggagatcaagatcaagcagcagctgctgcagaccaagcacaacgccctgaaggacctgagaagccagagaagaaagaaggccctggagatcagccaccagtggtaccagtacaagagacaggccgacgacctgctgaagtgcctggacgacatcgagaagaagctggccagcctgcccgagcccagagacgagagaaagatcaaggagatcgacagagagctgcagaagaagaaggaggagctgaacgccgtgagaagacaggccgagggcctgagcgaggacggcgccgccatggccgtggagcccacccagatccagctgagcaagagatggagagagatcgagagcaagttcgcccagttcagaagactgaacttcgcccagatccacaccgtgagagaggagaccatgatggtgatgaccgaggacatgcccctggagatcagctacgtgcccagcacctacctgaccgagatcacccacgtgagccaggccctgctggaggtggagcagctgctgaacgcccccgacctgtgcgccaaggacttcgaggacctgttcaagcaggaggagagcctgaagaacatcaaggacagcctgcagcagagcagcggcagaatcgacatcatccacagcaagaagaccgccgccctgcagagcgccacccccgtggagagagtgaagctgcaggaggccctgagccagctggacttccagtgggagaaggtgaacaagatgtacaaggacagacagggcagattcgacagaagcgtggagaagtggagaagattccactacgacatcaagatcttcaaccagtggctgaccgaggccgagcagttcctgagaaagacccagatccccgagaactgggagcacgccaagtacaagtggtacctgatcgccctgaaggacggcatcggccagagacagaccgtggtgagaaccctgaacgccaccggcgaggagatcatccagcagagcagcaagaccgacgccagcatcctgcaggagaagctgggcagcctgaacctgagatggcaggaggtgtgcaagcagctgagcgacagaaagaagagactggaggagcagaagaacatcctgagcgagttccagagagacctgaacgagttcgtgctgtggctggaggaggccgacaacatcgccagcatccccctggagcccggcaaggagcagcagctgaaggagaagctggagcaggtgaagctgctggtggaggagctgcccctgagacagggcatcctgaagcagctgaacgagaccggcggccccgtgctggtgagcgcccccatcagccccgaggagcaggacaagctggagaacaagctgaagcagaccaacctgcagtggatcaaggtgagcagagccctgcccgagaagcagggcgagatcgaggcccagatcaaggacctgggccagctggagaagaagctggaggacctggaggagcagctgaaccacctgctgctgtggctgagccccatcagaaaccagctggagatctacaaccagcccaaccaggagggccccttcgacgtgaaggagaccgagatcgccgtgcaggccaagcagcccgacgtggaggagatcctgagcaagggccagcacctgtacaaggagaagcccgccacccagcccgtgaagagaaagctggaggacctgagcagcgagtggaaggccgtgaacagactgctgcaggagctgagagccaagcagcccgacctggcccccggcctgaccaccatcggcgccagccccacccagaccgtgaccctggtgacccagcccgtggtgaccaaggagaccgccatcagcaagctggagatgcccagcagcctgatgctggaggtgcccgccctggccgacttcaacagagcctggaccgagctgaccgactggctgagcctgctggaccaggtgatcaagagccagagagtgatggtgggcgacctggaggacatcaacgagatgatcatcaagcagaaggccaccatgcaggacctggagcagagaagaccccagctggaggagctgatcaccgccgcccagaacctgaagaacaagaccagcaaccaggaggccagaaccatcatcaccgacagaatcgagagaatccagaaccagtgggacgaggtgcaggagcacctgcagaacagaagacagcagctgaacgagatgctgaaggacagcacccagtggctggaggccaaggaggaggccgagcaggtgctgggccaggccagagccaagctggagagctggaaggagggcccctacaccgtggacgccatccagaagaagatcaccgagaccaagcagctggccaaggacctgagacagtggcagaccaacgtggacgtggccaacgacctggccctgaagctgctgagagactacagcgccgacgacaccagaaaggtgcacatgatcaccgagaacatcaacgccagctggagaagcatccacaagagagtgagcgagagagaggccgccctggaggagacccacagactgctgcagcagttccccctggacctggagaagttcctggcctggctgaccgaggccgagaccaccgccaacgtgctgcaggacgccaccagaaaggagagactgctggaggacagcaagggcgtgaaggagctgatgaagcagtggcaggacctgcagggcgagatcgaggcccacaccgacgtgtaccacaacctggacgagaacagccagaagatcctgagaagcctggagggcagcgacgacgccgtgctgctgcagagaagactggacaacatgaacttcaagtggagcgagctgagaaagaagagcctgaacatcagaagccacctggaggccagcagcgaccagtggaagagactgcacctgagcctgcaggagctgctggtgtggctgcagctgaaggacgacgagctgagcagacaggcccccatcggcggcgacttccccgccgtgcagaagcagaacgacgtgcacagagccttcaagagagagctgaagaccaaggagcccgtgatcatgagcaccctggagaccgtgagaatcttcctgaccgagcagcccctggagggcctggagaagctgtaccaggagcccagagagctgccccccgaggagagagcccagaacgtgaccagactgctgagaaagcaggccgaggaggtgaacaccgagtgggagaagctgaacctgcacagcgccgactggcagagaaagatcgacgagaccctggagagactgagagagctgcaggaggccaccgacgagctggacctgaagctgagacaggccgaggtgatcaagggcagctggcagcccgtgggcgacctgctgatcgacagcctgcaggaccacctggagaaggtgaaggccctgagaggcgagatcgcccccctgaaggagaacgtgagccacgtgaacgacctggccagacagctgaccaccctgggcatccagctgagcccctacaacctgagcaccctggaggacctgaacaccagatggaagctgctgcaggtggccgtggaggacagagtgagacagctgcacgaggcccacagagacttcggccccgccagccagcacttcctgagcaccagcgtgcagggcccctgggagagagccatcagccccaacaaggtgccctactacatcaaccacgagacccagaccacctgctgggaccaccccaagatgaccgagctgtaccagagcctggccgacctgaacaacgtgagattcagcgcctacagaaccgccatgaagctgagaagactgcagaaggccctgtgcctggacctgctgagcctgagcgccgcctgcgacgccctggaccagcacaacctgaagcagaacgaccagcccatggacatcctgcagatcatcaactgcctgaccaccatctacgacagactggagcaggagcacaacaacctggtgaacgtgcccctgtgcgtggacatgtgcctgaactggctgctgaacgtgtacgacaccggcagaaccggcagaatcagagtgctgagcttcaagaccggcatcatcagcctgtgcaaggcccacctggaggacaagtacagatacctgttcaagcaggtggccagcagcaccggcttctgcgaccagagaagactgggcctgctgctgcacgacagcatccagatccccagacagctgggcgaggtggccagcttcggcggcagcaacatcgagcccagcgtgagaagctgcttccagttcgccaacaacaagcccgagatcgaggccgccctgttcctggactggatgagactggagccccagagcatggtgtggctgcccgtgctgcacagagtggccgccgccgagaccgccaagcaccaggccaagtgcaacatctgcaaggagtgccccatcatcggcttcagatacagaagcctgaagcacttcaactacgacatctgccagagctgcttcttcagcggcagagtggccaagggccacaagatgcactaccccatggtggagtactgcacccccaccaccagcggcgaggacgtgagagacttcgccaaggtgctgaagaacaagttcagaaccaagagatacttcgccaagcaccccagaatgggctacctgcccgtgcagaccgtgctggagggcgacaacatggagacccccgtgaccctgatcaacttctggcccgtggacagcgcccccgccagcagcccccagctgagccacgacgacacccacagcagaatcgagcactacgccagcagactggccgagatggagaacagcaacggcagctacctgaacgacagcatcagccccaacgagagcatcgacgacgagcacctgctgatccagcactactgccagagcctgaaccaggacagccccctgagccagcccagaagccccgcccagatcctgatcagcctggagagcgaggagagaggcgagctggagagaatcctggccgacctggaggaggagaacagaaacctgcaggccgagtacgacagactgaagcagcagcacgagcacaagggcctgagccccctgcccagcccccccgagatgatgcccaccagcccccagagccccagagacgccgagctgatcgccgaggccaagctgctgagacagcacaagggcagactggaggccagaatgcagatcctggaggaccacaacaagcagctggagagccagctgcacagactgagacagctgctggagcagccccaggccgaggccaaggtgaacggcaccaccgtgagcagccccagcaccagcctgcagagaagcgacagcagccagcccatgctgctgagagtggtgggcagccagaccagcgacagcatgggcgaggaggacctgctgagccccccccaggacaccagcaccggcctggaggaggtgatggagcagctgaacaacagcttccccagcagcagaggcagaaacacccccggcaagcccatgagagaggacaccatgtag

SEQ ID NO: 80003 - DNA, 2874 bp, synthetic construct
  misc_feature 1..2874: note = Description of Artificial Sequence: Synthetic coding sequence
  source 1..2874: mol_type = other DNA
atgcagcccatggtgatgcagggctgcccctacaccctgcccagatgccacgactggcaggccgccgaccagttccaccacagcagcagcctgagaagcacctgcccccacccccaggtgagagccgccgtgaccagccccgcccccccccaggacggcgccggcgtgccctgcctgagcctgaagctgctgaacggcagcgtgggcgccagcggccccctggagccccccgccatgaacctgtgctggaacgagatcaagaagaagagccacaacctgagagccagactggaggccttcagcgaccacagcggcaagctgcagctgcccctgcaggagatcatcgactggctgagccagaaggacgaggagctgagcgcccagctgcccctgcagggcgacgtggccctggtgcagcaggagaaggagacccacgccgccttcatggaggaggtgaagagcagaggcccctacatctacagcgtgctggagagcgcccaggccttcctgagccagcaccccttcgaggagctggaggagccccacagcgagagcaaggacaccagccccaagcagagaatccagaacctgagcagattcgtgtggaagcaggccaccgtggccagcgagctgtgggagaagctgaccgccagatgcgtggaccagcacagacacatcgagagaaccctggagcagctgctggagatccagggcgccatggaggagctgagcaccaccctgagccaggccgagggcgtgagagccacctgggagcccatcggcgacctgttcatcgacagcctgcccgagcacatccaggccatcaagctgttcaaggaggagttcagccccatgaaggacggcgtgaagctggtgaacgacctggcccaccagctggccatcagcgacgtgcacctgagcatggagaacagccaggccctggagcagatcaacgtgagatggaagcagctgcaggccagcgtgagcgagagactgaagcagctgcaggacgcccacagagacttcggccccggcagccagcacttcctgagcagcagcgtgcaggtgccctgggagagagccatcagccccaacaaggtgccctactacatcaaccaccaggcccagaccacctgctgggaccaccccaagatgaccgagctgtaccagaccctggccgacctgaacaacatcaagttcagcgcctacagaaccgccatgaagctgagaagagtgcagaaggccctgagactggacctggtgaccctgaccaccgccctggagatcttcaacgagcacgacctgcaggccagcgagcacgtgatggacgtggtggaggtgatccactgcctgaccgccctgtacgagagactggaggaggagagaggcatcctggtgaacgtgcccctgtgcgtggacatgagcctgaactggctgctgaacgtgttcgacagcggcagaagcggcaagatgagagccctgagcttcaagaccggcatcgcctgcctgtgcggcaccgaggtgaaggagaagctgcagtacctgttcagccaggtggccaacagcggcagccagtgcgaccagagacacctgggcgtgctgctgcacgaggccatccaggtgcccagacagctgggcgaggtggccgccttcggcggcagcaacgtggagcccagcgtgagaagctgcttcagattcagcaccggcaagcccgtgatcgaggccagccagttcctggagtgggtgaacctggagccccagagcatggtgtggctggccgtgctgcacagagtgaccatcgccgagcaggtgaagcaccagaccaagtgcagcatctgcagacagtgccccatcaagggcttcagatacagaagcctgaagcagttcaacgtggacatctgccagacctgcttcctgaccggcagagccagcaagggcaacaagctgcactaccccatcatggagtactacacccccaccaccagcagcgagaacatgagagacttcgccaccaccctgaagaacaagttcagaagcaagcactacttcagcaagcacccccagagaggctacctgcccgtgcagagcgtgctggaggccgactacagcgagacccccgccagcagccccatgtggccccacgccgacacccacagcagaatcgagcacttcgccagcagactggccgagatggagagccagaactgcagcttcttcaacgacagcctgagccccgacgacagcatcgacgaggaccagtacctgctgagacacagcagccccatcaccgacagagagcccgccttcggccagcaggccccctgcagcgtggccaccgagagcaagggcgagctgcagaagatcctggcccacctggaggacgagaacagaatcctgcagggcgagctgagaagactgaagtggcagcacgaggaggccgccgaggcccccagcctggccgacggcagcaccgaggccgccaccgaccacagaaacgaggagctgctggccgaggccagaatcctgagacagcacaagagcagactggagaccagaatgcagatcctggaggaccacaacaagcagctggagagccagctgcagagactgagagagctgctgctgcagccccccaccgagagcgacggcagcggcagcgccggcagcagcctggccagcagcccccagcagagcgagggcagccaccccagagagaagggccagaccacccccgacaccgaggccgccgacgacgtgggcagcaagagccaggacgtgagcctgtgcctggaggacatcatggagaagctgagacacgccttccccagcgtgagaagcagcgacgtgaccgccaacaccctgctggccagctag

SEQ ID NO: 80004 - DNA, 2874 bp, synthetic construct; identical to SEQ ID NO: 80003
  misc_feature 1..2874: note = Description of Artificial Sequence: Synthetic coding sequence
  source 1..2874: mol_type = other DNA

SEQ ID NO: 80005 - DNA, 2874 bp, synthetic construct; identical to SEQ ID NO: 80003
  misc_feature 1..2874: note = Description of Artificial Sequence: Synthetic coding sequence
  source 1..2874: mol_type = other DNA

SEQ ID NO: 80006 - DNA, 2640 bp, synthetic construct
  misc_feature 1..2640: note = Description of Artificial Sequence: Synthetic coding sequence
  source 1..2640: mol_type = other DNA
atgaacctgtgctggaacgagatcaagaagaagagccacaacctgagagccagactggaggccttcagcgaccacagcggcaagctgcagctgcccctgcaggagatcatcgactggctgagccagaaggacgaggagctgagcgcccagctgcccctgcagggcgacgtggccctggtgcagcaggagaaggagacccacgccgccttcatggaggaggtgaagagcagaggcccctacatctacagcgtgctggagagcgcccaggccttcctgagccagcaccccttcgaggagctggaggagccccacagcgagagcaaggacaccagccccaagcagagaatccagaacctgagcagattcgtgtggaagcaggccaccgtggccagcgagctgtgggagaagctgaccgccagatgcgtggaccagcacagacacatcgagagaaccctggagcagctgctggagatccagggcgccatggaggagctgagcaccaccctgagccaggccgagggcgtgagagccacctgggagcccatcggcgacctgttcatcgacagcctgcccgagcacatccaggccatcaagctgttcaaggaggagttcagccccatgaaggacggcgtgaagctggtgaacgacctggcccaccagctggccatcagcgacgtgcacctgagcatggagaacagccaggccctggagcagatcaacgtgagatggaagcagctgcaggccagcgtgagcgagagactgaagcagctgcaggacgcccacagagacttcggccccggcagccagcacttcctgagcagcagcgtgcaggtgccctgggagagagccatcagccccaacaaggtgccctactacatcaaccaccaggcccagaccacctgctgggaccaccccaagatgaccgagctgtaccagaccctggccgacctgaacaacatcaagttcagcgcctacagaaccgccatgaagctgagaagagtgcagaaggccctgagactggacctggtgaccctgaccaccgccctggagatcttcaacgagcacgacctgcaggccagcgagcacgtgatggacgtggtggaggtgatccactgcctgaccgccctgtacgagagactggaggaggagagaggcatcctggtgaacgtgcccctgtgcgtggacatgagcctgaactggctgctgaacgtgttcgacagcggcagaagcggcaagatgagagccctgagcttcaagaccggcatcgcctgcctgtgcggcaccgaggtgaaggagaagctgcagtacctgttcagccaggtggccaacagcggcagccagtgcgaccagagacacctgggcgtgctgctgcacgaggccatccaggtgcccagacagctgggcgaggtggccgccttcggcggcagcaacgtggagcccagcgtgagaagctgcttcagattcagcaccggcaagcccgtgatcgaggccagccagttcctggagtgggtgaacctggagccccagagcatggtgtggctggccgtgctgcacagagtgaccatcgccgagcaggtgaagcaccagaccaagtgcagcatctgcagacagtgccccatcaagggcttcagatacagaagcctgaagcagttcaacgtggacatctgccagacctgcttcctgaccggcagagccagcaagggcaacaagctgcactaccccatcatggagtactacacccccaccaccagcagcgagaacatgagagacttcgccaccaccctgaagaacaagttcagaagcaagcactacttcagcaagcacccccagagaggctacctgcccgtgcagagcgtgctggaggccgactacagcgagacccccgccagcagccccatgtggccccacgccgacacccacagcagaatcgagcacttcgccagcagactggccgagatggagagccagaactgcagcttcttcaacgacagcctgagccccgacgacagcatcgacgaggaccagtacctgctgagacacagcagccccatcaccgacagagagcccgccttcggccagcaggccccctgcagcgtggccaccgagagcaagggcgagctgcagaagatcctggcccacctggaggacgagaacagaatcctgcagggcgagctgagaagactgaagtggcagcacgaggaggccgccgaggcccccagcctggccgacggcagcaccgaggccgccaccgaccacagaaacgaggagctgctggccgaggccagaatcctgagacagcacaagagcagactggagaccagaatgcagatcctggaggaccacaacaagcagctggagagccagctgcagagactgagagagctgctgctgcagccccccaccgagagcgacggcagcggcagcgccggcagcagcctggccagcagcccccagcagagcgagggcagccaccccagagagaagggccagaccacccccgacaccgaggccgccgacgacgtgggcagcaagagccaggacgtgagcctgtgcctggaggacatcatggagaagctgagacacgccttccccagcgtgagaagcagcgacgtgaccgccaacaccctgctggccagctag

SEQ ID NO: 80007 - DNA, 9129 bp, synthetic construct
  misc_feature 1..9129: note = Description of Artificial Sequence: Synthetic coding sequence
  source 1..9129: mol_type = other DNA
atgcaccacggcaccggcccccagaacgtgcagcaccagctgcagagaagcagagcctgccccggcagcgagggcgaggagcagcccgcccaccccaaccccccccccagccccgccgcccccttcgcccccagcgccagccccagcgccccccagagccccagctaccagatccagcagctgatgaacagaagccccgccaccggccagaacgtgaacatcaccctgcagagcgtgggccccgtggtgggcggcaaccagcagatcaccctggcccccctgcccctgcccagccccaccagccccggcttccagttcagcgcccagcccagaagattcgagcacggcagccccagctacatccaggtgaccagccccctgagccagcaggtgcagacccagagccccacccagcccagccccggccccggccaggccctgcagaacgtgagagccggcgcccccggccccggcctgggcctgtgcagcagcagccccaccggcggcttcgtggacgccagcgtgctggtgagacagatcagcctgagccccagcagcggcggccacttcgtgttccaggacggcagcggcctgacccagatcgcccagggcgcccaggtgcagctgcagcaccccggcacccccatcaccgtgagagagagaagacccagccagccccacacccagagcggcggcaccatccaccacctgggcccccagagccccgccgccgccggcggcgccggcctgcagcccctggccagccccagccacatcaccaccgccaacctgcccccccagatcagcagcatcatccagggccagctggtgcagcagcagcaggtgctgcagggcccccccctgcccagacccctgggcttcgagagaacccccggcgtgctgctgcccggcgccggcggcgccgccggcttcggcatgaccagcccccccccccccaccagccccagcagaaccgccgtgccccccggcctgagcagcctgcccctgaccagcgtgggcaacaccggcatgaagaaggtgcccaagaagctggaggagatcccccccgccagccccgagatggcccagatgagaaagcagtgcctggactaccactaccaggagatgcaggccctgaaggaggtgttcaaggagtacctgatcgagctgttcttcctgcagcacttccagggcaacatgatggacttcctggccttcaagaagaagcactacgcccccctgcaggcctacctgagacagaacgacctggacatcgaggaggaggaggaggaggaggaggaggaggaggagaagagcgaggtgatcaacgacgagcagcaggccctggccggcagcctggtggccggcgccggcagcaccgtggagaccgacctgttcaagagacagcaggccatgcccagcaccggcatggccgagcagagcaagagacccagactggaggtgggccaccagggcgtggtgttccagcaccccggcgccgacgccggcgtgcccctgcagcagctgatgcccaccgcccagggcggcatgccccccaccccccaggccgcccagctggccggccagagacagagccagcagcagtacgaccccagcaccggcccccccgtgcagaacgccgccagcctgcacacccccctgccccagctgcccggcagactgccccccgccggcgtgcccaccgccgccctgagcagcgccctgcagttcgcccagcagccccaggtggtggaggcccagacccagctgcagatccccgtgaagacccagcagcccaacgtgcccatccccgccccccccagcagccagctgcccatcccccccagccagcccgcccagctggccctgcacgtgcccacccccggcaaggtgcaggtgcaggccagccagctgagcagcctgccccagatggtggccagcaccagactgcccgtggaccccgcccccccctgccccagacccctgcccaccagcagcaccagcagcctggcccccgtgagcggcagcggccccggccccagccccgccagaagcagccccgtgaacagacccagcagcgccaccaacaaggccctgagccccgtgaccagcagaacccccggcgtggtggccagcgcccccaccaagccccagagccccgcccagaacgccaccagcagccaggacagcagccaggacaccctgaccgagcagatcaccctggagaaccaggtgcaccagagaatcgccgagctgagaaaggccggcctgtggagccagagaagactgcccaagctgcaggaggcccccagacccaagagccactgggactacctgctggaggagatgcagtggatggccaccgacttcgcccaggagagaagatggaaggtggccgccgccaagaagctggtgagaaccgtggtgagacaccacgaggagaagcagctgagagaggagagaggcaagaaggaggagcagagcagactgagaagaatcgccgccagcaccgccagagagatcgagtgcttctggagcaacatcgagcaggtggtggagatcaagctgagagtggagctggaggagaagagaaagaaggccctgaacctgcagaaggtgagcagaagaggcaaggagctgagacccaagggcttcgacgccctgcaggagagcagcctggacagcggcatgagcggcagaaagagaaaggccagcatcagcctgaccgacgacgaggtggacgacgaggaggagaccatcgaggaggaggaggccaacgagggcgtggtggaccaccagaccgagctgagcaacctggccaaggaggccgagctgcccctgctggacctgatgaagctgtacgagggcgccttcctgcccagcagccagtggcccagacccaagcccgacggcgaggacaccagcggcgaggaggacgccgacgactgccccggcgacagagagagcagaaaggacctggtgctgatcgacagcctgttcatcatggaccagttcaaggccgccgagagaatgaacatcggcaagcccaacgccaaggacatcgccgacgtgaccgccgtggccgaggccatcctgcccaagggcagcgccagagtgaccaccagcgtgaagttcaacgcccccagcctgctgtacggcgccctgagagactaccagaagatcggcctggactggctggccaagctgtacagaaagaacctgaacggcatcctggccgacgaggccggcctgggcaagaccgtgcagatcatcgccttcttcgcccacctggcctgcaacgagggcaactggggcccccacctggtggtggtgagaagctgcaacatcctgaagtgggagctggagctgaagagatggtgccccggcctgaagatcctgagctacatcggcagccacagagagctgaaggccaagagacaggagtgggccgagcccaacagcttccacgtgtgcatcaccagctacacccagttcttcagaggcctgaccgccttcaccagagtgagatggaagtgcctggtgatcgacgagatgcagagagtgaagggcatgaccgagagacactgggaggccgtgttcaccctgcagagccagcagagactgctgctgatcgacagccccctgcacaacaccttcctggagctgtggaccatggtgcacttcctggtgcccggcatcagcagaccctacctgagcagccccctgagagcccccagcgaggagagccaggactactaccacaaggtggtgatcagactgcacagagtgacccagcccttcatcctgagaagaaccaagagagacgtggagaagcagctgaccaagaagtacgagcacgtgctgaagtgcagactgagcaacagacagaaggccctgtacgaggacgtgatcctgcagcccggcacccaggaggccctgaagagcggccacttcgtgaacgtgctgagcatcctggtgagactgcagagaatctgcaaccaccccggcctggtggagcccagacaccccggcagcagctacgtggccggccccctggagtaccccagcgccagcctgatcctgaaggccctggagagagacttctggaaggaggccgacctgagcatgttcgacctgatcggcctggagaacaagatcaccagacacgaggccgagctgctgagcaagaagaagatccccagaaagctgatggaggagatcagcaccagcgccgcccccgccgccagacccgccgccgccaagctgaaggccagcagactgttccagcccgtgcagtacggccagaagcccgagggcagaaccgtggccttccccagcacccacccccccagaaccgccgcccccaccaccgccagcgccgccccccagggccccctgagaggcagaccccccatcgccaccttcagcgccaaccccgaggccaagggcggcgaggtggtgaagatcgcccagctggccagcatcaccggcccccagagcagagtggcccagcccgagacccccgtgaccctgcagttccagggcagcaagttcaccctgagccacagccagctgagacagctgaccgccggccagcccctgcagctgcagggcagcgtgctgcagatcgtgagcgcccccggccagccctacctgagagcccccggccccgtggtgatgcagaccgtgagccaggccggcgccgtgcacggcgccctgggcagcaagccccccgccggcggccccagccccgcccccctgaccccccaggtgggcgtgcccggcagagtggccgtgaacgccctggccgtgggcgagcccggcaccgccagcaagcccgccagccccatcggcggccccacccaggaggagaagaccagactgctgaaggagagactggaccagatctacctggtgaacgagagaagatgcagccaggcccccgtgtacggcagagacctgctgagaatctgcgccctgcccagccacggcagagtgcagtggagaggcagcctggacggcagaagaggcaaggaggccggccccgcccacagctacaccagcagcagcgagagccccagcgagctgatgctgaccctgtgcagatgcggcgagagcctgcaggacgtgatcgacagagtggccttcgtgatcccccccgtggtggccgccccccccagcctgagagtgcccagacccccccccctgtacagccacagaatgagaatcctgagacagggcctgagagagcacgccgccccctacttccagcagctgagacagaccaccgcccccagactgctgcagttccccgagctgagactggtgcagttcgacagcggcaagctggaggccctggccatcctgctgcagaagctgaagagcgagggcagaagagtgctgatcctgagccagatgatcctgatgctggacatcctggagatgttcctgaacttccactacctgacctacgtgagaatcgacgagaacgccagcagcgagcagagacaggagctgatgagaagcttcaacagagacagaagaatcttctgcgccatcctgagcacccacagcagaaccaccggcatcaacctggtggaggccgacaccgtggtgttctacgacaacgacctgaaccccgtgatggacgccaaggcccaggagtggtgcgacagaatcggcagatgcaaggacatccacatctacagactggtgagcggcaacagcatcgaggagaagctgctgaagaacggcaccaaggacctgatcagagaggtggccgcccagggcaacgactacagcatggccttcctgacccagagaaccatccaggagctgttcgaggtgtacagccccatggacgacgccggcttccccgtgaaggccgaggagttcgtggtgctgagccaggagcccagcgtgaccgagaccatcgcccccaagatcgccagacccttcatcgaggccctgaagagcatcgagtacctggaggaggacgcccagaagagcgcccaggagggcgtgctgggcccccacaccgacgccctgagcagcgacagcgagaacatgccctgcgacgaggagcccagccagctggaggagctggccgacttcatggagcagctgacccccatcgagaagtacgccctgaactacctggagctgttccacaccagcatcgagcaggagaaggagagaaacagcgaggacgccgtgatgaccgccgtgagagcctgggagttctggaacctgaagaccctgcaggagagagaggccagactgagactggagcaggaggaggccgagctgctgacctacaccagagaggacgcctacagcatggagtacgtgtacgaggacgtggacggccagaccgaggtgatgcccctgtggaccccccccacccccccccaggacgacagcgacatctacctggacagcgtgatgtgcctgatgtacgaggccacccccatccccgaggccaagctgccccccgtgtacgtgagaaaggagagaaagagacacaagaccgaccccagcgccgccggcagaaagaagaagcagagacacggcgaggccgtggtgccccccagaagcctgttcgacagagccacccccggcctgctgaagatcagaagagagggcaaggagcagaagaagaacatcctgctgaagcagcaggtgcccttcgccaagcccctgcccaccttcgccaagcccaccgccgagcccggccaggacaaccccgagtggctgatcagcgaggactgggccctgctgcaggccgtgaagcagctgctggagctgcccctgaacctgaccatcgtgagccccgcccacacccccaactgggacctggtgagcgacgtggtgaacagctgcagcagaatctacagaagcagcaagcagtgcagaaacagatacgagaacgtgatcatccccagagaggagggcaagagcaagaacaacagacccctgagaaccagccagatctacgcccaggacgagaacgccacccacacccagctgtacaccagccacttcgacctgatgaagatgaccgccggcaagagaagcccccccatcaagcccctgctgggcatgaaccccttccagaagaaccccaagcacgccagcgtgctggccgagagcggcatcaactacgacaagcccctgccccccatccaggtggccagcctgagagccgagagaatcgccaaggagaagaaggccctggccgaccagcagaaggcccagcagcccgccgtggcccagcccccccccccccagccccagccccccccccccccccagcagccccccccccccctgccccagccccaggccgccggcagccagccccccgccggcccccccgccgtgcagccccagccccagccccagccccagacccagccccagcccgtgcaggcccccgccaaggcccagcccgccatcaccaccggcggcagcgccgccgtgctggccggcaccatcaagaccagcgtgaccggcaccagcatgcccaccggcgccgtgagcggcaacgtgatcgtgaacaccatcgccggcgtgcccgccgccaccttccagagcatcaacaagagactggccagccccgtggcccccggcgccctgaccacccccggcggcagcgcccccgcccaggtggtgcacacccagcccccccccagagccgtgggcagccccgccaccgccacccccgacctggtgagcatggccaccacccagggcgtgagagccgtgaccagcgtgaccgccagcgccgtggtgaccaccaacctgacccccgtgcagacccccgccagaagcctggtgccccaggtgagccaggccaccggcgtgcagctgcccggcaagaccatcacccccgcccacttccagctgctgagacagcagcagcagcagcagcagcagcagcagcagcagcagcagcagcagcagcagcagcagcagcagcagcagcagcagcagcagcagaccaccaccaccagccaggtgcaggtgccccagatccagggccaggcccagagccccgcccagatcaaggccgtgggcaagctgacccccgagcacctgatcaagatgcagaagcagaagctgcagatgcccccccagcccccccccccccaggcccagagcgcccccccccagcccaccgcccaggtgcaggtgcagaccagccagcccccccagcagcagagcccccagctgaccaccgtgaccgcccccagacccggcgccctgctgaccggcaccaccgtggccaacctgcaggtggccagactgaccagagtgcccaccagccagctgcaggcccagggccagatgcagacccaggccccccagcccgcccaggtggccctggccaagccccccgtggtgagcgtgcccgccgccgtggtgagcagccccggcgtgaccaccctgcccatgaacgtggccggcatcagcgtggccatcggccagccccagaaggccgccggccagaccgtggtggcccagcccgtgcacatgcagcagctgctgaagctgaagcagcaggccgtgcagcagcagaaggccatccagccccaggccgcccagggccccgccgccgtgcagcagaagatcaccgcccagcagatcaccacccccggcgcccagcagaaggtggcctacgccgcccagcccgccctgaagacccagttcctgaccacccccatcagccaggcccagaagctggccggcgcccagcaggtgcagacccagatccaggtggccaagctgccccaggtggtgcagcagcagacccccgtggccagcatccagcaggtggccagcgccagccagcaggccagcccccagaccgtggccctgacccaggccaccgccgccggccagcaggtgcagatgatccccgccgtgaccgccaccgcccaggtggtgcagcagaagctgatccagcagcaggtggtgaccaccgccagcgcccccctgcagacccccggcgcccccaaccccgcccaggtgcccgccagcagcgacagccccagccagcagcccaagctgcagatgagagtgcccgccgtgagactgaagacccccaccaagcccccctgccagtag

SEQ ID NO: 80008 - DNA, 9261 bp, synthetic construct
  misc_feature 1..9261: note = Description of Artificial Sequence: Synthetic coding sequence
  source 1..9261: mol_type = other DNA
atgcaccacggcaccggcccccagaacgtgcagcaccagctgcagagaagcagagcctgccccggcagcgagggcgaggagcagcccgcccaccccaaccccccccccagccccgccgcccccttcgcccccagcgccagccccagcgccccccagagccccagctaccagatccagcagctgatgaacagaagccccgccaccggccagaacgtgaacatcaccctgcagagcgtgggccccgtggtgggcggcaaccagcagatcaccctggcccccctgcccctgcccagccccaccagccccggcttccagttcagcgcccagcccagaagattcgagcacggcagccccagctacatccaggtgaccagccccctgagccagcaggtgcagacccagagccccacccagcccagccccggccccggccaggccctgcagaacgtgagagccggcgcccccggccccggcctgggcctgtgcagcagcagccccaccggcggcttcgtggacgccagcgtgctggtgagacagatcagcctgagccccagcagcggcggccacttcgtgttccaggacggcagcggcctgacccagatcgcccagggcgcccaggtgcagctgcagcaccccggcacccccatcaccgtgagagagagaagacccagccagccccacacccagagcggcggcaccatccaccacctgggcccccagagccccgccgccgccggcggcgccggcctgcagcccctggccagccccagccacatcaccaccgccaacctgcccccccagatcagcagcatcatccagggccagctggtgcagcagcagcaggtgctgcagggcccccccctgcccagacccctgggcttcgagagaacccccggcgtgctgctgcccggcgccggcggcgccgccggcttcggcatgaccagcccccccccccccaccagccccagcagaaccgccgtgccccccggcctgagcagcctgcccctgaccagcgtgggcaacaccggcatgaagaaggtgcccaagaagctggaggagatcccccccgccagccccgagatggcccagatgagaaagcagtgcctggactaccactaccaggagatgcaggccctgaaggaggtgttcaaggagtacctgatcgagctgttcttcctgcagcacttccagggcaacatgatggacttcctggccttcaagaagaagcactacgcccccctgcaggcctacctgagacagaacgacctggacatcgaggaggaggaggaggaggaggaggaggaggaggagaagagcgaggtgatcaacgacgagcaggccctggccggcagcctggtggccggcgccggcagcaccgtggagaccgacctgttcaagagacagcaggccatgcccagcaccggcatggccggcggcatgccccccaccccccaggccgcccagctggccggccagagacagagccagcagcagtacgaccccagcaccggcccccccgtgcagaacgccgccagcctgcacacccccctgccccagctgcccggcagactgccccccgccggcgtgcccaccgccgccctgagcagcgccctgcagttcgcccagcagccccaggtggtggaggcccagacccagctgcagatccccgtgaagacccagcagcccaacgtgcccatccccgccccccccagcagccagctgcccatcccccccagccagcccgcccagctggccctgcacgtgcccacccccggcaaggtgcaggtgcaggccagccagctgagcagcctgccccagatggtggccagcaccagactgcccgtggaccccgcccccccctgccccagacccctgcccaccagcagcaccagcagcctggcccccgtgagcggcagcggccccggccccagccccgccagaagcagccccgtgaacagacccagcagcgccaccaacaaggccctgagccccgtgaccagcagaacccccggcgtggtggccagcgcccccaccaagccccagagccccgcccagaacgccaccagcagccaggacagcagccaggacaccctgaccgagcagatcaccctggagaaccaggtgcaccagagaatcgccgagctgagaaaggccggcctgtggagccagagaagactgcccaagctgcaggaggcccccagacccaagagccactgggactacctgctggaggagatgcagtggatggccaccgacttcgcccaggagagaagatggaaggtggccgccgccaagaagctggtgagaaccgtggtgagacaccacgaggagaagcagctgagagaggagagaggcaagaaggaggagcagagcagactgagaagaatcgccgccagcaccgccagagagatcgagtgcttctggagcaacatcgagcaggtggtggagatcaagctgagagtggagctggaggagaagagaaagaaggccctgaacctgcagaaggtgagcagaagaggcaaggagctgagacccaagggcttcgacgccctgcaggagagcagcctggacagcggcatgagcggcagaaagagaaaggccagcatcagcctgaccgacgacgaggtggacgacgaggaggagaccatcgaggaggaggaggccaacgagggcgtggtggaccaccagaccgagctgagcaacctggccaaggaggccgagctgcccctgctggacctgatgaagctgtacgagggcgccttcctgcccagcagccagtggcccagacccaagcccgacggcgaggacaccagcggcgaggaggacgccgacgactgccccggcgacagagagagcagaaaggacctggtgctgatcgacagcctgttcatcatggaccagttcaaggccgccgagagaatgaacatcggcaagcccaacgccaaggacatcgccgacgtgaccgccgtggccgaggccatcctgcccaagggcagcgccagagtgaccaccagcgtgaagttcaacgcccccagcctgctgtacggcgccctgagagactaccagaagatcggcctggactggctggccaagctgtacagaaagaacctgaacggcatcctggccgacgaggccggcctgggcaagaccgtgcagatcatcgccttcttcgcccacctggcctgcaacgagggcaactggggcccccacctggtggtggtgagaagctgcaacatcctgaagtgggagctggagctgaagagatggtgccccggcctgaagatcctgagctacatcggcagccacagagagctgaaggccaagagacaggagtgggccgagcccaacagcttccacgtgtgcatcaccagctacacccagttcttcagaggcctgaccgccttcaccagagtgagatggaagtgcctggtgatcgacgagatgcagagagtgaagggcatgaccgagagacactgggaggccgtgttcaccctgcagagccagcagagactgctgctgatcgacagccccctgcacaacaccttcctggagctgtggaccatggtgcacttcctggtgcccggcatcagcagaccctacctgagcagccccctgagagcccccagcgaggagagccaggactactaccacaaggtggtgatcagactgcacagagtgacccagcccttcatcctgagaagaaccaagagagacgtggagaagcagctgaccaagaagtacgagcacgtgctgaagtgcagactgagcaacagacagaaggccctgtacgaggacgtgatcctgcagcccggcacccaggaggccctgaagagcggccacttcgtgaacgtgctgagcatcctggtgagactgcagagaatctgcaaccaccccggcctggtggagcccagacaccccggcagcagctacgtggccggccccctggagtaccccagcgccagcctgatcctgaaggccctggagagagacttctggaaggaggccgacctgagcatgttcgacctgatcggcctggagaacaagatcaccagacacgaggccgagctgctgagcaagaagaagatccccagaaagctgatggaggagatcagcaccagcgccgcccccgccgccagacccgccgccgccaagctgaaggccagcagactgttccagcccgtgcagtacggccagaagcccgagggcagaaccgtggccttccccagcacccacccccccagaaccgccgcccccaccaccgccagcgccgccccccagggccccctgagaggcagaccccccatcgccaccttcagcgccaaccccgaggccaaggccgccgccgcccccttccagaccagccaggccagcgccagcgcccccagacaccagcccgccagcgccagcagcaccgccgccagccccgcccaccccgccaagctgagagcccagaccaccgcccaggccagcacccccggccagccccccccccagccccaggcccccagccacgccgccggccagagcgccctgccccagagactggtgctgcccagccaggcccaggccagactgcccagcggcgaggtggtgaagatcgcccagctggccagcatcaccggcccccagagcagagtggcccagcccgagacccccgtgaccctgcagttccagggcagcaagttcaccctgagccacagccagctgagacagctgaccgccggccagcccctgcagctgcagggcagcgtgctgcagatcgtgagcgcccccggccagccctacctgagagcccccggccccgtggtgatgcagaccgtgagccaggccggcgccgtgcacggcgccctgggcagcaagccccccgccggcggccccagccccgcccccctgaccccccaggtgggcgtgcccggcagagtggccgtgaacgccctggccgtgggcgagcccggcaccgccagcaagcccgccagccccatcggcggccccacccaggaggagaagaccagactgctgaaggagagactggaccagatctacctggtgaacgagagaagatgcagccaggcccccgtgtacggcagagacctgctgagaatctgcgccctgcccagccacggcagagtgcagtggagaggcagcctggacggcagaagaggcaaggaggccggccccgcccacagctacaccagcagcagcgagagccccagcgagctgatgctgaccctgtgcagatgcggcgagagcctgcaggacgtgatcgacagagtggccttcgtgatcccccccgtggtggccgccccccccagcctgagagtgcccagacccccccccctgtacagccacagaatgagaatcctgagacagggcctgagagagcacgccgccccctacttccagcagctgagacagaccaccgcccccagactgctgcagttccccgagctgagactggtgcagttcgacagcggcaagctggaggccctggccatcctgctgcagaagctgaagagcgagggcagaagagtgctgatcctgagccagatgatcctgatgctggacatcctggagatgttcctgaacttccactacctgacctacgtgagaatcgacgagaacgccagcagcgagcagagacaggagctgatgagaagcttcaacagagacagaagaatcttctgcgccatcctgagcacccacagcagaaccaccggcatcaacctggtggaggccgacaccgtggtgttctacgacaacgacctgaaccccgtgatggacgccaaggcccaggagtggtgcgacagaatcggcagatgcaaggacatccacatctacagactggtgagcggcaacagcatcgaggagaagctgctgaagaacggcaccaaggacctgatcagagaggtggccgcccagggcaacgactacagcatggccttcctgacccagagaaccatccaggagctgttcgaggtgtacagccccatggacgacgccggcttccccgtgaaggccgaggagttcgtggtgctgagccaggagcccagcgtgaccgagaccatcgcccccaagatcgccagacccttcatcgaggccctgaagagcatcgagtacctggaggaggacgcccagaagagcgcccaggagggcgtgctgggcccccacaccgacgccctgagcagcgacagcgagaacatgccctgcgacgaggagcccagccagctggaggagctggccgacttcatggagcagctgacccccatcgagaagtacgccctgaactacctggagctgttccacaccagcatcgagcaggagaaggagagaaacagcgaggacgccgtgatgaccgccgtgagagcctgggagttctggaacctgaagaccctgcaggagagagaggccagactgagactggagcaggaggaggccgagctgctgacctacaccagagaggacgcctacagcatggagtacgtgtacgaggacgtggacggccagaccgaggtgatgcccctgtggaccccccccacccccccccaggacgacagcgacatctacctggacagcgtgatgtgcctgatgtacgaggccacccccatccccgaggccaagctgccccccgtgtacgtgagaaaggagagaaagagacacaagaccgaccccagcgccgccggcagaaagaagaagcagagacacggcgaggccgtggtgccccccagaagcctgttcgacagagccacccccggcctgctgaagatcagaagagagggcaaggagcagaagaagaacatcctgctgaagcagcaggtgcccttcgccaagcccctgcccaccttcgccaagcccaccgccgagcccggccaggacaaccccgagtggctgatcagcgaggactgggccctgctgcaggccgtgaagcagctgctggagctgcccctgaacctgaccatcgtgagccccgcccacacccccaactgggacctggtgagcgacgtggtgaacagctgcagcagaatctacagaagcagcaagcagtgcagaaacagatacgagaacgtgatcatccccagagaggagggcaagagcaagaacaacagacccctgagaaccagccagatctacgcccaggacgagaacgccacccacacccagctgtacaccagccacttcgacctgatgaagatgaccgccggcaagagaagcccccccatcaagcccctgctgggcatgaaccccttccagaagaaccccaagcacgccagcgtgctggccgagagcggcatcaactacgacaagcccctgccccccatccaggtggccagcctgagagccgagagaatcgccaaggagaagaaggccctggccgaccagcagaaggcccagcagcccgccgtggcccagcccccccccccccagccccagccccccccccccccccagcagccccccccccccctgccccagccccaggccgccggcagccagccccccgccggcccccccgccgtgcagccccagccccagccccagccccagacccagccccagcccgtgcaggcccccgccaaggcccagcccgccatcaccaccggcggcagcgccgccgtgctggccggcaccatcaagaccagcgtgaccggcaccagcatgcccaccggcgccgtgagcggcaacgtgatcgtgaacaccatcgccggcgtgcccgccgccaccttccagagcatcaacaagagactggccagccccgtggcccccggcgccctgaccacccccggcggcagcgcccccgcccaggtggtgcacacccagcccccccccagagccgtgggcagccccgccaccgccacccccgacctggtgagcatggccaccacccagggcgtgagagccgtgaccagcgtgaccgccagcgccgtggtgaccaccaacctgacccccgtgcagacccccgccagaagcctggtgccccaggtgagccaggccaccggcgtgcagctgcccggcaagaccatcacccccgcccacttccagctgctgagacagcagcagcagcagcagcagcagcagcagcagcagcagcagcagcagcagcagcagcagcagcagcagcagcagcagcagcagcagaccaccaccaccagccaggtgcaggtgccccagatccagggccaggcccagagccccgcccagatcaaggccgtgggcaagctgacccccgagcacctgatcaagatgcagaagcagaagctgcagatgcccccccagcccccccccccccaggcccagagcgcccccccccagcccaccgcccaggtgcaggtgcagaccagccagcccccccagcagcagagcccccagctgaccaccgtgaccgcccccagacccggcgccctgctgaccggcaccaccgtggccaacctgcaggtggccagactgaccagagtgcccaccagccagctgcaggcccagggccagatgcagacccaggccccccagcccgcccaggtggccctggccaagccccccgtggtgagcgtgcccgccgccgtggtgagcagccccggcgtgaccaccctgcccatgaacgtggccggcatcagcgtggccatcggccagccccagaaggccgccggccagaccgtggtggcccagcccgtgcacatgcagcagctgctgaagctgaagcagcaggccgtgcagcagcagaaggccatccagccccaggccgcccagggccccgccgccgtgcagcagaagatcaccgcccagcagatcaccacccccggcgcccagcagaaggtggcctacgccgcccagcccgccctgaagacccagttcctgaccacccccatcagccaggcccagaagctggccggcgcccagcaggtgcagacccagatccaggtggccaagctgccccaggtggtgcagcagcagacccccgtggccagcatccagcaggtggccagcgccagccagcaggccagcccccagaccgtggccctgacccaggccaccgccgccggccagcaggtgcagatgatccccgccgtgaccgccaccgcccaggtggtgcagcagaagctgatccagcagcaggtggtgaccaccgccagcgcccccctgcagacccccggcgcccccaaccccgcccaggtgcccgccagcagcgacagccccagccagcagcccaagctgcagatgagagtgcccgccgtgagactgaagacccccaccaagcccccctgccagtag

SEQ ID NO: 80009 - DNA, 9480 bp, synthetic construct
  misc_feature 1..9480: note = Description of Artificial Sequence: Synthetic coding sequence
  source 1..9480: mol_type = other DNA
atgcaccacggcaccggcccccagaacgtgcagcaccagctgcagagaagcagagcctgccccggcagcgagggcgaggagcagcccgcccaccccaaccccccccccagccccgccgcccccttcgcccccagcgccagccccagcgccccccagagccccagctaccagatccagcagctgatgaacagaagccccgccaccggccagaacgtgaacatcaccctgcagagcgtgggccccgtggtgggcggcaaccagcagatcaccctggcccccctgcccctgcccagccccaccagccccggcttccagttcagcgcccagcccagaagattcgagcacggcagccccagctacatccaggtgaccagccccctgagccagcaggtgcagacccagagccccacccagcccagccccggccccggccaggccctgcagaacgtgagagccggcgcccccggccccggcctgggcctgtgcagcagcagccccaccggcggcttcgtggacgccagcgtgctggtgagacagatcagcctgagccccagcagcggcggccacttcgtgttccaggacggcagcggcctgacccagatcgcccagggcgcccaggtgcagctgcagcaccccggcacccccatcaccgtgagagagagaagacccagccagccccacacccagagcggcggcaccatccaccacctgggcccccagagccccgccgccgccggcggcgccggcctgcagcccctggccagccccagccacatcaccaccgccaacctgcccccccagatcagcagcatcatccagggccagctggtgcagcagcagcaggtgctgcagggcccccccctgcccagacccctgggcttcgagagaacccccggcgtgctgctgcccggcgccggcggcgccgccggcttcggcatgaccagcccccccccccccaccagccccagcagaaccgccgtgccccccggcctgagcagcctgcccctgaccagcgtgggcaacaccggcatgaagaaggtgcccaagaagctggaggagatcccccccgccagccccgagatggcccagatgagaaagcagtgcctggactaccactaccaggagatgcaggccctgaaggaggtgttcaaggagtacctgatcgagctgttcttcctgcagcacttccagggcaacatgatggacttcctggccttcaagaagaagcactacgcccccctgcaggcctacctgagacagaacgacctggacatcgaggaggaggaggaggaggaggaggaggaggaggagaagagcgaggtgatcaacgacgaggtgaaggtggtgaccggcaaggacggccagaccggcacccccgtggccatcgccacccagctgccccccaaggtgagcgccgccttcagcagccagcagcagcccttccagcaggccctggccggcagcctggtggccggcgccggcagcaccgtggagaccgacctgttcaagagacagcaggccatgcccagcaccggcatggccgagcagagcaagagacccagactggaggtgggccaccagggcgtggtgttccagcaccccggcgccgacgccggcgtgcccctgcagcagctgatgcccaccgcccagggcggcatgccccccaccccccaggccgcccagctggccggccagagacagagccagcagcagtacgaccccagcaccggcccccccgtgcagaacgccgccagcctgcacacccccctgccccagctgcccggcagactgccccccgccggcgtgcccaccgccgccctgagcagcgccctgcagttcgcccagcagccccaggtggtggaggcccagacccagctgcagatccccgtgaagacccagcagcccaacgtgcccatccccgccccccccagcagccagctgcccatcccccccagccagcccgcccagctggccctgcacgtgcccacccccggcaaggtgcaggtgcaggccagccagctgagcagcctgccccagatggtggccagcaccagactgcccgtggaccccgcccccccctgccccagacccctgcccaccagcagcaccagcagcctggcccccgtgagcggcagcggccccggccccagccccgccagaagcagccccgtgaacagacccagcagcgccaccaacaaggccctgagccccgtgaccagcagaacccccggcgtggtggccagcgcccccaccaagccccagagccccgcccagaacgccaccagcagccaggacagcagccaggacaccctgaccgagcagatcaccctggagaaccaggtgcaccagagaatcgccgagctgagaaaggccggcctgtggagccagagaagactgcccaagctgcaggaggcccccagacccaagagccactgggactacctgctggaggagatgcagtggatggccaccgacttcgcccaggagagaagatggaaggtggccgccgccaagaagctggtgagaaccgtggtgagacaccacgaggagaagcagctgagagaggagagaggcaagaaggaggagcagagcagactgagaagaatcgccgccagcaccgccagagagatcgagtgcttctggagcaacatcgagcaggtggtggagatcaagctgagagtggagctggaggagaagagaaagaaggccctgaacctgcagaaggtgagcagaagaggcaaggagctgagacccaagggcttcgacgccctgcaggagagcagcctggacagcggcatgagcggcagaaagagaaaggccagcatcagcctgaccgacgacgaggtggacgacgaggaggagaccatcgaggaggaggaggccaacgagggcgtggtggaccaccagaccgagctgagcaacctggccaaggaggccgagctgcccctgctggacctgatgaagctgtacgagggcgccttcctgcccagcagccagtggcccagacccaagcccgacggcgaggacaccagcggcgaggaggacgccgacgactgccccggcgacagagagagcagaaaggacctggtgctgatcgacagcctgttcatcatggaccagttcaaggccgccgagagaatgaacatcggcaagcccaacgccaaggacatcgccgacgtgaccgccgtggccgaggccatcctgcccaagggcagcgccagagtgaccaccagcgtgaagttcaacgcccccagcctgctgtacggcgccctgagagactaccagaagatcggcctggactggctggccaagctgtacagaaagaacctgaacggcatcctggccgacgaggccggcctgggcaagaccgtgcagatcatcgccttcttcgcccacctggcctgcaacgagggcaactggggcccccacctggtggtggtgagaagctgcaacatcctgaagtgggagctggagctgaagagatggtgccccggcctgaagatcctgagctacatcggcagccacagagagctgaaggccaagagacaggagtgggccgagcccaacagcttccacgtgtgcatcaccagctacacccagttcttcagaggcctgaccgccttcaccagagtgagatggaagtgcctggtgatcgacgagatgcagagagtgaagggcatgaccgagagacactgggaggccgtgttcaccctgcagagccagcagagactgctgctgatcgacagccccctgcacaacaccttcctggagctgtggaccatggtgcacttcctggtgcccggcatcagcagaccctacctgagcagccccctgagagcccccagcgaggagagccaggactactaccacaaggtggtgatcagactgcacagagtgacccagcccttcatcctgagaagaaccaagagagacgtggagaagcagctgaccaagaagtacgagcacgtgctgaagtgcagactgagcaacagacagaaggccctgtacgaggacgtgatcctgcagcccggcacccaggaggccctgaagagcggccacttcgtgaacgtgctgagcatcctggtgagactgcagagaatctgcaaccaccccggcctggtggagcccagacaccccggcagcagctacgtggccggccccctggagtaccccagcgccagcctgatcctgaaggccctggagagagacttctggaaggaggccgacctgagcatgttcgacctgatcggcctggagaacaagatcaccagacacgaggccgagctgctgagcaagaagaagatccccagaaagctgatggaggagatcagcaccagcgccgcccccgccgccagacccgccgccgccaagctgaaggccagcagactgttccagcccgtgcagtacggccagaagcccgagggcagaaccgtggccttccccagcacccacccccccagaaccgccgcccccaccaccgccagcgccgccccccagggccccctgagaggcagaccccccatcgccaccttcagcgccaaccccgaggccaaggccgccgccgcccccttccagaccagccaggccagcgccagcgcccccagacaccagcccgccagcgccagcagcaccgccgccagccccgcccaccccgccaagctgagagcccagaccaccgcccaggccagcacccccggccagccccccccccagccccaggcccccagccacgccgccggccagagcgccctgccccagagactggtgctgcccagccaggcccaggccagactgcccagcggcgaggtggtgaagatcgcccagctggccagcatcaccggcccccagagcagagtggcccagcccgagacccccgtgaccctgcagttccagggcagcaagttcaccctgagccacagccagctgagacagctgaccgccggccagcccctgcagctgcagggcagcgtgctgcagatcgtgagcgcccccggccagccctacctgagagcccccggccccgtggtgatgcagaccgtgagccaggccggcgccgtgcacggcgccctgggcagcaagccccccgccggcggccccagccccgcccccctgaccccccaggtgggcgtgcccggcagagtggccgtgaacgccctggccgtgggcgagcccggcaccgccagcaagcccgccagccccatcggcggccccacccaggaggagaagaccagactgctgaaggagagactggaccagatctacctggtgaacgagagaagatgcagccaggcccccgtgtacggcagagacctgctgagaatctgcgccctgcccagccacggcagagtgcagtggagaggcagcctggacggcagaagaggcaaggaggccggccccgcccacagctacaccagcagcagcgagagccccagcgagctgatgctgaccctgtgcagatgcggcgagagcctgcaggacgtgatcgacagagtggccttcgtgatcccccccgtggtggccgccccccccagcctgagagtgcccagacccccccccctgtacagccacagaatgagaatcctgagacagggcctgagagagcacgccgccccctacttccagcagctgagacagaccaccgcccccagactgctgcagttccccgagctgagactggtgcagttcgacagcggcaagctggaggccctggccatcctgctgcagaagctgaagagcgagggcagaagagtgctgatcctgagccagatgatcctgatgctggacatcctggagatgttcctgaacttccactacctgacctacgtgagaatcgacgagaacgccagcagcgagcagagacaggagctgatgagaagcttcaacagagacagaagaatcttctgcgccatcctgagcacccacagcagaaccaccggcatcaacctggtggaggccgacaccgtggtgttctacgacaacgacctgaaccccgtgatggacgccaaggcccaggagtggtgcgacagaatcggcagatgcaaggacatccacatctacagactggtgagcggcaacagcatcgaggagaagctgctgaagaacggcaccaaggacctgatcagagaggtggccgcccagggcaacgactacagcatggccttcctgacccagagaaccatccaggagctgttcgaggtgtacagccccatggacgacgccggcttccccgtgaaggccgaggagttcgtggtgctgagccaggagcccagcgtgaccgagaccatcgcccccaagatcgccagacccttcatcgaggccctgaagagcatcgagtacctggaggaggacgcccagaagagcgcccaggagggcgtgctgggcccccacaccgacgccctgagcagcgacagcgagaacatgccctgcgacgaggagcccagccagctggaggagctggccgacttcatggagcagctgacccccatcgagaagtacgccctgaactacctggagctgttccacaccagcatcgagcaggagaaggagagaaacagcgaggacgccgtgatgaccgccgtgagagcctgggagttctggaacctgaagaccctgcaggagagagaggccagactgagactggagcaggaggaggccgagctgctgacctacaccagagaggacgcctacagcatggagtacgtgtacgaggacgtggacggccagaccgaggtgatgcccctgtggaccccccccacccccccccaggacgacagcgacatctacctggacagcgtgatgtgcctgatgtacgaggccacccccatccccgaggccaagctgccccccgtgtacgtgagaaaggagagaaagagacacaagaccgaccccagcgccgccggcagaaagaagaagcagagacacggcgaggccgtggtgccccccagaagcctgttcgacagagccacccccggcctgctgaagatcagaagagagggcaaggagcagaagaagaacatcctgctgaagcagcaggtgcccttcgccaagcccctgcccaccttcgccaagcccaccgccgagcccggccaggacaaccccgagtggctgatcagcgaggactgggccctgctgcaggccgtgaagcagctgctggagctgcccctgaacctgaccatcgtgagccccgcccacacccccaactgggacctggtgagcgacgtggtgaacagctgcagcagaatctacagaagcagcaagcagtgcagaaacagatacgagaacgtgatcatccccagagaggagggcaagagcaagaacaacagacccctgagaaccagccagatctacgcccaggacgagaacgccacccacacccagctgtacaccagccacttcgacctgatgaagatgaccgccggcaagagaagcccccccatcaagcccctgctgggcatgaaccccttccagaagaaccccaagcacgccagcgtgctggccgagagcggcatcaactacgacaagcccctgccccccatccaggtggccagcctgagagccgagagaatcgccaaggagaagaaggccctggccgaccagcagaaggcccagcagcccgccgtggcccagcccccccccccccagccccagccccccccccccccccagcagccccccccccccctgccccagccccaggccgccggcagccagccccccgccggcccccccgccgtgcagccccagccccagccccagccccagacccagccccagcccgtgcaggcccccgccaaggcccagcccgccatcaccaccggcggcagcgccgccgtgctggccggcaccatcaagaccagcgtgaccggcaccagcatgcccaccggcgccgtgagcggcaacgtgatcgtgaacaccatcgccggcgtgcccgccgccaccttccagagcatcaacaagagactggccagccccgtggcccccggcgccctgaccacccccggcggcagcgcccccgcccaggtggtgcacacccagcccccccccagagccgtgggcagccccgccaccgccacccccgacctggtgagcatggccaccacccagggcgtgagagccgtgaccagcgtgaccgccagcgccgtggtgaccaccaacctgacccccgtgcagacccccgccagaagcctggtgccccaggtgagccaggccaccggcgtgcagctgcccggcaagaccatcacccccgcccacttccagctgctgagacagcagcagcagcagcagcagcagcagcagcagcagcagcagcagcagcagcagcagcagcagcagcagcagcagcagcagcagcagaccaccaccaccagccaggtgcaggtgccccagatccagggccaggcccagagccccgcccagatcaaggccgtgggcaagctgacccccgagcacctgatcaagatgcagaagcagaagctgcagatgcccccccagcccccccccccccaggcccagagcgcccccccccagcccaccgcccaggtgcaggtgcagaccagccagcccccccagcagcagagcccccagctgaccaccgtgaccgcccccagacccggcgccctgctgaccggcaccaccgtggccaacctgcaggtggccagactgaccagagtgcccaccagccagctgcaggcccagggccagatgcagacccaggccccccagcccgcccaggtggccctggccaagccccccgtggtgagcgtgcccgccgccgtggtgagcagccccggcgtgaccaccctgcccatgaacgtggccggcatcagcgtggccatcggccagccccagaaggccgccggccagaccgtggtggcccagcccgtgcacatgcagcagctgctgaagctgaagcagcaggccgtgcagcagcagaaggccatccagccccaggccgcccagggccccgccgccgtgcagcagaagatcaccgcccagcagatcaccacccccggcgcccagcagaaggtggcctacgccgcccagcccgccctgaagacccagttcctgaccacccccatcagccaggcccagaagctggccggcgcccagcaggtgcagacccagatccaggtggccaagctgccccaggtggtgcagcagcagacccccgtggccagcatccagcaggtggccagcgccagccagcaggccagcccccagaccgtggccctgacccaggccaccgccgccggccagcaggtgcagatgatccccgccgtgaccgccaccgcccaggtggtgcagcagaagctgatccagcagcaggtggtgaccaccgccagcgcccccctgcagacccccggcgcccccaaccccgcccaggtgcccgccagcagcgacagccccagccagcagcccaagctgcagatgagagtgcccgccgtgagactgaagacccccaccaagcccccctgccagtag

SEQ ID NO: 80010 - DNA, 9372 bp, synthetic construct
  misc_feature 1..9372: note = Description of Artificial Sequence: Synthetic coding sequence
  source 1..9372: mol_type = other DNA
atgcaccacggcaccggcccccagaacgtgcagcaccagctgcagagaagcagagcctgccccggcagcgagggcgaggagcagcccgcccaccccaaccccccccccagccccgccgcccccttcgcccccagcgccagccccagcgccccccagagccccagctaccagatccagcagctgatgaacagaagccccgccaccggccagaacgtgaacatcaccctgcagagcgtgggccccgtggtgggcggcaaccagcagatcaccctggcccccctgcccctgcccagccccaccagccccggcttccagttcagcgcccagcccagaagattcgagcacggcagccccagctacatccaggtgaccagccccctgagccagcaggtgcagacccagagccccacccagcccagccccggccccggccaggccctgcagaacgtgagagccggcgcccccggccccggcctgggcctgtgcagcagcagccccaccggcggcttcgtggacgccagcgtgctggtgagacagatcagcctgagccccagcagcggcggccacttcgtgttccaggacggcagcggcctgacccagatcgcccagggcgcccaggtgcagctgcagcaccccggcacccccatcaccgtgagagagagaagacccagccagccccacacccagagcggcggcaccatccaccacctgggcccccagagccccgccgccgccggcggcgccggcctgcagcccctggccagccccagccacatcaccaccgccaacctgcccccccagatcagcagcatcatccagggccagctggtgcagcagcagcaggtgctgcagggcccccccctgcccagacccctgggcttcgagagaacccccggcgtgctgctgcccggcgccggcggcgccgccggcttcggcatgaccagcccccccccccccaccagccccagcagaaccgccgtgccccccggcctgagcagcctgcccctgaccagcgtgggcaacaccggcatgaagaaggtgcccaagaagctggaggagatcccccccgccagccccgagatggcccagatgagaaagcagtgcctggactaccactaccaggagatgcaggccctgaaggaggtgttcaaggagtacctgatcgagctgttcttcctgcagcacttccagggcaacatgatggacttcctggccttcaagaagaagcactacgcccccctgcaggcctacctgagacagaacgacctggacatcgaggaggaggaggaggaggaggaggaggaggaggagaagagcgaggtgatcaacgacgagcagcaggccctggccggcagcctggtggccggcgccggcagcaccgtggagaccgacctgttcaagagacagcaggccatgcccagcaccggcatggccgagcagagcaagagacccagactggaggtgggccaccagggcgtggtgttccagcaccccggcgccgacgccggcgtgcccctgcagcagctgatgcccaccgcccagggcggcatgccccccaccccccaggccgcccagctggccggccagagacagagccagcagcagtacgaccccagcaccggcccccccgtgcagaacgccgccagcctgcacacccccctgccccagctgcccggcagactgccccccgccggcgtgcccaccgccgccctgagcagcgccctgcagttcgcccagcagccccaggtggtggaggcccagacccagctgcagatccccgtgaagacccagcagcccaacgtgcccatccccgccccccccagcagccagctgcccatcccccccagccagcccgcccagctggccctgcacgtgcccacccccggcaaggtgcaggtgcaggccagccagctgagcagcctgccccagatggtggccagcaccagactgcccgtggaccccgcccccccctgccccagacccctgcccaccagcagcaccagcagcctggcccccgtgagcggcagcggccccggccccagccccgccagaagcagccccgtgaacagacccagcagcgccaccaacaaggccctgagccccgtgaccagcagaacccccggcgtggtggccagcgcccccaccaagccccagagccccgcccagaacgccaccagcagccaggacagcagccaggacaccctgaccgagcagatcaccctggagaaccaggtgcaccagagaatcgccgagctgagaaaggccggcctgtggagccagagaagactgcccaagctgcaggaggcccccagacccaagagccactgggactacctgctggaggagatgcagtggatggccaccgacttcgcccaggagagaagatggaaggtggccgccgccaagaagctggtgagaaccgtggtgagacaccacgaggagaagcagctgagagaggagagaggcaagaaggaggagcagagcagactgagaagaatcgccgccagcaccgccagagagatcgagtgcttctggagcaacatcgagcaggtggtggagatcaagctgagagtggagctggaggagaagagaaagaaggccctgaacctgcagaaggtgagcagaagaggcaaggagctgagacccaagggcttcgacgccctgcaggagagcagcctggacagcggcatgagcggcagaaagagaaaggccagcatcagcctgaccgacgacgaggtggacgacgaggaggagaccatcgaggaggaggaggccaacgagggcgtggtggaccaccagaccgagctgagcaacctggccaaggaggccgagctgcccctgctggacctgatgaagctgtacgagggcgccttcctgcccagcagccagtggcccagacccaagcccgacggcgaggacaccagcggcgaggaggacgccgacgactgccccggcgacagagagagcagaaaggacctggtgctgatcgacagcctgttcatcatggaccagttcaaggccgccgagagaatgaacatcggcaagcccaacgccaaggacatcgccgacgtgaccgccgtggccgaggccatcctgcccaagggcagcgccagagtgaccaccagcgtgaagttcaacgcccccagcctgctgtacggcgccctgagagactaccagaagatcggcctggactggctggccaagctgtacagaaagaacctgaacggcatcctggccgacgaggccggcctgggcaagaccgtgcagatcatcgccttcttcgcccacctggcctgcaacgagggcaactggggcccccacctggtggtggtgagaagctgcaacatcctgaagtgggagctggagctgaagagatggtgccccggcctgaagatcctgagctacatcggcagccacagagagctgaaggccaagagacaggagtgggccgagcccaacagcttccacgtgtgcatcaccagctacacccagttcttcagaggcctgaccgccttcaccagagtgagatggaagtgcctggtgatcgacgagatgcagagagtgaagggcatgaccgagagacactgggaggccgtgttcaccctgcagagccagcagagactgctgctgatcgacagccccctgcacaacaccttcctggagctgtggaccatggtgcacttcctggtgcccggcatcagcagaccctacctgagcagccccctgagagcccccagcgaggagagccaggactactaccacaaggtggtgatcagactgcacagagtgacccagcccttcatcctgagaagaaccaagagagacgtggagaagcagctgaccaagaagtacgagcacgtgctgaagtgcagactgagcaacagacagaaggccctgtacgaggacgtgatcctgcagcccggcacccaggaggccctgaagagcggccacttcgtgaacgtgctgagcatcctggtgagactgcagagaatctgcaaccaccccggcctggtggagcccagacaccccggcagcagctacgtggccggccccctggagtaccccagcgccagcctgatcctgaaggccctggagagagacttctggaaggaggccgacctgagcatgttcgacctgatcggcctggagaacaagatcaccagacacgaggccgagctgctgagcaagaagaagatccccagaaagctgatggaggagatcagcaccagcgccgcccccgccgccagacccgccgccgccaagctgaaggccagcagactgttccagcccgtgcagtacggccagaagcccgagggcagaaccgtggccttccccagcacccacccccccagaaccgccgcccccaccaccgccagcgccgccccccagggccccctgagaggcagaccccccatcgccaccttcagcgccaaccccgaggccaaggccgccgccgcccccttccagaccagccaggccagcgccagcgcccccagacaccagcccgccagcgccagcagcaccgccgccagccccgcccaccccgccaagctgagagcccagaccaccgcccaggccagcacccccggccagccccccccccagccccaggcccccagccacgccgccggccagagcgccctgccccagagactggtgctgcccagccaggcccaggccagactgcccagcggcgaggtggtgaagatcgcccagctggccagcatcaccggcccccagagcagagtggcccagcccgagacccccgtgaccctgcagttccagggcagcaagttcaccctgagccacagccagctgagacagctgaccgccggccagcccctgcagctgcagggcagcgtgctgcagatcgtgagcgcccccggccagccctacctgagagcccccggccccgtggtgatgcagaccgtgagccaggccggcgccgtgcacggcgccctgggcagcaagccccccgccggcggccccagccccgcccccctgaccccccaggtgggcgtgcccggcagagtggccgtgaacgccctggccgtgggcgagcccggcaccgccagcaagcccgccagccccatcggcggccccacccaggaggagaagaccagactgctgaaggagagactggaccagatctacctggtgaacgagagaagatgcagccaggcccccgtgtacggcagagacctgctgagaatctgcgccctgcccagccacggcagagtgcagtggagaggcagcctggacggcagaagaggcaaggaggccggccccgcccacagctacaccagcagcagcgagagccccagcgagctgatgctgaccctgtgcagatgcggcgagagcctgcaggacgtgatcgacagagtggccttcgtgatcccccccgtggtggccgccccccccagcctgagagtgcccagacccccccccctgtacagccacagaatgagaatcctgagacagggcctgagagagcacgccgccccctacttccagcagctgagacagaccaccgcccccagactgctgcagttccccgagctgagactggtgcagttcgacagcggcaagctggaggccctggccatcctgctgcagaagctgaagagcgagggcagaagagtgctgatcctgagccagatgatcctgatgctggacatcctggagatgttcctgaacttccactacctgacctacgtgagaatcgacgagaacgccagcagcgagcagagacaggagctgatgagaagcttcaacagagacagaagaatcttctgcgccatcctgagcacccacagcagaaccaccggcatcaacctggtggaggccgacaccgtggtgttctacgacaacgacctgaaccccgtgatggacgccaaggcccaggagtggtgcgacagaatcggcagatgcaaggacatccacatctacagactggtgagcggcaacagcatcgaggagaagctgctgaagaacggcaccaaggacctgatcagagaggtggccgcccagggcaacgactacagcatggccttcctgacccagagaaccatccaggagctgttcgaggtgtacagccccatggacgacgccggcttccccgtgaaggccgaggagttcgtggtgctgagccaggagcccagcgtgaccgagaccatcgcccccaagatcgccagacccttcatcgaggccctgaagagcatcgagtacctggaggaggacgcccagaagagcgcccaggagggcgtgctgggcccccacaccgacgccctgagcagcgacagcgagaacatgccctgcgacgaggagcccagccagctggaggagctggccgacttcatggagcagctgacccccatcgagaagtacgccctgaactacctggagctgttccacaccagcatcgagcaggagaaggagagaaacagcgaggacgccgtgatgaccgccgtgagagcctgggagttctggaacctgaagaccctgcaggagagagaggccagactgagactggagcaggaggaggccgagctgctgacctacaccagagaggacgcctacagcatggagtacgtgtacgaggacgtggacggccagaccgaggtgatgcccctgtggaccccccccacccccccccaggacgacagcgacatctacctggacagcgtgatgtgcctgatgtacgaggccacccccatccccgaggccaagctgccccccgtgtacgtgagaaaggagagaaagagacacaagaccgaccccagcgccgccggcagaaagaagaagcagagacacggcgaggccgtggtgccccccagaagcctgttcgacagagccacccccggcctgctgaagatcagaagagagggcaaggagcagaagaagaacatcctgctgaagcagcaggtgcccttcgccaagcccctgcccaccttcgccaagcccaccgccgagcccggccaggacaaccccgagtggctgatcagcgaggactgggccctgctgcaggccgtgaagcagctgctggagctgcccctgaacctgaccatcgtgagccccgcccacacccccaactgggacctggtgagcgacgtggtgaacagctgcagcagaatctacagaagcagcaagcagtgcagaaacagatacgagaacgtgatcatccccagagaggagggcaagagcaagaacaacagacccctgagaaccagccagatctacgcccaggacgagaacgccacccacacccagctgtacaccagccacttcgacctgatgaagatgaccgccggcaagagaagcccccccatcaagcccctgctgggcatgaaccccttccagaagaaccccaagcacgccagcgtgctggccgagagcggcatcaactacgacaagcccctgccccccatccaggtggccagcctgagagccgagagaatcgccaaggagaagaaggccctggccgaccagcagaaggcccagcagcccgccgtggcccagcccccccccccccagccccagccccccccccccccccagcagccccccccccccctgccccagccccaggccgccggcagccagccccccgccggcccccccgccgtgcagccccagccccagccccagccccagacccagccccagcccgtgcaggcccccgccaaggcccagcccgccatcaccaccggcggcagcgccgccgtgctggccggcaccatcaagaccagcgtgaccggcaccagcatgcccaccggcgccgtgagcggcaacgtgatcgtgaacaccatcgccggcgtgcccgccgccaccttccagagcatcaacaagagactggccagccccgtggcccccggcgccctgaccacccccggcggcagcgcccccgcccaggtggtgcacacccagcccccccccagagccgtgggcagccccgccaccgccacccccgacctggtgagcatggccaccacccagggcgtgagagccgtgaccagcgtgaccgccagcgccgtggtgaccaccaacctgacccccgtgcagacccccgccagaagcctggtgccccaggtgagccaggccaccggcgtgcagctgcccggcaagaccatcacccccgcccacttccagctgctgagacagcagcagcagcagcagcagcagcagcagcagcagcagcagcagcagcagcagcagcagcagcagcagcagcagcagcagcagcagaccaccaccaccagccaggtgcaggtgccccagatccagggccaggcccagagccccgcccagatcaaggccgtgggcaagctgacccccgagcacctgatcaagatgcagaagcagaagctgcagatgcccccccagcccccccccccccaggcccagagcgcccccccccagcccaccgcccaggtgcaggtgcagaccagccagcccccccagcagcagagcccccagctgaccaccgtgaccgcccccagacccggcgccctgctgaccggcaccaccgtggccaacctgcaggtggccagactgaccagagtgcccaccagccagctgcaggcccagggccagatgcagacccaggccccccagcccgcccaggtggccctggccaagccccccgtggtgagcgtgcccgccgccgtggtgagcagccccggcgtgaccaccctgcccatgaacgtggccggcatcagcgtggccatcggccagccccagaaggccgccggccagaccgtggtggcccagcccgtgcacatgcagcagctgctgaagctgaagcagcaggccgtgcagcagcagaaggccatccagccccaggccgcccagggccccgccgccgtgcagcagaagatcaccgcccagcagatcaccacccccggcgcccagcagaaggtggcctacgccgcccagcccgccctgaagacccagttcctgaccacccccatcagccaggcccagaagctggccggcgcccagcaggtgcagacccagatccaggtggccaagctgccccaggtggtgcagcagcagacccccgtggccagcatccagcaggtggccagcgccagccagcaggccagcccccagaccgtggccctgacccaggccaccgccgccggccagcaggtgcagatgatccccgccgtgaccgccaccgcccaggtggtgcagcagaagctgatccagcagcaggtggtgaccaccgccagcgcccccctgcagacccccggcgcccccaaccccgcccaggtgcccgccagcagcgacagccccagccagcagcccaagctgcagatgagagtgcccgccgtgagactgaagacccccaccaagcccccctgccagtag

SEQ ID NO: 80011 - DNA, 9369 bp, synthetic construct
  misc_feature 1..9369: note = Description of Artificial Sequence: Synthetic coding sequence
  source 1..9369: mol_type = other DNA
atgcaccacggcaccggcccccagaacgtgcagcaccagctgcagagaagcagagcctgccccggcagcgagggcgaggagcagcccgcccaccccaaccccccccccagccccgccgcccccttcgcccccagcgccagccccagcgccccccagagccccagctaccagatccagcagctgatgaacagaagccccgccaccggccagaacgtgaacatcaccctgcagagcgtgggccccgtggtgggcggcaaccagcagatcaccctggcccccctgcccctgcccagccccaccagccccggcttccagttcagcgcccagcccagaagattcgagcacggcagccccagctacatccaggtgaccagccccctgagccagcaggtgcagacccagagccccacccagcccagccccggccccggccaggccctgcagaacgtgagagccggcgcccccggccccggcctgggcctgtgcagcagcagccccaccggcggcttcgtggacgccagcgtgctggtgagacagatcagcctgagccccagcagcggcggccacttcgtgttccaggacggcagcggcctgacccagatcgcccagggcgcccaggtgcagctgcagcaccccggcacccccatcaccgtgagagagagaagacccagccagccccacacccagagcggcggcaccatccaccacctgggcccccagagccccgccgccgccggcggcgccggcctgcagcccctggccagccccagccacatcaccaccgccaacctgcccccccagatcagcagcatcatccagggccagctggtgcagcagcagcaggtgctgcagggcccccccctgcccagacccctgggcttcgagagaacccccggcgtgctgctgcccggcgccggcggcgccgccggcttcggcatgaccagcccccccccccccaccagccccagcagaaccgccgtgccccccggcctgagcagcctgcccctgaccagcgtgggcaacaccggcatgaagaaggtgcccaagaagctggaggagatcccccccgccagccccgagatggcccagatgagaaagcagtgcctggactaccactaccaggagatgcaggccctgaaggaggtgttcaaggagtacctgatcgagctgttcttcctgcagcacttccagggcaacatgatggacttcctggccttcaagaagaagcactacgcccccctgcaggcctacctgagacagaacgacctggacatcgaggaggaggaggaggaggaggaggaggaggaggagaagagcgaggtgatcaacgacgagcaggccctggccggcagcctggtggccggcgccggcagcaccgtggagaccgacctgttcaagagacagcaggccatgcccagcaccggcatggccgagcagagcaagagacccagactggaggtgggccaccagggcgtggtgttccagcaccccggcgccgacgccggcgtgcccctgcagcagctgatgcccaccgcccagggcggcatgccccccaccccccaggccgcccagctggccggccagagacagagccagcagcagtacgaccccagcaccggcccccccgtgcagaacgccgccagcctgcacacccccctgccccagctgcccggcagactgccccccgccggcgtgcccaccgccgccctgagcagcgccctgcagttcgcccagcagccccaggtggtggaggcccagacccagctgcagatccccgtgaagacccagcagcccaacgtgcccatccccgccccccccagcagccagctgcccatcccccccagccagcccgcccagctggccctgcacgtgcccacccccggcaaggtgcaggtgcaggccagccagctgagcagcctgccccagatggtggccagcaccagactgcccgtggaccccgcccccccctgccccagacccctgcccaccagcagcaccagcagcctggcccccgtgagcggcagcggccccggccccagccccgccagaagcagccccgtgaacagacccagcagcgccaccaacaaggccctgagccccgtgaccagcagaacccccggcgtggtggccagcgcccccaccaagccccagagccccgcccagaacgccaccagcagccaggacagcagccaggacaccctgaccgagcagatcaccctggagaaccaggtgcaccagagaatcgccgagctgagaaaggccggcctgtggagccagagaagactgcccaagctgcaggaggcccccagacccaagagccactgggactacctgctggaggagatgcagtggatggccaccgacttcgcccaggagagaagatggaaggtggccgccgccaagaagctggtgagaaccgtggtgagacaccacgaggagaagcagctgagagaggagagaggcaagaaggaggagcagagcagactgagaagaatcgccgccagcaccgccagagagatcgagtgcttctggagcaacatcgagcaggtggtggagatcaagctgagagtggagctggaggagaagagaaagaaggccctgaacctgcagaaggtgagcagaagaggcaaggagctgagacccaagggcttcgacgccctgcaggagagcagcctggacagcggcatgagcggcagaaagagaaaggccagcatcagcctgaccgacgacgaggtggacgacgaggaggagaccatcgaggaggaggaggccaacgagggcgtggtggaccaccagaccgagctgagcaacctggccaaggaggccgagctgcccctgctggacctgatgaagctgtacgagggcgccttcctgcccagcagccagtggcccagacccaagcccgacggcgaggacaccagcggcgaggaggacgccgacgactgccccggcgacagagagagcagaaaggacctggtgctgatcgacagcctgttcatcatggaccagttcaaggccgccgagagaatgaacatcggcaagcccaacgccaaggacatcgccgacgtgaccgccgtggccgaggccatcctgcccaagggcagcgccagagtgaccaccagcgtgaagttcaacgcccccagcctgctgtacggcgccctgagagactaccagaagatcggcctggactggctggccaagctgtacagaaagaacctgaacggcatcctggccgacgaggccggcctgggcaagaccgtgcagatcatcgccttcttcgcccacctggcctgcaacgagggcaactggggcccccacctggtggtggtgagaagctgcaacatcctgaagtgggagctggagctgaagagatggtgccccggcctgaagatcctgagctacatcggcagccacagagagctgaaggccaagagacaggagtgggccgagcccaacagcttccacgtgtgcatcaccagctacacccagttcttcagaggcctgaccgccttcaccagagtgagatggaagtgcctggtgatcgacgagatgcagagagtgaagggcatgaccgagagacactgggaggccgtgttcaccctgcagagccagcagagactgctgctgatcgacagccccctgcacaacaccttcctggagctgtggaccatggtgcacttcctggtgcccggcatcagcagaccctacctgagcagccccctgagagcccccagcgaggagagccaggactactaccacaaggtggtgatcagactgcacagagtgacccagcccttcatcctgagaagaaccaagagagacgtggagaagcagctgaccaagaagtacgagcacgtgctgaagtgcagactgagcaacagacagaaggccctgtacgaggacgtgatcctgcagcccggcacccaggaggccctgaagagcggccacttcgtgaacgtgctgagcatcctggtgagactgcagagaatctgcaaccaccccggcctggtggagcccagacaccccggcagcagctacgtggccggccccctggagtaccccagcgccagcctgatcctgaaggccctggagagagacttctggaaggaggccgacctgagcatgttcgacctgatcggcctggagaacaagatcaccagacacgaggccgagctgctgagcaagaagaagatccccagaaagctgatggaggagatcagcaccagcgccgcccccgccgccagacccgccgccgccaagctgaaggccagcagactgttccagcccgtgcagtacggccagaagcccgagggcagaaccgtggccttccccagcacccacccccccagaaccgccgcccccaccaccgccagcgccgccccccagggccccctgagaggcagaccccccatcgccaccttcagcgccaaccccgaggccaaggccgccgccgcccccttccagaccagccaggccagcgccagcgcccccagacaccagcccgccagcgccagcagcaccgccgccagccccgcccaccccgccaagctgagagcccagaccaccgcccaggccagcacccccggccagccccccccccagccccaggcccccagccacgccgccggccagagcgccctgccccagagactggtgctgcccagccaggcccaggccagactgcccagcggcgaggtggtgaagatcgcccagctggccagcatcaccggcccccagagcagagtggcccagcccgagacccccgtgaccctgcagttccagggcagcaagttcaccctgagccacagccagctgagacagctgaccgccggccagcccctgcagctgcagggcagcgtgctgcagatcgtgagcgcccccggccagccctacctgagagcccccggccccgtggtgatgcagaccgtgagccaggccggcgccgtgcacggcgccctgggcagcaagccccccgccggcggccccagccccgcccccctgaccccccaggtgggcgtgcccggcagagtggccgtgaacgccctggccgtgggcgagcccggcaccgccagcaagcccgccagccccatcggcggccccacccaggaggagaagaccagactgctgaaggagagactggaccagatctacctggtgaacgagagaagatgcagccaggcccccgtgtacggcagagacctgctgagaatctgcgccctgcccagccacggcagagtgcagtggagaggcagcctggacggcagaagaggcaaggaggccggccccgcccacagctacaccagcagcagcgagagccccagcgagctgatgctgaccctgtgcagatgcggcgagagcctgcaggacgtgatcgacagagtggccttcgtgatcccccccgtggtggccgccccccccagcctgagagtgcccagacccccccccctgtacagccacagaatgagaatcctgagacagggcctgagagagcacgccgccccctacttccagcagctgagacagaccaccgcccccagactgctgcagttccccgagctgagactggtgcagttcgacagcggcaagctggaggccctggccatcctgctgcagaagctgaagagcgagggcagaagagtgctgatcctgagccagatgatcctgatgctggacatcctggagatgttcctgaacttccactacctgacctacgtgagaatcgacgagaacgccagcagcgagcagagacaggagctgatgagaagcttcaacagagacagaagaatcttctgcgccatcctgagcacccacagcagaaccaccggcatcaacctggtggaggccgacaccgtggtgttctacgacaacgacctgaaccccgtgatggacgccaaggcccaggagtggtgcgacagaatcggcagatgcaaggacatccacatctacagactggtgagcggcaacagcatcgaggagaagctgctgaagaacggcaccaaggacctgatcagagaggtggccgcccagggcaacgactacagcatggccttcctgacccagagaaccatccaggagctgttcgaggtgtacagccccatggacgacgccggcttccccgtgaaggccgaggagttcgtggtgctgagccaggagcccagcgtgaccgagaccatcgcccccaagatcgccagacccttcatcgaggccctgaagagcatcgagtacctggaggaggacgcccagaagagcgcccaggagggcgtgctgggcccccacaccgacgccctgagcagcgacagcgagaacatgccctgcgacgaggagcccagccagctggaggagctggccgacttcatggagcagctgacccccatcgagaagtacgccctgaactacctggagctgttccacaccagcatcgagcaggagaaggagagaaacagcgaggacgccgtgatgaccgccgtgagagcctgggagttctggaacctgaagaccctgcaggagagagaggccagactgagactggagcaggaggaggccgagctgctgacctacaccagagaggacgcctacagcatggagtacgtgtacgaggacgtggacggccagaccgaggtgatgcccctgtggaccccccccacccccccccaggacgacagcgacatctacctggacagcgtgatgtgcctgatgtacgaggccacccccatccccgaggccaagctgccccccgtgtacgtgagaaaggagagaaagagacacaagaccgaccccagcgccgccggcagaaagaagaagcagagacacggcgaggccgtggtgccccccagaagcctgttcgacagagccacccccggcctgctgaagatcagaagagagggcaaggagcagaagaagaacatcctgctgaagcagcaggtgcccttcgccaagcccctgcccaccttcgccaagcccaccgccgagcccggccaggacaaccccgagtggctgatcagcgaggactgggccctgctgcaggccgtgaagcagctgctggagctgcccctgaacctgaccatcgtgagccccgcccacacccccaactgggacctggtgagcgacgtggtgaacagctgcagcagaatctacagaagcagcaagcagtgcagaaacagatacgagaacgtgatcatccccagagaggagggcaagagcaagaacaacagacccctgagaaccagccagatctacgcccaggacgagaacgccacccacacccagctgtacaccagccacttcgacctgatgaagatgaccgccggcaagagaagcccccccatcaagcccctgctgggcatgaaccccttccagaagaaccccaagcacgccagcgtgctggccgagagcggcatcaactacgacaagcccctgccccccatccaggtggccagcctgagagccgagagaatcgccaaggagaagaaggccctggccgaccagcagaaggcccagcagcccgccgtggcccagcccccccccccccagccccagccccccccccccccccagcagccccccccccccctgccccagccccaggccgccggcagccagccccccgccggcccccccgccgtgcagccccagccccagccccagccccagacccagccccagcccgtgcaggcccccgccaaggcccagcccgccatcaccaccggcggcagcgccgccgtgctggccggcaccatcaagaccagcgtgaccggcaccagcatgcccaccggcgccgtgagcggcaacgtgatcgtgaacaccatcgccggcgtgcccgccgccaccttccagagcatcaacaagagactggccagccccgtggcccccggcgccctgaccacccccggcggcagcgcccccgcccaggtggtgcacacccagcccccccccagagccgtgggcagccccgccaccgccacccccgacctggtgagcatggccaccacccagggcgtgagagccgtgaccagcgtgaccgccagcgccgtggtgaccaccaacctgacccccgtgcagacccccgccagaagcctggtgccccaggtgagccaggccaccggcgtgcagctgcccggcaagaccatcacccccgcccacttccagctgctgagacagcagcagcagcagcagcagcagcagcagcagcagcagcagcagcagcagcagcagcagcagcagcagcagcagcagcagcagcagaccaccaccaccagccaggtgcaggtgccccagatccagggccaggcccagagccccgcccagatcaaggccgtgggcaagctgacccccgagcacctgatcaagatgcagaagcagaagctgcagatgcccccccagcccccccccccccaggcccagagcgcccccccccagcccaccgcccaggtgcaggtgcagaccagccagcccccccagcagcagagcccccagctgaccaccgtgaccgcccccagacccggcgccctgctgaccggcaccaccgtggccaacctgcaggtggccagactgaccagagtgcccaccagccagctgcaggcccagggccagatgcagacccaggccccccagcccgcccaggtggccctggccaagccccccgtggtgagcgtgcccgccgccgtggtgagcagccccggcgtgaccaccctgcccatgaacgtggccggcatcagcgtggccatcggccagccccagaaggccgccggccagaccgtggtggcccagcccgtgcacatgcagcagctgctgaagctgaagcagcaggccgtgcagcagcagaaggccatccagccccaggccgcccagggccccgccgccgtgcagcagaagatcaccgcccagcagatcaccacccccggcgcccagcagaaggtggcctacgccgcccagcccgccctgaagacccagttcctgaccacccccatcagccaggcccagaagctggccggcgcccagcaggtgcagacccagatccaggtggccaagctgccccaggtggtgcagcagcagacccccgtggccagcatccagcaggtggccagcgccagccagcaggccagcccccagaccgtggccctgacccaggccaccgccgccggccagcaggtgcagatgatccccgccgtgaccgccaccgcccaggtggtgcagcagaagctgatccagcagcaggtggtgaccaccgccagcgcccccctgcagacccccggcgcccccaaccccgcccaggtgcccgccagcagcgacagccccagccagcagcccaagctgcagatgagagtgcccgccgtgagactgaagacccccaccaagcccccctgccagtag

SEQ ID NO: 80012 - DNA, 2475 bp, synthetic construct
  misc_feature 1..2475: note = Description of Artificial Sequence: Synthetic coding sequence
  source 1..2475: mol_type = other DNA
atgcaccacggcaccggcccccagaacgtgcagcaccagctgcagagaagcagagcctgccccggcagcgagggcgaggagcagcccgcccaccccaaccccccccccagccccgccgcccccttcgcccccagcgccagccccagcgccccccagagccccagctaccagatccagcagctgatgaacagaagccccgccaccggccagaacgtgaacatcaccctgcagagcgtgggccccgtggtgggcggcaaccagcagatcaccctggcccccctgcccctgcccagccccaccagccccggcttccagttcagcgcccagcccagaagattcgagcacggcagccccagctacatccaggtgaccagccccctgagccagcaggtgcagacccagagccccacccagcccagccccggccccggccaggccctgcagaacgtgagagccggcgcccccggccccggcctgggcctgtgcagcagcagccccaccggcggcttcgtggacgccagcgtgctggtgagacagatcagcctgagccccagcagcggcggccacttcgtgttccaggacggcagcggcctgacccagatcgcccagggcgcccaggtgcagctgcagcaccccggcacccccatcaccgtgagagagagaagacccagccagccccacacccagagcggcggcaccatccaccacctgggcccccagagccccgccgccgccggcggcgccggcctgcagcccctggccagccccagccacatcaccaccgccaacctgcccccccagatcagcagcatcatccagggccagctggtgcagcagcagcaggtgctgcagggcccccccctgcccagacccctgggcttcgagagaacccccggcgtgctgctgcccggcgccggcggcgccgccggcttcggcatgaccagcccccccccccccaccagccccagcagaaccgccgtgccccccggcctgagcagcctgcccctgaccagcgtgggcaacaccggcatgaagaaggtgcccaagaagctggaggagatcccccccgccagccccgagatggcccagatgagaaagcagtgcctggactaccactaccaggagatgcaggccctgaaggaggtgttcaaggagtacctgatcgagctgttcttcctgcagcacttccagggcaacatgatggacttcctggccttcaagaagaagcactacgcccccctgcaggcctacctgagacagaacgacctggacatcgaggaggaggaggaggaggaggaggaggaggaggagaagagcgaggtgatcaacgacgagcaggccctggccggcagcctggtggccggcgccggcagcaccgtggagaccgacctgttcaagagacagcaggccatgcccagcaccggcatggccggcggcatgccccccaccccccaggccgcccagctggccggccagagacagagccagcagcagtacgaccccagcaccggcccccccgtgcagaacgccgccagcctgcacacccccctgccccagctgcccggcagactgccccccgccggcgtgcccaccgccgccctgagcagcgccctgcagttcgcccagcagccccaggtggtggaggcccagacccagctgcagatccccgtgaagacccagcagcccaacgtgcccatccccgccccccccagcagccagctgcccatcccccccagccagcccgcccagctggccctgcacgtgcccacccccggcaaggtgcaggtgcaggccagccagctgagcagcctgccccagatggtggccagcaccagactgcccgtggaccccgcccccccctgccccagacccctgcccaccagcagcaccagcagcctggcccccgtgagcggcagcggccccggccccagccccgccagaagcagccccgtgaacagacccagcagcgccaccaacaaggccctgagccccgtgaccagcagaacccccggcgtggtggccagcgcccccaccaagccccagagccccgcccagaacgccaccagcagccaggacagcagccaggacaccctgaccgagcagatcaccctggagaaccaggtgcaccagagaatcgccgagctgagaaaggccggcctgtggagccagagaagactgcccaagctgcaggaggcccccagacccaagagccactgggactacctgctggaggagatgcagtggatggccaccgacttcgcccaggagagaagatggaaggtggccgccgccaagaagctggtgagaaccgtggtgagacaccacgaggagaagcagctgagagaggagagaggcaagaaggaggagcagagcagactgagaagaatcgccgccagcaccgccagagagatcgagtgcttctggagcaacatcgagcaggtggtggagatcaagctgagagtggagctggagtag

SEQ ID NO: 80013 - DNA, 9372 bp, synthetic construct; identical to SEQ ID NO: 80010
  misc_feature 1..9372: note = Description of Artificial Sequence: Synthetic coding sequence
  source 1..9372: mol_type = other DNA

SEQ ID NO: 80014 - DNA, 1314 bp, synthetic construct
  misc_feature 1..1314: note = Description of Artificial Sequence: Synthetic coding sequence
  source 1..1314: mol_type = other DNA
atgctgcagggccccagagccctggccagcgccgccggccagacccccaaggtggtgcccgccatgagccccaccgagctgtggcccagcggcctgagcagcccccagctgtgccccgccaccgccacctactacacccccctgtacccccagaccgccccccccgccgccgcccccggcacctgcctggacgccaccccccacggccccgagggccaggtggtgagatgcctgcccgccggcagactgcccgccaagagaaagctggacctggagggcatcggcagacccgtggtgcccgagttccccacccccaagggcaagtgcatcagagtggacggcctgcccagccccaagacccccaagagccccggcgagaagaccagatacgacaccagcctgggcctgctgaccaagaagttcatctacctgctgagcgagagcgaggacggcgtgctggacctgaactgggccgccgaggtgctggacgtgcagaagagaagaatctacgacatcaccaacgtgctggagggcatccagctgatcagaaagaaggccaagaacaacatccagtgggtgggcagaggcatgttcgaggaccccaccagacccggcaagcagcagcagctgggccaggagctgaaggagctgatgaacaccgagcaggccctggaccagctgatccagagctgcagcctgagcttcaagcacctgaccgaggacaaggccaacaagagactggcctacgtgacctaccaggacatcagagccgtgggcaacttcaaggagcagaccgtgatcgccgtgaaggcccccccccagaccagactggaggtgcccgacagaaccgaggacaacctgcagatctacctgaagagcacccagggccccatcgaggtgtacctgtgccccgaggaggtgcaggagcccgacagccccagcgaggagcccctgcccagcaccagcaccctgtgccccagccccgacagcgcccagcccagcagcagcaccgaccccagcatcatggagcccaccgccagcagcgtgcccgcccccgcccccaccccccagcaggccccccccccccccagcctggtgcccctggaggccaccgacagcctgctggagctgccccaccccctgctgcagcagaccgaggaccagttcctgagccccaccctggcctgcagcagccccctgatcagcttcagccccagcctggaccaggacgactacctgtggggcctggaggccggcgagggcatcagcgacctgttcgacagctacgacctgggcgacctgctgatcaactag

SEQ ID NO: 80015 - DNA, 1398 bp, synthetic construct
  misc_feature 1..1398: note = Description of Artificial Sequence: Synthetic coding sequence
  source 1..1398: mol_type = other DNA
atgagaaagggcatccagcccgccctggagcagtacctggtgaccgccggcggcggcgagggcgccgccgtggtggccgccgccgccgccgccagcatggacaagagagccctgctggccagccccggcttcgccgccgccgccgccgccgccgccgcccccggcgcctacatccagatcctgaccaccaacaccagcaccaccagctgcagcagcagcctgcagagcggcgccgtggccgccggccccctgctgcccagcgcccccggcgccgagcagaccgccggcagcctgctgtacaccaccccccacggccccagcagcagagccggcctgctgcagcagccccccgccctgggcagaggcggcagcggcggcggcggcggcccccccgccaagagaagactggagctgggcgagagcggccaccagtacctgagcgacggcctgaagacccccaagggcaagggcagagccgccctgagaagccccgacagccccaagacccccaagagccccagcgagaagaccagatacgacaccagcctgggcctgctgaccaagaagttcatccagctgctgagccagagccccgacggcgtgctggacctgaacaaggccgccgaggtgctgaaggtgcagaagagaagaatctacgacatcaccaacgtgctggagggcatccacctgatcaagaagaagagcaagaacaacgtgcagtggatgggctgcagcctgagcgaggacggcggcatgctggcccagtgccagggcctgagcaaggaggtgaccgagctgagccaggaggagaagaagctggacgagctgatccagagctgcaccctggacctgaagctgctgaccgaggacagcgagaaccagagactggcctacgtgacctaccaggacatcagaaagatcagcggcctgaaggaccagaccgtgatcgtggtgaaggccccccccgagaccagactggaggtgcccgacagcatcgagagcctgcagatccacctggccagcacccagggccccatcgaggtgtacctgtgccccgaggagaccgagacccacagccccatgaagaccaacaaccaggaccacaacggcaacatccccaagcccgccagcaaggacctggccagcaccaacagcggccacagcgactgcagcgtgagcatgggcaacctgagccccctggccagccccgccaacctgctgcagcagaccgaggaccagatccccagcaacctggagggccccttcgtgaacctgctgccccccctgctgcaggaggactacctgctgagcctgggcgaggaggagggcatcagcgacctgttcgacgcctacgacctggagaagctgcccctggtggaggacttcatgtgcagctag

SEQ ID NO: 80016 - DNA, 387 bp, synthetic construct
  misc_feature 1..387: note = Description of Artificial Sequence: Synthetic coding sequence
  source 1..387: mol_type = other DNA
atggacaagagagccctgctggccagcggcggcggcggcggcccccccgccaagagaagactggagctgggcgagagcggccaccagtacctgagcgacggcctgaagacccccaagggcaagggcagagccgccctgagaagccccgacagccccaagaagaagaccagatacgacaccagcctgggcctgctgaccaagaagttcatccagctgctgagccagagccccgacggcgtgctggacctgaacaaggccgccgaggtgctgaaggtgcagaagagaagaatctacgacatcaccaacgtgctggagggcatcagcgacctgttcgacgcctacgacctggagaagctgcccctggtggaggacttcatgtgcagctag

SEQ ID NO: 80017 - DNA, 1005 bp, synthetic construct
  misc_feature 1..1005: note = Description of Artificial Sequence: Synthetic coding sequence
  source 1..1005: mol_type = other DNA
atgcccctgcagcagcaggccaagagaagactggagctgggcgagagcggccaccagtacctgagcgacggcctgaagacccccaagggcaagggcagagccgccctgagaagccccgacagccccaagaagaagaccagatacgacaccagcctgggcctgctgaccaagaagttcatccagctgctgagccagagccccgacggcgtgctggacctgaacaaggccgccgaggtgctgaaggtgcagaagagaagaatctacgacatcaccaacgtgctggagggcatccacctgatcaagaagaagagcaagaacaacgtgcagtggatgggctgcagcctgagcgaggacggcggcatgctggcccagtgccagggcctgagcaaggaggtgaccgagctgagccaggaggagaagaagctggacgagctgatccagagctgcaccctggacctgaagctgctgaccgaggacagcgagaaccagagactggcctacgtgacctaccaggacatcagaaagatcagcggcctgaaggaccagaccgtgatcgtggtgaaggccccccccgagaccagactggaggtgcccgacagcatcgagagcctgcagatccacctggccagcacccagggccccatcgaggtgtacctgtgccccgaggagaccgagacccacagccccatgaagaccaacaaccaggaccacaacggcaacatccccaagcccgccagcaaggacctggccagcaccaacagcggccacagcgactgcagcgtgagcatgggcaacctgagccccctggccagccccgccaacctgctgcagcagaccgaggaccagatccccagcaacctggagggccccttcgtgaacctgctgccccccctgctgcaggaggactacctgctgagcctgggcgaggaggagggcatcagcgacctgttcgacgcctacgacctggagaagctgcccctggtggaggacttcatgtgcagctag

SEQ ID NO: 80018 - DNA, 2736 bp, synthetic construct
  misc_feature 1..2736: note = Description of Artificial Sequence: Synthetic coding sequence
  source 1..2736: mol_type = other DNA
atggaggtgaactgcctgaccctgaaggacctgatcagccccagacagcccagactggacttcgccgtggaggacggcgagaacgcccagaaggagaacatcttcgtggacagaagcagaatggcccccaagacccccatcaagaacgagcccatcgacctgagcaagcagaagaagttcacccccgagagaaaccccatcacccccgtgaagttcgtggacagacagcaggccgagccctggacccccaccgccaacctgaagatgctgatcagcgccgccagccccgacatcagagacagagagaagaagaagggcctgttcagacccatcgagaacaaggacgacgccttcaccgacagcctgcagctggacgtggtgggcgacagcgccgtggacgagttcgagaagcagagacccagcagaaagcagaagagcctgggcctgctgtgccagaagttcctggccagataccccagctaccccctgagcaccgagaagaccaccatcagcctggacgaggtggccgtgagcctgggcgtggagagaagaagaatctacgacatcgtgaacgtgctggagagcctgcacctggtgagcagagtggccaagaaccagtacggctggcacggcagacacagcctgcccaagaccctgagaaacctgcagagactgggcgaggagcagaagtacgaggagcagatggcctacctgcagcagaaggagctggacctgatcgactacaagttcggcgagagaaagaaggacggcgaccccgacagccaggagcagcagctgctggacttcagcgagcccgactgccccagcagcagcgccaacagcagaaaggacaagagcctgagaatcatgagccagaagttcgtgatgctgttcctggtgagcaagaccaagatcgtgaccctggacgtggccgccaagatcctgatcgaggagagccaggacgcccccgaccacagcaagttcaagaccaaggtgagaagactgtacgacatcgccaacgtgctgaccagcctggccctgatcaagaaggtgcacgtgaccgaggagagaggcagaaagcccgccttcaagtggatcggccccgtggacttcagcagcagcgacgaggagctggtggacgtgagcgccagcgtgctgcccgagctgaagagagagacctacggccagatccaggtgtgcgccaagcagaagctggccagacacggcagcttcaacaccgtgcaggccagcgagagaatccagagaaaggtgaacagcgagcccagcagcccctacagagaggagcagggcagcggcggctacagcctggagatcggcagcctggccgccgtgtacagacagaagatcgaggacaacagccagggcaaggccttcgccagcaagagagtggtgccccccagcagcagcctggaccccgtggcccccttccccgtgctgagcgtggaccccgagtactgcgtgaaccccctggcccaccccgtgttcagcgtggcccagaccgacctgcaggccttcagcatgcagaacggcctgaacggccaggtggacgtgagcctggccagcgccgccagcgccgtggagagcctgaagcccgccctgctggccggccagcccctggtgtacgtgcccagcgccagcctgttcatgctgtacggcagcctgcaggagggccccgccagcggcagcggcagcgagagagacgacagaagcagcgaggcccccgccaccgtggagctgagcagcgcccccagcgcccagaagagactgtgcgaggagagaaagccccaggaggaggacgagcccgccaccaagagacagagcagagagtacgaggacggccccctgagcctggtgatgcccaagaagcccagcgacagcaccgacctggccagccccaagaccatgggcaacagagccagcatccccctgaaggacatccacgtgaacggccagctgcccgccgccgaggagatcagcggcaaggccaccgccaacagcctggtgagcagcgagtggggcaaccccagcagaaacaccgacgtggagaagcccagcaaggagaacgagagcaccaaggagcccagcctgctgcagtacctgtgcgtgcagagccccgccggcctgaacggcttcaacgtgctgctgagcggcagccagaccccccccaccgtgggccccagcagcggccagctgcccagcttcagcgtgccctgcatggtgctgcccagcccccccctgggccccttccccgtgctgtacagccccgccatgcccggccccgtgagcagcaccctgggcgccctgcccaacaccggccccgtgaacttcagcctgcccggcctgggcagcatcgcccagctgctggtgggccccaccgccgtggtgaaccccaagagcagcaccctgcccagcgccgacccccagctgcagagccagcccagcctgaacctgagccccgtgatgagcagaagccacagcgtggtgcagcagcccgagagccccgtgtacgtgggccaccccgtgagcgtggtgaagctgcaccagagccccgtgcccgtgacccccaagagcatccagagaacccacagagagaccttcttcaagacccccggcagcctgggcgaccccgtgctgaagagaagagagagaaaccagagcagaaacaccagcagcgcccagagaagactggagatccccagcggcggcgccgactag

SEQ ID NO: 80019 - DNA, 1149 bp, synthetic construct
  misc_feature 1..1149: note = Description of Artificial Sequence: Synthetic coding sequence
  source 1..1149: mol_type = other DNA
atgcagaacggcctgaacggccaggtggacgtgagcctggccagcgccgccagcgccgtggagagcctgaagcccgccctgctggccggccagcccctggtgtacgtgcccagcgccagcctgttcatgctgtacggcagcctgcaggagggccccgccagcggcagcggcagcgagagagacgacagaagcagcgaggcccccgccaccgtggagctgagcagcgcccccagcgcccagaagagactgtgcgaggagagaaagccccaggaggaggacgagcccgccaccaagagacagagcagagagtacgaggacggccccctgagcctggtgatgcccaagaagcccagcgacagcaccgacctggccagccccaagaccatgggcaacagagccagcatccccctgaaggacatccacgtgaacggccagctgcccgccgccgaggagatcagcggcaaggccaccgccaacagcctggtgagcagcgagtggggcaaccccagcagaaacaccgacgtggagaagcccagcaaggagaacgagagcaccaaggagcccagcctgctgcagtacctgtgcgtgcagagccccgccggcctgaacggcttcaacgtgctgctgagcggcagccagaccccccccaccgtgggccccagcagcggccagctgcccagcttcagcgtgccctgcatggtgctgcccagcccccccctgggccccttccccgtgctgtacagccccgccatgcccggccccgtgagcagcaccctgggcagcatcgcccagctgctggtgggccccaccgccgtggtgaaccccaagagcagcaccctgcccagcgccgacccccagctgcagagccagcccagcctgaacctgagccccgtgatgagcagaagccacagcgtggtgcagcagcccgagagccccgtgtacgtgggccaccccgtgagcgtggtgaagctgcaccagagccccgtgcccgtgacccccaagagcatccagagaacccacagagagaccttcttcaagacccccggcagcctgggcgaccccgtgctgaagagaagagagagaaaccagagcagaaacaccagcagcgcccagagaagactggagatccccagcggcggcgccgactag

SEQ ID NO: 80020 - DNA, 2187 bp, synthetic construct
  misc_feature 1..2187: note = Description of Artificial Sequence: Synthetic coding sequence
  source 1..2187: mol_type = other DNA
atggaggtgaactgcctgaccctgaaggacctgatcagccccagacagcccagactggacttcgccgtggaggacggcgagaacgcccagaaggagaacatcttcgtggacagaagcagaatggcccccaagacccccatcaagaacgagcccatcgacctgagcaagcagaagaagttcacccccgagagaaaccccatcacccccgtgaagttcgtggacagacagcaggccgagccctggacccccaccgccaacctgaagatgctgatcagcgccgccagccccgacatcagagacagagagaagaagaagggcctgttcagacccatcgagaacaaggacgacgccttcaccgacagcctgcagctggacgtggtgggcgacagcgccgtggacgagttcgagaagcagagacccagcagaaagcagaagagcctgggcctgctgtgccagaagttcctggccagataccccagctaccccctgagcaccgagaagaccaccatcagcctggacgaggtggccgtgagcctgggcgtggagagaagaagaatctacgacatcgtgaacgtgctggagagcctgcacctggtgagcagagtggccaagaaccagtacggctggcacggcagacacagcctgcccaagaccctgagaaacctgcagagactgggcgaggagcagaagtacgaggagcagatggcctacctgcagcagaaggagctggacctgatcgactacaagttcggcgagagaaagaaggacggcgaccccgacagccaggagcagcagctgctggacttcagcgagcccgactgccccagcagcagcgccaacagcagaaaggacaagagcctgagaatcatgagccagaagttcgtgatgctgttcctggtgagcaagaccaagatcgtgaccctggacgtggccgccaagatcctgatcgaggagagccaggacgcccccgaccacagcaagttcaagaccaaggtgagaagactgtacgacatcgccaacgtgctgaccagcctggccctgatcaagaaggtgcacgtgaccgaggagagaggcagaaagcccgccttcaagtggatcggccccgtggacttcagcagcagcgacgaggagctggtggacgtgagcgccagcgtgctgcccgagctgaagagagagacctacggccagatccaggtgtgcgccaagcagaagctggccagacacggcagcttcaacaccgtgcaggccagcgagagaatccagagaaaggtgaacagcgagcccagcagcccctacagagaggagcagggcagcggcggctacagcctggagatcggcagcctggccgccgtgtacagacagaagatcgaggacaacagccagggcaaggccttcgccagcaagagagtggtgccccccagcagcagcctggaccccgtggcccccttccccgtgctgagcgtggaccccgagtactgcgtgaaccccctggcccaccccgtgttcagcgtggcccagaccgacctgcaggccttcagcatgcagaacggcctgaacggccaggtggacgtgagcctggccagcgccgccagcgccgtggagagcctgaagcccgccctgctggccggccagcccctggtgtacgtgcccagcgccagcctgttcatgctgtacggcagcctgcaggagggccccgccagcggcagcggcagcgagagagacgacagaagcagcgaggcccccgccaccgtggagctgagcagcgcccccagcgcccagaagagactgtgcgaggagagaaagccccaggaggaggacgagcccgccaccaagagacagagcagagagtacgaggacggccccctgagcctggtgatgcccaagaagcccagcgacagcaccgacctggccagccccaagaccatgggcaacagagccagcatccccctgaaggacatccacgtgaacggccagctgcccgccgccgaggagatcagcggcaaggccaccgccaacagcctggtgagcagcgagtggggcaaccccagcagaaacaccgacgtggagaagcccagcaaggagaacgagagcaccaaggagcccagcctgctgcagtacctgtgcgtgcagagccccgccgtgaccagcagcagcgacccccaggagcaccccacccacaccagctag

SEQ ID NO: 80021 - DNA, 348 bp, synthetic construct
  misc_feature 1..348: note = Description of Artificial Sequence: Synthetic coding sequence
  source 1..348: mol_type = other DNA
atggaggtgaactgcctgaccctgaaggacctgatcagccccagacagcccagactggacttcgccgtggaggacggcgagaacgcccagaaggagaacatcttcgtggacagaagcagaatggcccccaagacccccatcaagaacgagcccatcgacctgagcaagcagaagaagttcacccccgagagaaaccccatcacccccgtgaagttcgtggacagacagcaggccgagccctggacccccaccgccaacctgaagatgctgatcagcgccgccagccccgacatcagagacagagagaagaagaagggcctgttcagacccatcgagaacaaggactag

SEQ ID NO: 80022 - DNA, 2604 bp, synthetic construct
  misc_feature 1..2604: note = Description of Artificial Sequence: Synthetic coding sequence
  source 1..2604: mol_type = other DNA
atggagaacgagaaggagaacctgttctgcgagccccacaagagaggcctgatgaagacccccctgaaggagagcaccaccgccaacatcgtgctggccgagatccagcccgacttcggccccctgaccacccccaccaagcccaaggagggcagccagggcgagccctggacccccaccgccaacctgaagatgctgatcagcgccgtgagccccgagatcagaaacagagaccagaagagaggcctgttcgacaacagaagcggcctgcccgaggccaaggactgcatccacgagcacctgagcggcgacgagttcgagaagagccagcccagcagaaaggagaagagcctgggcctgctgtgccacaagttcctggccagataccccaactaccccaaccccgccgtgaacaacgacatctgcctggacgaggtggccgaggagctgaacgtggagagaagaagaatctacgacatcgtgaacgtgctggagagcctgcacatggtgagcagactggccaagaacagatacacctggcacggcagacacaacctgaacaagaccctgggcaccctgaagagcatcggcgaggagaacaagtacgccgagcagatcatgatgatcaagaagaaggagtacgagcaggagttcgacttcatcaagagctacagcatcgaggaccacatcatcaagagcaacaccggccccaacggccaccccgacatgtgcttcgtggagctgcccggcgtggagttcagagccgccagcgtgaacagcagaaaggacaagagcctgagagtgatgagccagaagttcgtgatgctgttcctggtgagcaccccccagatcgtgagcctggaggtggccgccaagatcctgatcggcgaggaccacgtggaggacctggacaagagcaagttcaagaccaagatcagaagactgtacgacatcgccaacgtgctgagcagcctggacctgatcaagaaggtgcacgtgaccgaggagagaggcagaaagcccgccttcaagtggaccggccccgagatcagccccaacaccagcggcagcagccccgtgatccacttcacccccagcgacctggaggtgagaagaagcagcaaggagaactgcgccaagaacctgttcagcaccagaggcaagcccaacttcaccagacaccccagcctgatcaagctggtgaagagcatcgagagcgacagaagaaagatcaacagcgcccccagcagccccatcaagaccaacaaggccgagagcagccagaacagcgcccccttccccagcaagatggcccagctggccgccatctgcaagatgcagctggaggagcagagcagcgagagcagacagaaggtgaaggtgcagctggccagaagcggcccctgcaagcccgtggcccccctggacccccccgtgaacgccgagatggagctgaccgcccccagcctgatccagcccctgggcatggtgcccctgatccccagccccctgagcagcgccgtgcccctgatcctgccccaggcccccagcggccccagctacgccatctacctgcagcccacccaggcccaccagagcgtgacccccccccagggcctgagccccaccgtgtgcaccacccacagcagcaaggccaccggcagcaaggacagcaccgacgccaccaccgagaaggccgccaacgacaccagcaaggccagcgccagcaccagacccggcagcctgctgcccgcccccgagagacagggcgccaagagcagaaccagagagcccgccggcgagagaggcagcaagagagccagcatgctggaggacagcggcagcaagaagaagttcaaggaggacctgaagggcctggagaacgtgagcgccaccctgttccccagcggctacctgatccccctgacccagtgcagcagcctgggcgccgagagcatcctgagcggcaaggagaacagcagcgccctgagccccaaccacagaatctacagcagccccatcgccggcgtgatccccgtgaccagcagcgagctgaccgccgtgaacttccccagcttccacgtgacccccctgaagctgatggtgagccccaccagcgtggccgccgtgcccgtgggcaacagccccgccctggccagcagccaccccgtgcccatccagaaccccagcagcgccatcgtgaacttcaccctgcagcacctgggcctgatcagccccaacgtgcagctgagcgccagccccggcagcggcatcgtgcccgtgagccccagaatcgagagcgtgaacgtggcccccgagaacgccggcacccagcagggcagagccaccaactacgacagccccgtgcccggccagagccagcccaacggccagagcgtggccgtgaccggcgcccagcagcccgtgcccgtgacccccaagggcagccagctggtggccgagagcttcttcagaacccccggcggccccaccaagcccaccagcagcagctgcatggacttcgagggcgccaacaagaccagcctgggcaccctgttcgtgccccagagaaagctggaggtgagcaccgaggacgtgcactag

SEQ ID NO: 80023 - DNA, 2604 bp, synthetic construct
  misc_feature 1..2604: note = Description of Artificial Sequence: Synthetic coding sequence
  source 1..2604: mol_type = other DNA
atgcagaagaagaaggagaacctgttctgcgagccccacaagagaggcctgatgaagacccccctgaaggagagcaccaccgccaacatcgtgctggccgagatccagcccgacttcggccccctgaccacccccaccaagcccaaggagggcagccagggcgagccctggacccccaccgccaacctgaagatgctgatcagcgccgtgagccccgagatcagaaacagagaccagaagagaggcctgttcgacaacagaagcggcctgcccgaggccaaggactgcatccacgagcacctgagcggcgacgagttcgagaagagccagcccagcagaaaggagaagagcctgggcctgctgtgccacaagttcctggccagataccccaactaccccaaccccgccgtgaacaacgacatctgcctggacgaggtggccgaggagctgaacgtggagagaagaagaatctacgacatcgtgaacgtgctggagagcctgcacatggtgagcagactggccaagaacagatacacctggcacggcagacacaacctgaacaagaccctgggcaccctgaagagcatcggcgaggagaacaagtacgccgagcagatcatgatgatcaagaagaaggagtacgagcaggagttcgacttcatcaagagctacagcatcgaggaccacatcatcaagagcaacaccggccccaacggccaccccgacatgtgcttcgtggagctgcccggcgtggagttcagagccgccagcgtgaacagcagaaaggacaagagcctgagagtgatgagccagaagttcgtgatgctgttcctggtgagcaccccccagatcgtgagcctggaggtggccgccaagatcctgatcggcgaggaccacgtggaggacctggacaagagcaagttcaagaccaagatcagaagactgtacgacatcgccaacgtgctgagcagcctggacctgatcaagaaggtgcacgtgaccgaggagagaggcagaaagcccgccttcaagtggaccggccccgagatcagccccaacaccagcggcagcagccccgtgatccacttcacccccagcgacctggaggtgagaagaagcagcaaggagaactgcgccaagaacctgttcagcaccagaggcaagcccaacttcaccagacaccccagcctgatcaagctggtgaagagcatcgagagcgacagaagaaagatcaacagcgcccccagcagccccatcaagaccaacaaggccgagagcagccagaacagcgcccccttccccagcaagatggcccagctggccgccatctgcaagatgcagctggaggagcagagcagcgagagcagacagaaggtgaaggtgcagctggccagaagcggcccctgcaagcccgtggcccccctggacccccccgtgaacgccgagatggagctgaccgcccccagcctgatccagcccctgggcatggtgcccctgatccccagccccctgagcagcgccgtgcccctgatcctgccccaggcccccagcggccccagctacgccatctacctgcagcccacccaggcccaccagagcgtgacccccccccagggcctgagccccaccgtgtgcaccacccacagcagcaaggccaccggcagcaaggacagcaccgacgccaccaccgagaaggccgccaacgacaccagcaaggccagcgccagcaccagacccggcagcctgctgcccgcccccgagagacagggcgccaagagcagaaccagagagcccgccggcgagagaggcagcaagagagccagcatgctggaggacagcggcagcaagaagaagttcaaggaggacctgaagggcctggagaacgtgagcgccaccctgttccccagcggctacctgatccccctgacccagtgcagcagcctgggcgccgagagcatcctgagcggcaaggagaacagcagcgccctgagccccaaccacagaatctacagcagccccatcgccggcgtgatccccgtgaccagcagcgagctgaccgccgtgaacttccccagcttccacgtgacccccctgaagctgatggtgagccccaccagcgtggccgccgtgcccgtgggcaacagccccgccctggccagcagccaccccgtgcccatccagaaccccagcagcgccatcgtgaacttcaccctgcagcacctgggcctgatcagccccaacgtgcagctgagcgccagccccggcagcggcatcgtgcccgtgagccccagaatcgagagcgtgaacgtggcccccgagaacgccggcacccagcagggcagagccaccaactacgacagccccgtgcccggccagagccagcccaacggccagagcgtggccgtgaccggcgcccagcagcccgtgcccgtgacccccaagggcagccagctggtggccgagagcttcttcagaacccccggcggccccaccaagcccaccagcagcagctgcatggacttcgagggcgccaacaagaccagcctgggcaccctgttcgtgccccagagaaagctggaggtgagcaccgaggacgtgcactag

SEQ ID NO: 80024 - DNA, 2604 bp, synthetic construct; identical to SEQ ID NO: 80022
  misc_feature 1..2604: note = Description of Artificial Sequence: Synthetic coding sequence
  source 1..2604: mol_type = other DNA

SEQ ID NO: 80025 - DNA, 2355 bp, synthetic construct
  misc_feature 1..2355: note = Description of Artificial Sequence: Synthetic coding sequence
  source 1..2355: mol_type = other DNA
atggagggcgccatggccgtgagagtgaccgccgcccacaccgccgaggcccaggccgaggccggcagagaggccggcgagggcgccgtggccgccgtggccgccgccctggcccccagcggcttcctgggcctgcccgcccccttcagcgaggaggacgaggacgacgtgcacagatgcggcagatgccaggccgagttcaccgccctggaggacttcgtgcagcacaagatccagaaggcctgccagagagccccccccgaggccctgcccgccacccccgccaccaccgccctgctgggccaggaggtggtgcccgccgcccccggccccgaggagcccatcaccgtggcccacatcgtggtggaggccgccagcctggccgccgacatcagccacgccagcgacctggtgggcggcggccacatcaaggaggtgatcgtggccgccgaggccgagctgggcgacggcgagatggccgaggcccccggcagccccagacagcagggcctgggcctggccggcgagggcgagcaggcccaggtgaagctgctggtgaacaaggacggcagatacgtgtgcgccctgtgccacaagaccttcaagaccggcagcatcctgaaggcccacatggtgacccacagcagcagaaaggaccacgagtgcaagctgtgcggcgccagcttcagaaccaagggcagcctgatcagacaccacagaagacacaccgacgagagaccctacaagtgcagcaagtgcggcaagagcttcagagagagcggcgccctgaccagacacctgaagagcctgaccccctgcaccgagaagatcagattcagcgtgagcaaggacgtggtggtgagcaaggaggacgccagagccggcagcggcgccggcgccgccggcctgggcaccgccaccagcagcgtgaccggcgagcccatcgagaccagccccgtgatccacctggtgaccgacgccaagggcaccgtgatccacgaggtgcacgtgcagatgcaggagctgagcctgggcatgaaggccctggcccccgagccccccgtgagccaggagctgccctgcagcagcgagggcagcagagagaacctgctgcaccaggccatgcagaacagcggcatcgtgctggagagagccgccggcgaggagggcgccctggagcccgcccccgccgccggcagcagcccccagcccctggccgtggccgccccccagctgcccgtgctggaggtgcagcccctggagacccaggtggccagcgaggccagcgccgtgcccagaacccacccctgcccccagtgcagcgagaccttccccaccgccgccaccctggaggcccacaagagaggccacaccggccccagacccttcgcctgcgcccagtgcggcaaggccttccccaaggcctacctgctgaagaagcaccaggaggtgcacgtgagagagagaagattcagatgcggcgactgcggcaagctgtacaagaccatcgcccacgtgagaggccacagaagagtgcacagcgacgagagaccctacccctgccccaagtgcggcaagagatacaagaccaagaacgcccagcaggtgcacttcagaacccacctggaggagaagccccacgtgtgccagttctgcagcagaggcttcagagagaagggcagcctggtgagacacgtgagacaccacaccggcgagaagcccttcaagtgctacaagtgcggcagaggcttcgccgagcacggcaccctgaacagacacctgagaaccaagggcggctgcctgctggaggtggaggagctgctggtgagcgaggacagccccgccgccgccaccaccgtgctgaccgaggacccccacaccgtgctggtggagttcagcagcgtggtggccgacacccaggagtacatcatcgaggccaccgccgacgacgccgagaccagcgaggccaccgagatcatcgagggcacccagaccgaggtggacagccacatcatgaaggtggtgcagcagatcgtgcaccaggccagcgccggccaccagatcatcgtgcagaacgtgaccatggacgaggagaccgccctgggccccgaggccgccgccgccgacaccatcaccatcgccacccccgagagcctgaccgagcaggtggccatgaccctggccagcgccatcagcgagggcaccgtgctggccgccagagccggcaccagcggcaccgagcaggccaccgtgaccatggtgagcagcgaggacatcgagatcctggagcacgccggcgagctggtgatcgccagccccgagggccagctggaggtgcagaccgtgatcgtgtag

SEQ ID NO: 80026 - DNA, 1047 bp, synthetic construct
  misc_feature 1..1047: note = Description of Artificial Sequence: Synthetic coding sequence
  source 1..1047: mol_type = other DNA
atggccgccacctgcgagatcagcaacatcttcagcaactacttcagcgccatgtacagcagcgaggacagcaccctggccagcgtgccccccgccgccaccttcggcgccgacgacctggtgctgaccctgagcaacccccagatgagcctggagggcaccgagaaggccagctggctgggcgagcagccccagttctggagcaagacccaggtgctggactggatcagctaccaggtggagaagaacaagtacgacgccagcgccatcgacttcagcagatgcgacatggacggcgccaccctgtgcaactgcgccctggaggagctgagactggtgttcggccccctgggcgaccagctgcacgcccagctgagagacctgaccagcagcagcagcgacgagctgagctggatcatcgagctgctggagaaggacggcatggccttccaggaggccctggaccccggccccttcgaccagggcagccccttcgcccaggagctgctggacgacgtgagcaccgccggcaccggcgccagcagaagcagccacagcagcgacagcggcggcagcgacgtggacctggaccccaccgacggcaagctgttccccagcgacggcttcagagactgcaagaagggcgaccccaagcacggcaagagaaagagaggcagacccagaaagctgagcaaggagtactgggactgcctggagggcaagaagagcaagcacgcccccagaggcacccacctgtgggagttcatcagagacatcctgatccaccccgagctgaacgagggcctgatgaagtgggagaacagacacgagggcgtgttcaagttcctgagaagcgaggccgtggcccagctgtggggccagaagaagaagaacagcaacatgacctacgagaagctgagcagagccatgagatactactacaagagagagatcctggagagagtggacggcagaagactggtgtacaagttcggcaagaacagcagcggctggaaggaggaggaggtgctgcagagcagaaactag

SEQ ID NO: 80027 - DNA, 1116 bp, synthetic construct
  misc_feature 1..1116: note = Description of Artificial Sequence: Synthetic coding sequence
  source 1..1116: mol_type = other DNA
atggccgccacctgcgagatcagcaacatcttcagcaactacttcagcgccatgtacagcagcgaggacagcaccctggccagcgtgccccccgccgccaccttcggcgccgacgacctggtgctgaccctgagcaacccccagatgagcctggagggcaccgagaaggccagctggctgggcgagcagccccagttctggagcaagacccaggtgctggactggatcagctaccaggtggagaagaacaagtacgacgccagcgccatcgacttcagcagatgcgacatggacggcgccaccctgtgcaactgcgccctggaggagctgagactggtgttcggccccctgggcgaccagctgcacgcccagctgagagacctgaccagcagcagcagcgacgagctgagctggatcatcgagctgctggagaaggacggcatggccttccaggaggccctggaccccggccccttcgaccagggcagccccttcgcccaggagctgctggacgacggccagcaggccagcccctaccaccccggcagctgcggcgccggcgcccccagccccggcagcagcgacgtgagcaccgccggcaccggcgccagcagaagcagccacagcagcgacagcggcggcagcgacgtggacctggaccccaccgacggcaagctgttccccagcgacggcttcagagactgcaagaagggcgaccccaagcacggcaagagaaagagaggcagacccagaaagctgagcaaggagtactgggactgcctggagggcaagaagagcaagcacgcccccagaggcacccacctgtgggagttcatcagagacatcctgatccaccccgagctgaacgagggcctgatgaagtgggagaacagacacgagggcgtgttcaagttcctgagaagcgaggccgtggcccagctgtggggccagaagaagaagaacagcaacatgacctacgagaagctgagcagagccatgagatactactacaagagagagatcctggagagagtggacggcagaagactggtgtacaagttcggcaagaacagcagcggctggaaggaggaggaggtgctgcagagcagaaactag

SEQ ID NO: 80028 - DNA, 1116 bp, synthetic construct; identical to SEQ ID NO: 80027
  misc_feature 1..1116: note = Description of Artificial Sequence: Synthetic coding sequence
  source 1..1116: mol_type = other DNA

SEQ ID NO: 80029 - DNA, 1116 bp, synthetic construct; identical to SEQ ID NO: 80027
  misc_feature 1..1116: note = Description of Artificial Sequence: Synthetic coding sequence
  source 1..1116: mol_type = other DNA

SEQ ID NO: 80030 - DNA, 699 bp, synthetic construct
  misc_feature 1..699: note = Description of Artificial Sequence: Synthetic coding sequence
  source 1..699: mol_type = other DNA
atggccgccacctgcgagatcagcaacatcttcagcaactacttcagcgccatgtacagcagcgaggacagcaccctggccagcgtgccccccgccgccaccttcggcgccgacgacctggtgctgaccctgagcaacccccagatgagcctggaggagaaggccagctggctgggcgagcagccccagttctggagcaagacccaggtgctggactggatcagctaccaggtggagaagaacaagtacgacgccagcgccatcgacttcagcagatgcgacatggacggcgccaccctgtgcaactgcgccctggaggagctgagactggtgttcggccccctgggcgaccagctgcacgcccagctgagagacctgaccagcagcagcagcgacgagctgagctggatcatcgagctgctggagaaggacggcatggccttccaggaggccctggaccccggccccttcgaccagggcagccccttcgcccaggagctgctggacgacggccagcaggccagcccctaccaccccggcagctgcggcgccggcgcccccagccccggcagcagcgacgtgagcaccgccggcaccggcgccagcagaagcagccacagcagcgacagcggcggcagcgacgtggacctggaccccaccgacggcaagctgttccccagcgacggcttcagagactag

SEQ ID NO: 80031 - DNA, 1992 bp, synthetic construct
  misc_feature 1..1992: note = Description of Artificial Sequence: Synthetic coding sequence
  source 1..1992: mol_type = other DNA
atggccatcaccctgcagcccagcgacctgatcttcgagttcgccagcaacggcatggacgacgacatccaccagctggaggaccccagcgtgttccccgccgtgatcgtggagcaggtgccctaccccgacctgctgcacctgtacagcggcctggagctggacgacgtgcacaacggcatcatcaccgacggcaccctgtgcatgacccaggaccagatcctggagggcagcttcctgctgaccgacgacaacgaggccaccagccacaccatgagcaccgccgaggtgctgctgaacatggagagccccagcgacatcctggacgagaagcagatcttcagcaccagcgagatgctgcccgacagcgaccccgcccccgccgtgaccctgcccaactacctgttccccgccagcgagcccgacgccctgaacagagccggcgacaccagcgaccaggagggccacagcctggaggagaaggccagcagagaggagagcgccaagaagaccggcaagagcaagaagagaatcagaaagaccaagggcaacagaagcaccagccccgtgaccgaccccagcatccccatcagaaagaagagcaaggacggcaagggcagcaccatctacctgtgggagttcctgctggccctgctgcaggacagaaacacctgccccaagtacatcaagtggacccagagagagaagggcatcttcaagctggtggacagcaaggccgtgagcaagctgtggggcaagcagaagaacaagcccgacatgaactacgagaccatgggcagagccctgagatactactaccagagaggcatcctggccaaggtggagggccagagactggtgtaccagttcaaggagatgcccaaggacctggtggtgatcgaggacgaggacgagagcagcgaggccaccgccgcccccccccaggccagcaccgccagcgtggccagcgccagcaccaccagaagaaccagcagcagagtgagcagcagaagcgccccccagggcaagggcagcagcagctgggagaagcccaagatccagcacgtgggcctgcagcccagcgccagcctggagctgggccccagcctggacgaggagatccccaccaccagcaccatgctggtgagccccgccgagggccaggtgaagctgaccaaggccgtgagcgccagcagcgtgcccagcaacatccacctgggcgtggcccccgtgggcagcggcagcgccctgaccctgcagaccatccccctgaccaccgtgctgaccaacggcccccccgccagcaccaccgcccccacccagctggtgctgcagagcgtgcccgccgccagcaccttcaaggacaccttcaccctgcaggccagcttccccctgaacgccagcttccaggacagccaggtggccgcccccggcgcccccctgatcctgagcggcctgccccagctgctggccggcgccaacagacccaccaaccccgccccccccaccgtgaccggcgccggccccgccggccccagcagccagccccccggcaccgtgatcgccgccttcatcagaaccagcggcaccaccgccgcccccagagtgaaggagggccccctgagaagcagcagctacgtgcagggcatggtgaccggcgcccccatggagggcctgctggtgcccgaggagaccctgagagagctgctgagagaccaggcccacctgcagcccctgcccacccaggtggtgagcagaggcagccacaaccccagcctgctgggcaaccagaccctgagcccccccagcagacccaccgtgggcctgacccccgtggccgagctggagctgagcagcggcagcggcagcctgctgatggccgagcccagcgtgaccaccagcggcagcctgctgaccagaagccccacccccgcccccttcagccccttcaaccccaccagcctgatcaagatggagccccacgacatctag

SEQ ID NO: 80032 - DNA, 1992 bp, synthetic construct; identical to SEQ ID NO: 80031
  misc_feature 1..1992: note = Description of Artificial Sequence: Synthetic coding sequence
  source 1..1992: mol_type = other DNA

SEQ ID NO: 80033 - DNA, 234 bp, synthetic construct
  misc_feature 1..234: note = Description of Artificial Sequence: Synthetic coding sequence
  source 1..234: mol_type = other DNA
atggacgacgacatccaccagctggaggaccccagcgtgttccccgccgtgatcgtggagcaggtgccctaccccgacctgctgcacctgtacagcggcctggagctggacgacgtgcacaacggcatcatcaccgacggcaccctgtgcatgacccaggaccagatcctggagggcagcttcctgctgaccgacgacaacgaggccaccagccacaccatgagcaccgcctag

SEQ ID NO: 80034 - DNA, 768 bp, synthetic construct
  misc_feature 1..768: note = Description of Artificial Sequence: Synthetic coding sequence
  source 1..768: mol_type = other DNA
atgctggacagcgtgacccacagcaccttcctgcccaacgccagcttctgcgaccccctgatgagctggaccgacctgttcagcaacgaggagtactaccccgccttcgagcaccagaccgcctgcgacagctactggaccagcgtgcaccccgagtactggaccaagagacacgtgtgggagtggctgcagttctgctgcgaccagtacaagctggacaccaactgcatcagcttctgcaacttcaacatcagcggcctgcagctgtgcagcatgacccaggaggagttcgtggaggccgccggcctgtgcggcgagtacctgtacttcatcctgcagaacatcagaacccagggctacagcttcttcaacgacgccgaggagagcaaggccaccatcaaggactacgccgacagcaactgcctgaagaccagcggcatcaagagccaggactgccacagccacagcagaaccagcctgcagagcagccacctgtgggagttcgtgagagacctgctgctgagccccgaggagaactgcggcatcctggagtgggaggacagagagcagggcatcttcagagtggtgaagagcgaggccctggccaagatgtggggccagagaaagaagaacgacagaatgacctacgagaagctgagcagagccctgagatactactacaagaccggcatcctggagagagtggacagaagactggtgtacaagttcggcaagaacgcccacggctggcaggaggacaagctgtag

SEQ ID NO: 80035 - DNA, 798 bp, synthetic construct
  misc_feature 1..798: note = Description of Artificial Sequence: Synthetic coding sequence
  source 1..798: mol_type = other DNA
atgcccagcctgccccacagccacagagtgatgctggacagcgtgacccacagcaccttcctgcccaacgccagcttctgcgaccccctgatgagctggaccgacctgttcagcaacgaggagtactaccccgccttcgagcaccagaccgcctgcgacagctactggaccagcgtgcaccccgagtactggaccaagagacacgtgtgggagtggctgcagttctgctgcgaccagtacaagctggacaccaactgcatcagcttctgcaacttcaacatcagcggcctgcagctgtgcagcatgacccaggaggagttcgtggaggccgccggcctgtgcggcgagtacctgtacttcatcctgcagaacatcagaacccagggctacagcttcttcaacgacgccgaggagagcaaggccaccatcaaggactacgccgacagcaactgcctgaagaccagcggcatcaagagccaggactgccacagccacagcagaaccagcctgcagagcagccacctgtgggagttcgtgagagacctgctgctgagccccgaggagaactgcggcatcctggagtgggaggacagagagcagggcatcttcagagtggtgaagagcgaggccctggccaagatgtggggccagagaaagaagaacgacagaatgacctacgagaagctgagcagagccctgagatactactacaagaccggcatcctggagagagtggacagaagactggtgtacaagttcggcaagaacgcccacggctggcaggaggacaagctgtag

SEQ ID NO: 80036 - DNA, 483 bp, synthetic construct
  misc_feature 1..483: note = Description of Artificial Sequence: Synthetic coding sequence
  source 1..483: mol_type = other DNA
atgctggacagcgtgacccacagcaccttcctgcccaacgccagcttctgcgaccccctgatgagctggaccgacctgttcagcaacgaggagtactaccccgccttcgagcaccagaccgacgccgacagcaactgcctgaagaccagcggcatcaagagccaggactgccacagccacagcagaaccagcctgcagagcagccacctgtgggagttcgtgagagacctgctgctgagccccgaggagaactgcggcatcctggagtgggaggacagagagcagggcatcttcagagtggtgaagagcgaggccctggccaagatgtggggccagagaaagaagaacgacagaatgacctacgagaagctgagcagagccctgagatactactacaagaccggcatcctggagagagtggacagaagactggtgtacaagttcggcaagaacgcccacggctggcaggaggacaagctgtag

SEQ ID NO: 80037 - DNA, 1728 bp, synthetic construct
  misc_feature 1..1728: note = Description of Artificial Sequence: Synthetic coding sequence
  source 1..1728: mol_type = other DNA
atgttcggcatccaggacaccctgggcagaggccccaccctgaaggagaagagcctgggcgccgagatggacagcgtgagaagctgggtgagaaacgtgggcgtggtggacgccaacgtggccgcccagagcggcgtggccctgagcagagcccacttcgagaagcagccccccagcaacctgagaaagagcaacttcttccacttcgtgctggccctgtacgacagacagggccagcccgtggagatcgagagaaccgccttcgtggacttcgtggagaacgacaaggagcagggcaacgagaagaccaacaacggcacccactacaagctgcagctgctgtacagcaacggcgtgagaaccgagcaggacctgtacgtgagactgatcgacagcgtgaccaagcagcccatcgcctacgagggccagaacaagaaccccgagatgtgcagagtgctgctgacccacgaggtgatgtgcagcagatgctgcgagaagaagagctgcggcaacagaaacgagacccccagcgaccccgtgatcatcgacagattcttcctgaagttcttcctgaagtgcaaccagaactgcctgaagaccgccggcaaccccagagacatgagaagattccaggtggtgctgagcaccaccgtgaacgtggacggccacgtgctggccgtgagcgacaacatgttcgtgcacaacaacagcaagcacggcagaagagccagaagactggaccccagcgaggccaccccctgcatcaaggccatcagccccagcgagggctggaccaccggcggcgccatggtgatcatcatcggcgacaacttcttcgacggcctgcaggtggtgttcggcaccatgctggtgtggagcgagctgatcaccccccacgccatcagagtgcagaccccccccagacacatccccggcgtggtggaggtgaccctgagctacaagagcaagcagttctgcaagggcgcccccggcagattcatctacaccgccctgaacgagcccaccatcgactacggcttccagagactgcagaaggtgatccccagacaccccggcgaccccgagagactggccaaggagatgctgctgaagagagccgccgacctggtggaggccctgtacggcaccccccacaacaaccaggacatcatcctgaagagagccgccgacatcgccgaggccctgtacagcgtgcccagaaaccccagccagctgcccgccctgagcagcagccccgcccacagcggcatgatgggcatcaacagctacggcagccagctgggcgtgagcatcagcgagagcacccagggcaacaaccagggctacatcagaaacaccagcagcatcagccccagaggctacagcagcagcagcaccccccagcagagcaactacagcaccagcagcaacagcatgaacggctacagcaacgtgcccatggccaacctgggcgtgcccggcagccccggcttcctgaacggcagccccaccggcagcccctacggcatcatgagcagcagccccaccgtgggcagcagcagcaccagcagcatcctgcccttcagcagcagcgtgttccccgccgtgaagcagaagagcgccttcgcccccgtgatcagaccccagggcagccccagccccgcctgcagcagcggcaacggcaacggcttcagagccatgaccggcctggtggtgccccccatgtag

SEQ ID NO: 80038 - DNA, 795 bp, synthetic construct
  misc_feature 1..795: note = Description of Artificial Sequence: Synthetic coding sequence
  source 1..795: mol_type = other DNA
atggtgatcatcatcggcgacaacttcttcgacggcctgcaggtggtgttcggcaccatgctggtgtggagcgagctgatcaccccccacgccatcagagtgcagaccccccccagacacatccccggcgtggtggaggtgaccctgagctacaagagcaagcagttctgcaagggcgcccccggcagattcatctacaccgccctgaacgagcccaccatcgactacggcttccagagactgcagaaggtgatccccagacaccccggcgaccccgagagactggccaaggagatgctgctgaagagagccgccgacctggtggaggccctgtacggcaccccccacaacaaccaggacatcatcctgaagagagccgccgacatcgccgaggccctgtacagcgtgcccagaaaccccagccagctgcccgccctgagcagcagccccgcccacagcggcatgatgggcatcaacagctacggcagccagctgggcgtgagcatcagcgagagcacccagggcaacaaccagggctacatcagaaacaccagcagcatcagccccagaggctacagcagcagcagcaccccccagcagagcaactacagcaccagcagcaacagcatgaacggctacagcaacgtgcccatggccaacctgggcgtgcccggcagccccggcttcctgaacggcagccccaccggcagcccctacggcaccggcctgtggctgacctggctgctgaaggccttctggggcaagaagagaatcgagaccatccccttcctgtag

SEQ ID NO: 80039 - DNA, 1791 bp, synthetic construct
  misc_feature 1..1791: note = Description of Artificial Sequence: Synthetic coding sequence
  source 1..1791: mol_type = other DNA
atgttcggcatccaggagaacatccccagaggcggcaccaccatgaaggaggagcccctgggcagcggcatgaaccccgtgagaagctggatgcacaccgccggcgtggtggacgccaacaccgccgcccagagcggcgtgggcctggccagagcccacttcgagaagcagccccccagcaacctgagaaagagcaacttcttccacttcgtgctggccctgtacgacagacagggccagcccgtggagatcgagagaaccgccttcgtggacttcgtggagaaggagaaggagcccaacaacgagaagaccaacaacggcatccactacaagctgcagctgctgtacagcaacggcgtgagaaccgagcaggacctgtacgtgagactgatcgacagcatgaccaagcaggccatcgtgtacgagggccaggacaagaaccccgagatgtgcagagtgctgctgacccacgagatcatgtgcagcagatgctgcgacaagaagagctgcggcaacagaaacgagacccccagcgaccccgtgatcatcgacagattcttcctgaagttcttcctgaagtgcaaccagaactgcctgaagaacgccggcaaccccagagacatgagaagattccaggtggtggtgagcaccaccgtgaacgtggacggccacgtgctggccgtgagcgacaacatgttcgtgcacaacaacagcaagcacggcagaagagccagaagactggaccccagcgagggcaccgcccccagctacctggagaacgccaccccctgcatcaaggccatcagccccagcgagggctggaccaccggcggcgccaccgtgatcatcatcggcgacaacttcttcgacggcctgcaggtggtgttcggcaccatgctggtgtggagcgagctgatcaccccccacgccatcagagtgcagaccccccccagacacatccccggcgtggtggaggtgaccctgagctacaagagcaagcagttctgcaagggcgcccccggcagattcgtgtacaccgccctgaacgagcccaccatcgactacggcttccagagactgcagaaggtgatccccagacaccccggcgaccccgagagactgcccaaggaggtgctgctgaagagagccgccgacctggtggaggccctgtacggcatgccccacaacaaccaggagatcatcctgaagagagccgccgacatcgccgaggccctgtacagcgtgcccagaaaccacaaccagatccccaccctgggcaacaaccccgcccacaccggcatgatgggcgtgaacagcttcagcagccagctggccgtgaacgtgagcgagaccagccaggccaacgaccaggtgggctacagcagaaacaccagcagcgtgagccccagaggctacgtgcccagcagcaccccccagcagagcaactacaacaccgtgagcaccagcatgaacggctacggcagcggcgccatggccagcctgggcgtgcccggcagccccggcttcctgaacggcagcagcgccaacagcccctacggcatcgtgcccagcagccccaccatggccgccagcagcgtgaccctgcccagcaactgcagcagcacccacggcatcttcagcttcagccccgccaacgtgatcagcgccgtgaagcagaagagcgccttcgcccccgtggtgagaccccaggccagccccccccccagctgcaccagcgccaacggcaacggcctgcaggccatgagcggcctggtggtgccccccatgtag

SEQ ID NO: 80040 - DNA, 1656 bp, synthetic construct
  misc_feature 1..1656: note = Description of Artificial Sequence: Synthetic coding sequence
  source 1..1656: mol_type = other DNA
atgttcggcatccaggagaacatccccagaggcggcaccaccatgaaggaggagcccctgggcagcggcatgaaccccgtgagaagctggatgcacaccgccggcgtggtggacgccaacaccgccgcccagagcggcgtgggcctggccagagcccacttcgagaagcagccccccagcaacctgagaaagagcaacttcttccacttcgtgctggccctgtacgacagacagggccagcccgtggagatcgagagaaccgccttcgtggacttcgtggagaaggagaaggagcccaacaacgagaagaccaacaacggcatccactacaagctgcagctgctgtacagcaacggcgtgagaaccgagcaggacctgtacgtgagactgatcgacagcatgaccaagcaggccatcgtgtacgagggccaggacaagaaccccgagatgtgcagagtgctgctgacccacgagatcatgtgcagcagatgctgcgacaagaagagctgcggcaacagaaacgagacccccagcgaccccgtgatcatcgacagattcttcctgaagttcttcctgaagtgcaaccagaactgcctgaagaacgccggcaaccccagagacatgagaagattccaggtggtggtgagcaccaccgtgaacgtggacggccacgtgctggccgtgagcgacaacatgttcgtgcacaacaacagcaagcacggcagaagagccagaagactggaccccagcgaggccaccccctgcatcaaggccatcagccccagcgagggctggaccaccggcggcgccaccgtgatcatcatcggcgacaacttcttcgacggcctgcaggtggtgttcggcaccatgctggtgtggagcgagctgatcaccccccacgccatcagagtgcagaccccccccagacacatccccggcgtggtggaggtgaccctgagctacaagagcaagcagttctgcaagggcgcccccggcagattcgtgtacaccgccctgaacgagcccaccatcgactacggcttccagagactgcagaaggtgatccccagacaccccggcgaccccgagagactgcccaaggaggtgctgctgaagagagccgccgacctggtggaggccctgtacggcatgccccacaacaaccaggagatcatcctgaagagagccgccgacatcgccgaggccctgtacagcgtgcccagaaaccacaaccagatccccaccctgggcaacaaccccgcccacaccggcatgatgggcgtgaacagcttcagcagccagctggccgtgaacgtgagcgagaccagccaggccaacgaccaggtgggctacagcagaaacaccagcagcgtgagccccagaggctacgtgcccagcagcaccccccagcagagcaactacaacaccgtgagcaccagcatgaacggctacggcagcggcgccatggccagcctgggcgtgcccggcagccccggcttcctgaacggcagcagcgccaacagcccctacggcatgaagcagaagagcgccttcgcccccgtggtgagaccccaggccagccccccccccagctgcaccagcgccaacggcaacggcctgcaggccatgagcggcctggtggtgccccccatgtag

SEQ ID NO: 80041 - DNA, 576 bp, synthetic construct
  misc_feature 1..576: note = Description of Artificial Sequence: Synthetic coding sequence
  source 1..576: mol_type = other DNA
tgattcagcagccagctggccgtgaacgtgagcgagaccagccaggccaacgaccaggtgggctacagcagaaacaccagcagcgtgagccccagaggctacgtgcccagcagcaccccccagcagagcaactacaacaccgtgagcaccagcatgaacggctacggcagcggcgccatggccagcctgggcgtgcccggcagccccggcttcctgaacggcagcagcgccaacagcccctacggcatcgtgcccagcagccccaccatggccgccagcagcgtgaccctgcccagcaactgcagcagcacccacggcatcttcagcttcagccccgccaacgtgatcagcgccgtgaagcagaagagcgccttcgcccccgtggtgagaccccaggccagccccccccccagctgcaccagcgccaacggcaacggcctgcagggcagcctgctgggcgccgaggacgtggccgccgagaagaccaactggcccttctgcgaggtgggcggcatcttccacttcgacgagctgatgctgaagaagggcaccggcaagctgtgcctgggctggtag

SEQ ID NO: 80042 - DNA, 1809 bp, synthetic construct
  misc_feature 1..1809: note = Description of Artificial Sequence: Synthetic coding sequence
  source 1..1809: mol_type = other DNA
atgttccccgcccaggacgccctgcccagaagcggcctgaacctgaaggaggagcccctgctgcccgccggcctgggcagcgtgagaagctggatgcagggcgccggcatcctggacgccagcaccgccgcccagagcggcgtgggcctggccagagcccacttcgagaagcagccccccagcaacctgagaaagagcaacttcttccacttcgtgctggccatgtacgacagacagggccagcccgtggaggtggagagaaccgccttcatcgacttcgtggagaaggacagagagcccggcgccgagaagaccaacaacggcatccactacagactgagactggtgtacaacaacggcctgagaaccgagcaggacctgtacgtgagactgatcgacagcatgagcaagcaggccatcatctacgagggccaggacaagaaccccgagatgtgcagagtgctgctgacccacgagatcatgtgcagcagatgctgcgacagaaagagctgcggcaacagaaacgagacccccagcgaccccgtgatcatcgacagattcttcctgaagttcttcctgaagtgcaaccagaactgcctgaagaacgccggcaaccccagagacatgagaagattccaggtggtggtgagcaccaccgtgagcgtggacggccacgtgctggccgtgagcgacaacatgttcgtgcacaacaacagcaagcacggcagaagagccagaagactggaccccagcgaggccgccaccccctgcatcaaggccatcagccccggcgagggctggaccaccggcggcgccaccgtgatcgtgatcggcgacaacttcttcgacggcctgcaggtggtgttcggcaacgtgctggtgtggagcgagctgatcaccccccacgccatcagagtgcagaccccccccagacacatccccggcgtggtggaggtgaccctgagctacaagagcaagcagttctgcaagggctgccccggcagattcgtgtacaccgccctgaacgagcccaccatcgactacggcttccagagactgcagaaggtgatccccagacaccccggcgaccccgagagactgcccaaggaggtgctgctgaagagagccgccgacctggccgaggccctgtacggcgtgcccggcagcaaccaggagctgctgctgaagagagccgccgacgtggccgaggccctgtacagcacccccagagcccccggccccctggcccccctggcccccagccacccccaccccgccgtggtgggcatcaacgccttcagcagccccctggccatcgccgtgggcgacgccacccccggccccgagcccggctacgccagaagctgcagcagcgccagccccagaggcttcgcccccagccccggcagccagcagagcggctacggcggcggcctgggcgccggcctgggcggctacggcgcccccggcgtggccggcctgggcgtgcccggcagccccagcttcctgaacggcagcaccgccaccagccccttcgccatcatgcccagcagcccccccctggccgccgccagcagcatgagcctgcccgccgccgcccccaccaccagcgtgttcagcttcagccccgtgaacatgatcagcgccgtgaagcagagaagcgccttcgcccccgtgctgagaccccccagcagccccccccaggcctgccccagagcccacggcgagggcctgcccgaccagagcttcgaggacagcgacaagttccacagccccgccagaggcctgcagggcctggcctacagctag

SEQ ID NO: 80043 - DNA, 1797 bp, synthetic construct
  misc_feature 1..1797: note = Description of Artificial Sequence: Synthetic coding sequence
  source 1..1797: mol_type = other DNA
atggacgccctgcccagaagcggcctgaacctgaaggaggagcccctgctgcccgccggcctgggcagcgtgagaagctggatgcagggcgccggcatcctggacgccagcaccgccgcccagagcggcgtgggcctggccagagcccacttcgagaagcagccccccagcaacctgagaaagagcaacttcttccacttcgtgctggccatgtacgacagacagggccagcccgtggaggtggagagaaccgccttcatcgacttcgtggagaaggacagagagcccggcgccgagaagaccaacaacggcatccactacagactgagactggtgtacaacaacggcctgagaaccgagcaggacctgtacgtgagactgatcgacagcatgagcaagcaggccatcatctacgagggccaggacaagaaccccgagatgtgcagagtgctgctgacccacgagatcatgtgcagcagatgctgcgacagaaagagctgcggcaacagaaacgagacccccagcgaccccgtgatcatcgacagattcttcctgaagttcttcctgaagtgcaaccagaactgcctgaagaacgccggcaaccccagagacatgagaagattccaggtggtggtgagcaccaccgtgagcgtggacggccacgtgctggccgtgagcgacaacatgttcgtgcacaacaacagcaagcacggcagaagagccagaagactggaccccagcgaggccgccaccccctgcatcaaggccatcagccccggcgagggctggaccaccggcggcgccaccgtgatcgtgatcggcgacaacttcttcgacggcctgcaggtggtgttcggcaacgtgctggtgtggagcgagctgatcaccccccacgccatcagagtgcagaccccccccagacacatccccggcgtggtggaggtgaccctgagctacaagagcaagcagttctgcaagggctgccccggcagattcgtgtacaccgccctgaacgagcccaccatcgactacggcttccagagactgcagaaggtgatccccagacaccccggcgaccccgagagactgcccaaggaggtgctgctgaagagagccgccgacctggccgaggccctgtacggcgtgcccggcagcaaccaggagctgctgctgaagagagccgccgacgtggccgaggccctgtacagcacccccagagcccccggccccctggcccccctggcccccagccacccccaccccgccgtggtgggcatcaacgccttcagcagccccctggccatcgccgtgggcgacgccacccccggccccgagcccggctacgccagaagctgcagcagcgccagccccagaggcttcgcccccagccccggcagccagcagagcggctacggcggcggcctgggcgccggcctgggcggctacggcgcccccggcgtggccggcctgggcgtgcccggcagccccagcttcctgaacggcagcaccgccaccagccccttcgccatcatgcccagcagcccccccctggccgccgccagcagcatgagcctgcccgccgccgcccccaccaccagcgtgttcagcttcagccccgtgaacatgatcagcgccgtgaagcagagaagcgccttcgcccccgtgctgagaccccccagcagccccccccaggcctgccccagagcccacggcgagggcctgcccgaccagagcttcgaggacagcgacaagttccacagccccgccagaggcctgcagggcctggcctacagctag

SEQ ID NO: 80044 - DNA, 555 bp, synthetic construct
  misc_feature 1..555: note = Description of Artificial Sequence: Synthetic coding sequence
  source 1..555: mol_type = other DNA
agaggcagcgtgcagcacccccccgtggtgggcatcaacgccttcagcagccccctggccatcgccgtgggcgacgccacccccggccccgagcccggctacgccagaagctgcagcagcgccagccccagaggcttcgcccccagccccggcagccagcagagcggctacggcggcggcctgggcgccggcctgggcggctacggcgcccccggcgtggccggcctgggcgtgcccggcagccccagcttcctgaacggcagcaccgccaccagccccttcgccatcatgcccagcagcccccccctggccgccgccagcagcatgagcctgcccgccgccgcccccaccaccagcgtgttcagcttcagccccgtgaacatgatcagcgccgtgaagcagagaagcgccttcgcccccgtgctgagaccccccagcagccccccccaggcctgccccagagcccacggcgagggcctgcccgaccagagcttcgaggacagcgacaagttccacagccccgccagaggcctgcagggcctggcctacagctag

SEQ ID NO: 80045 - DNA, 1632 bp, synthetic construct
  misc_feature 1..1632: note = Description of Artificial Sequence: Synthetic coding sequence
  source 1..1632: mol_type = other DNA
atggccgccgccaaggccgagatgcagctgatgagccccctgcagatcagcgaccccttcggcagcttcccccacagccccaccatggacaactaccccaagctggaggagatgatgctgctgagcaacggcgccccccagttcctgggcgccgccggcgcccccgagggcagcggcagcaacagcagcagcagcagcagcggcggcggcggcggcggcggcggcggcagcaacagcagcagcagcagcagcaccttcaacccccaggccgacaccggcgagcagccctacgagcacctgaccgccgagagcttccccgacatcagcctgaacaacgagaaggtgctggtggagaccagctaccccagccagaccaccagactgccccccatcacctacaccggcagattcagcctggagcccgcccccaacagcggcaacaccctgtggcccgagcccctgttcagcctggtgagcggcctggtgagcatgaccaacccccccgccagcagcagcagcgcccccagccccgccgccagcagcgccagcgccagccagagcccccccctgagctgcgccgtgcccagcaacgacagcagccccatctacagcgccgcccccaccttccccacccccaacaccgacatcttccccgagccccagagccaggccttccccggcagcgccggcaccgccctgcagtaccccccccccgcctaccccgccgccaagggcggcttccaggtgcccatgatccccgactacctgttcccccagcagcagggcgacctgggcctgggcacccccgaccagaagcccttccagggcctggagagcagaacccagcagcccagcctgacccccctgagcaccatcaaggccttcgccacccagagcggcagccaggacctgaaggccctgaacaccagctaccagagccagctgatcaagcccagcagaatgagaaagtaccccaacagacccagcaagacccccccccacgagagaccctacgcctgccccgtggagagctgcgacagaagattcagcagaagcgacgagctgaccagacacatcagaatccacaccggccagaagcccttccagtgcagaatctgcatgagaaacttcagcagaagcgaccacctgaccacccacatcagaacccacaccggcgagaagcccttcgcctgcgacatctgcggcagaaagttcgccagaagcgacgagagaaagagacacaccaagatccacctgagacagaaggacaagaaggccgacaagagcgtggtggccagcagcgccaccagcagcctgagcagctaccccagccccgtggccaccagctaccccagccccgtgaccaccagctaccccagccccgccaccaccagctaccccagccccgtgcccaccagcttcagcagccccggcagcagcacctaccccagccccgtgcacagcggcttccccagccccagcgtggccaccacctacagcagcgtgccccccgccttccccgcccaggtgagcagcttccccagcagcgccgtgaccaacagcttcagcgccagcaccggcctgagcgacatgaccgccaccttcagccccagaaccatcgagatctgctag

SEQ ID NO: 80046 - DNA, 603 bp, synthetic construct
  misc_feature 1..603: note = Description of Artificial Sequence: Synthetic coding sequence
  source 1..603: mol_type = other DNA
atggccgccgccaaggccgagatgcagctgatgagccccctgcagatcagcgaccccttcggcagcttcccccacagccccaccatggacaactaccccaagctggaggagatgatgctgctgagcaacggcgccccccagttcctgggcgccgccggcgcccccgagggcagcggcagcaacagcagcagcagcagcagcggcggcggcggcggcggcggcggcggcagcaacagcagcagcagcagcagcaccttcaacccccaggccgacaccggcgagcagccctacgagcacctgaccgccgagagcttccccgacatcagcctgaacaacgagaaggtgctggtggagaccagctaccccagccagaccaccagactgccccccatcacctacaccggcagattcagcctggagcccgcccccaacagcggcttccccagccccagcgtggccaccacctacagcagcgtgccccccgccttccccgcccaggtgagcagcttccccagcagcgccgtgaccaacagcttcagcgccagcaccggcctgagcgacatgaccgccaccttcagccccagaaccatcgagatctgctag

SEQ ID NO: 80047 - DNA, 699 bp, synthetic construct
  misc_feature 1..699: note = Description of Artificial Sequence: Synthetic coding sequence
  source 1..699: mol_type = other DNA
atggccgccgccaaggccgagatgcagctgatgagccccctgcagatcagcgaccccttcggcagcttcccccacagccccaccatggacaactaccccaagctggaggagatgatgctgctgagcaacggcgccccccagttcctgggcgccgccggcgcccccgagggcagcggcagcaacagcagcagcagcagcagcggcggcggcggcggcggcggcggcggcagcaacagcagcagcagcagcagcaccttcaacccccaggccgacaccggcgagcagccctacgagcacctgaccgccgagagcttccccgacatcagcctgaacaacgagaaggtgctggtggagaccagctaccccagccagaccaccagactgccccccatcacctacaccggcagattcagcctggagcccgcccccaacagcggcaacaccctgtggcccgagcccctgttcagcctggtgagcggcctggtgagcatgaccaacccccccgccagcagcagcagcgcccccagccccgccgccagcagcgccagcgccagccagagcccccccctgagctgcgccgtgcccagcaacgacagcagccccatctacagcgccgcccccaccttccccacccccaacaccgacatcttccccgagaccgccatgagcaagttcttcaccagcatccagagaacctag

SEQ ID NO: 80048 - DNA, 1431 bp, synthetic construct
  misc_feature 1..1431: note = Description of Artificial Sequence: Synthetic coding sequence
  source 1..1431: mol_type = other DNA
atgatgaccgccaaggccgtggacaagatccccgtgaccctgagcggcttcgtgcaccagctgagcgacaacatctaccccgtggaggacctggccgccaccagcgtgaccatcttccccaacgccgagctgggcggccccttcgaccagatgaacggcgtggccggcgacggcatgatcaacatcgacatgaccggcgagaagagaagcctggacctgccctaccccagcagcttcgcccccgtgagcgcccccagaaaccagaccttcacctacatgggcaagttcagcatcgacccccagtaccccggcgccagctgctaccccgagggcatcatcaacatcgtgagcgccggcatcctgcagggcgtgaccagccccgccagcaccaccgccagcagcagcgtgaccagcgccagccccaaccccctggccaccggccccctgggcgtgtgcaccatgagccagacccagcccgacctggaccacctgtacagcccccccccccccccccccccctacagcggctgcgccggcgacctgtaccaggaccccagcgccttcctgagcgccgccaccaccagcaccagcagcagcctggcctacccccccccccccagctaccccagccccaagcccgccaccgaccccggcctgttccccatgatccccgactaccccggcttcttccccagccagtgccagagagacctgcacggcaccgccggccccgacagaaagcccttcccctgccccctggacaccctgagagtgcccccccccctgacccccctgagcaccatcagaaacttcaccctgggcggccccagcgccggcgtgaccggccccggcgccagcggcggcagcgagggccccagactgcccggcagcagcagcgccgccgccgccgccgccgccgccgccgcctacaacccccaccacctgcccctgagacccatcctgagacccagaaagtaccccaacagacccagcaagacccccgtgcacgagagaccctacccctgccccgccgagggctgcgacagaagattcagcagaagcgacgagctgaccagacacatcagaatccacaccggccacaagcccttccagtgcagaatctgcatgagaaacttcagcagaagcgaccacctgaccacccacatcagaacccacaccggcgagaagcccttcgcctgcgactactgcggcagaaagttcgccagaagcgacgagagaaagagacacaccaagatccacctgagacagaaggagagaaagagcagcgcccccagcgccagcgtgcccgcccccagcaccgccagctgcagcggcggcgtgcagcccggcggcaccctgtgcagcagcaacagcagcagcctgggcggcggccccctggccccctgcagcagcagaaccagaaccccctag

SEQ ID NO: 80049 - DNA, 1281 bp, synthetic construct
  misc_feature 1..1281: note = Description of Artificial Sequence: Synthetic coding sequence
  source 1..1281: mol_type = other DNA
atgaacggcgtggccggcgacggcatgatcaacatcgacatgaccggcgagaagagaagcctggacctgccctaccccagcagcttcgcccccgtgagcgcccccagaaaccagaccttcacctacatgggcaagttcagcatcgacccccagtaccccggcgccagctgctaccccgagggcatcatcaacatcgtgagcgccggcatcctgcagggcgtgaccagccccgccagcaccaccgccagcagcagcgtgaccagcgccagccccaaccccctggccaccggccccctgggcgtgtgcaccatgagccagacccagcccgacctggaccacctgtacagcccccccccccccccccccccctacagcggctgcgccggcgacctgtaccaggaccccagcgccttcctgagcgccgccaccaccagcaccagcagcagcctggcctacccccccccccccagctaccccagccccaagcccgccaccgaccccggcctgttccccatgatccccgactaccccggcttcttccccagccagtgccagagagacctgcacggcaccgccggccccgacagaaagcccttcccctgccccctggacaccctgagagtgcccccccccctgacccccctgagcaccatcagaaacttcaccctgggcggccccagcgccggcgtgaccggccccggcgccagcggcggcagcgagggccccagactgcccggcagcagcagcgccgccgccgccgccgccgccgccgccgcctacaacccccaccacctgcccctgagacccatcctgagacccagaaagtaccccaacagacccagcaagacccccgtgcacgagagaccctacccctgccccgccgagggctgcgacagaagattcagcagaagcgacgagctgaccagacacatcagaatccacaccggccacaagcccttccagtgcagaatctgcatgagaaacttcagcagaagcgaccacctgaccacccacatcagaacccacaccggcgagaagcccttcgcctgcgactactgcggcagaaagttcgccagaagcgacgagagaaagagacacaccaagatccacctgagacagaaggagagaaagagcagcgcccccagcgccagcgtgcccgcccccagcaccgccagctgcagcggcggcgtgcagcccggcggcaccctgtgcagcagcaacagcagcagcctgggcggcggccccctggccccctgcagcagcagaaccagaaccccctag

SEQ ID NO: 80050 - DNA, 786 bp, synthetic construct
  misc_feature 1..786: note = Description of Artificial Sequence: Synthetic coding sequence
  source 1..786: mol_type = other DNA
atgagagtgggcctgcccagcgaggccagcagctgcccctggagcgccagaggccccagagacccccccgagagaagaagaagcggcctggcccacgtgctgagcgacaacatctaccccgtggaggacctggccgccaccagcgtgaccatcttccccaacgccgagctgggcggccccttcgaccagatgaacggcgtggccggcgacggcatgatcaacatcgacatgaccggcgagaagagaagcctggacctgccctaccccagcagcttcgcccccgtgagcgcccccagaaaccagaccttcacctacatgggcaagttcagcatcgacccccagtaccccggcgccagctgctaccccgagggcatcatcaacatcgtgagcgccggcatcctgcagggcgtgaccagccccgccagcaccaccgccagcagcagcgtgaccagcgccagccccaaccccctggccaccggccccctgggcgtgtgcaccatgagccagacccagcccgacctggaccacctgtacagcccccccccccccccccccccctacagcggctgcgccggcgacctgtaccaggaccccagcgccttcctgagcgccgccaccaccagcaccagcagcagcctggcctacccccccccccccagctaccccagccccaagcccgtggaggccgccagagaccccggctgcctggtggccgcccagcagcagcagcagccccccccccccccccccatcacccacaccacctgccactgcggccccttctag

SEQ ID NO: 80051 - DNA, 1431 bp, synthetic construct; identical to SEQ ID NO: 80048
  misc_feature 1..1431: note = Description of Artificial Sequence: Synthetic coding sequence
  source 1..1431: mol_type = other DNA

SEQ ID NO: 80052 - DNA, 1461 bp, synthetic construct
  misc_feature 1..1461: note = Description of Artificial Sequence: Synthetic coding sequence
  source 1..1461: mol_type = other DNA
atgctgcacctgagcgagttcagcgagcccgacgccctgctggtgaagagcaccgagggctgctgcgccgagcccagcgccgagctgcccagactgcccgccagagacgcccccgccgccaccggctaccccggcgccggcgacttcctgagctgggccctgaacagctgcggcgccagcggcgacctggccgacagctgcttcctggagggccccgcccccacccccccccccggcctgagctacagcggcagcttcttcatccaggccgtgcccgagcacccccacgaccccgaggccctgttcaacctgatgagcggcatcctgggcctggcccccttccccggccccgaggccgccgccagcagaagccccctggacgcccccttccccgccggcagcgacgccctgctgcccggcccccccgacctgtacagccccgacctgggcgccgcccccttccccgaggccttctgggaggccagcccctgcgccggcgcccccagccagtgcctgtacgagccccagctgagcccccccgacgtgaagcccggcctgagagccccccccgccagccccgccctggacgccgtgagcgccttcaagggcccctacgccccctgggagctgctgagcgtgggcgcccccggcaactgcggcagccagggcgactaccaggccgcccccgaggccagattccccgtgatcggcaccaagatcgaggacctgctgagcatcagctgccccgccgagctgcccgccgtgcccgccaacagactgtaccccagcggcgcctacgacgccttccccctggcccccggcgacctgggcgagggcgccgagggcctgcccggcctgctgaccccccccagcggcgagggcggcagcagcggcgacggcggcgagttcctggccagcacccagccccagctgagccccctgggcctgagaagcgccgccgccgccgacttccccaagcccctggtggccgacatccccggcagcagcggcgtggccgccccccccgtgcccccccccccccccacccccttcccccaggccaaggccagaagaaagggcagaagaggcggcaagtgcagcaccagatgcttctgccccagaccccacgccaaggccttcgcctgccccgtggagagctgcgtgagaagcttcgccagaagcgacgagctgaacagacacctgagaatccacaccggccacaagcccttccagtgcagaatctgcctgagaaacttcagcagaagcgaccacctgaccacccacgtgagaacccacaccggcgagaagcccttcgcctgcgacgtgtgcggcagaagattcgccagaagcgacgagaagaagagacacagcaaggtgcacctgaagcagaaggccagagccgaggagagactgaagggcctgggcttctacagcctgggcctgagcttcgccagcctgtag

SEQ ID NO: 80053 - DNA, 1770 bp, synthetic construct
  misc_feature 1..1770: note = Description of Artificial Sequence: Synthetic coding sequence
  source 1..1770: mol_type = other DNA
atggccgtggccagaggcgtgggcagccccgagcccgcccccccccagctgtacaagtggggcggctgcggcctgggcgagcccggcagcgccctggagagaagaggcgccgccgccagaggcagatgcggcagagccagagcccccagactgcccgacagcttccccagaggcgagtgccccaagcccggcgccagagcccccagaagcgtgagatgcggcgagcccctgccccccgccagccccccccccgccagaccccaggcccagagagccagacccagagccccccacagcagaagaagagccatgctgcacctgagcgagttcagcgagcccgacgccctgctggtgaagagcaccgagggctgctgcgccgagcccagcgccgagctgcccagactgcccgccagagacgcccccgccgccaccggctaccccggcgccggcgacttcctgagctgggccctgaacagctgcggcgccagcggcgacctggccgacagctgcttcctggagggccccgcccccacccccccccccggcctgagctacagcggcagcttcttcatccaggccgtgcccgagcacccccacgaccccgaggccctgttcaacctgatgagcggcatcctgggcctggcccccttccccggccccgaggccgccgccagcagaagccccctggacgcccccttccccgccggcagcgacgccctgctgcccggcccccccgacctgtacagccccgacctgggcgccgcccccttccccgaggccttctgggaggccagcccctgcgccggcgcccccagccagtgcctgtacgagccccagctgagcccccccgacgtgaagcccggcctgagagccccccccgccagccccgccctggacgccgtgagcgccttcaagggcccctacgccccctgggagctgctgagcgtgggcgcccccggcaactgcggcagccagggcgactaccaggccgcccccgaggccagattccccgtgatcggcaccaagatcgaggacctgctgagcatcagctgccccgccgagctgcccgccgtgcccgccaacagactgtaccccagcggcgcctacgacgccttccccctggcccccggcgacctgggcgagggcgccgagggcctgcccggcctgctgaccccccccagcggcgagggcggcagcagcggcgacggcggcgagttcctggccagcacccagccccagctgagccccctgggcctgagaagcgccgccgccgccgacttccccaagcccctggtggccgacatccccggcagcagcggcgtggccgccccccccgtgcccccccccccccccacccccttcccccaggccaaggccagaagaaagggcagaagaggcggcaagtgcagcaccagatgcttctgccccagaccccacgccaaggccttcgcctgccccgtggagagctgcgtgagaagcttcgccagaagcgacgagctgaacagacacctgagaatccacaccggccacaagcccttccagtgcagaatctgcctgagaaacttcagcagaagcgaccacctgaccacccacgtgagaacccacaccggcgagaagcccttcgcctgcgacgtgtgcggcagaagattcgccagaagcgacgagaagaagagacacagcaaggtgcacctgaagcagaaggccagagccgaggagagactgaagggcctgggcttctacagcctgggcctgagcttcgccagcctgtag

SEQ ID NO: 80054 - DNA, 921 bp, synthetic construct
  misc_feature 1..921: note = Description of Artificial Sequence: Synthetic coding sequence
  source 1..921: mol_type = other DNA
atggacaccccccccctgagcgacagcgagagcgagagcgacgagagcctggtgaccgacagagagctgcaggacgccttcagcagaggcctgctgaagcccggcctgaacgtggtgctggagggccccaagaaggccgtgaacgacgtgaacggcctgaagcagtgcctggccgagttcaagagagacctggagtgggtggagagactggacgtgaccctgggccccgtgcccgagatcggcggcagcgaggcccccgccccccagaacaaggaccagaaggccgtggaccccgaggacgacttccagagagagatgagcttctacagacaggcccaggccgccgtgctggccgtgctgcccagactgcaccagctgaaggtgcccaccaagagacccaccgactacttcgccgagatggccaagagcgacctgcagatgcagaagatcagacagaagctgcagaccaagcaggccgccatggagagaagcgagaaggccaagcagctgagagccctgagaaagtacggcaagaaggtgcagaccgaggtgctgcagaagagacagcaggagaaggcccacatgatgaacgccatcaagaagtaccagaagggcttcagcgacaagctggacttcctggagggcgaccagaagcccctggcccagagaaagaaggccggcgccaagggccagcagatgagaaagggccccagcgccaagagaagatacaagaaccagaagttcggcttcggcggcaagaagaagggcagcaagtggaacaccagagagagctacgacgacgtgagcagcttcagagccaagaccgcccacggcagaggcctgaagagacccggcaagaagggcagcaacaagagacccggcaagagaaccagagagaagatgaagaacagaacccactag

SEQ ID NO: 80055 - DNA, 1086 bp, synthetic construct
  misc_feature 1..1086: note = Description of Artificial Sequence: Synthetic coding sequence
  source 1..1086: mol_type = other DNA
atgtaccccgaggccctgcccgtgggcatcctgagcaaccccgacaccttcaagagaagaagcggcagctacagcaacgacaagcccgaggtgtggttcgccgccggcagcggcagccccaaccagaagctgagcagcagctgcgtgggcagagcctgcggcgagatggacaccccccccctgagcgacagcgagagcgagagcgacgagagcctggtgaccgacagagagctgcaggacgccttcagcagaggcctgctgaagcccggcctgaacgtggtgctggagggccccaagaaggccgtgaacgacgtgaacggcctgaagcagtgcctggccgagttcaagagagacctggagtgggtggagagactggacgtgaccctgggccccgtgcccgagatcggcggcagcgaggcccccgccccccagaacaaggaccagaaggccgtggaccccgaggacgacttccagagagagatgagcttctacagacaggcccaggccgccgtgctggccgtgctgcccagactgcaccagctgaaggtgcccaccaagagacccaccgactacttcgccgagatggccaagagcgacctgcagatgcagaagatcagacagaagctgcagaccaagcaggccgccatggagagaagcgagaaggccaagcagctgagagccctgagaaagtacggcaagaaggtgcagaccgaggtgctgcagaagagacagcaggagaaggcccacatgatgaacgccatcaagaagtaccagaagggcttcagcgacaagctggacttcctggagggcgaccagaagcccctggcccagagaaagaaggccggcgccaagggccagcagatgagaaagggccccagcgccaagagaagatacaagaaccagaagttcggcttcggcggcaagaagaagggcagcaagtggaacaccagagagagctacgacgacgtgagcagcttcagagccaagaccgcccacggcagaggcctgaagagacccggcaagaagggcagcaacaagagacccggcaagagaaccagagagaagatgaagaacagaacccactag

SEQ ID NO: 80056 - DNA, 2448 bp, synthetic construct
  misc_feature 1..2448: note = Description of Artificial Sequence: Synthetic coding sequence
  source 1..2448: mol_type = other DNA
atggaggacggcttcagcagctacagcagcctgtacgacaccagcagcctgctgcagttctgcaacgacgacagcgccagcgccgccagcagcatggaggtgaccgacagaatcgccagcctggagcagagagtgcagatgcaggaggacgacatccagctgctgaagagcgccctggccgacgtggtgagaagactgaacatcaccgaggagcagcaggccgtgctgaacagaaagggccccaccaaggccagacccctgatgcagaccctgcccctgagaaccaccgtgaacaacggcaccgtgctgcccaagaagcccaccggcagcctgcccagccccagcggcgtgagaaaggagaccgccgtgcccgccaccaagagcaacatcaagagaaccagcagcagcgagagagtgagccccggcggcagaagagagagcaacggcgacagcagaggcaacagaaacagaaccggcagcaccagcagcagcagcagcggcaagaagaacagcgagagcaagcccaaggagcccgtgttcagcgccgaggagggctacgtgaagatgttcctgagaggcagacccgtgaccatgtacatgcccaaggaccaggtggacagctacagcctggaggccaaggtggagctgcccaccaagagactgaagctggagtgggtgtacggctacagaggcagagactgcagaaacaacctgtacctgctgcccaccggcgagaccgtgtacttcatcgccagcgtggtggtgctgtacaacgtggaggagcagctgcagagacactacgccggccacaacgacgacgtgaagtgcctggccgtgcaccccgacagaatcaccatcgccaccggccaggtggccggcaccagcaaggacggcaagcagctgcccccccacgtgagaatctgggacagcgtgaccctgaacaccctgcacgtgatcggcatcggcttcttcgacagagccgtgacctgcatcgccttcagcaagagcaacggcggcaccaacctgtgcgccgtggacgacagcaacgaccacgtgctgagcgtgtgggactggcagaaggaggagaagctggccgacgtgaagtgcagcaacgaggccgtgttcgccgccgacttccaccccaccgacaccaacatcatcgtgacctgcggcaagagccacctgtacttctggaccctggagggcagcagcctgaacaagaagcagggcctgttcgagaagcaggagaagcccaagttcgtgctgtgcgtgaccttcagcgagaacggcgacaccatcaccggcgacagcagcggcaacatcctggtgtggggcaagggcaccaacagaatcagctacgccgtgcagggcgcccacgagggcggcatcttcgccctgtgcatgctgagagacggcaccctggtgagcggcggcggcaaggacagaaagctgatcagctggagcggcaactaccagaagctgagaaagaccgagatccccgagcagttcggccccatcagaaccgtggccgagggcaagggcgacgtgatcctgatcggcaccaccagaaacttcgtgctgcagggcaccctgagcggcgacttcacccccatcacccagggccacaccgacgagctgtggggcctggccatccacgccagcaagagccagttcctgacctgcggccacgacaagcacgccaccctgtgggacgccgtgggccacagacccgtgtgggacaagatcatcgaggaccccgcccagagcagcggcttccaccccagcggcagcgtggtggccgtgggcaccctgaccggcagatggttcgtgttcgacaccgagaccaaggacctggtgaccgtgcacaccgacggcaacgagcagctgagcgtgatgagatacagccccgacggcaacttcctggccatcggcagccacgacaactgcatctacatctacggcgtgagcgacaacggcagaaagtacaccagagtgggcaagtgcagcggccacagcagcttcatcacccacctggactggagcgtgaacagccagttcctggtgagcaacagcggcgactacgagatcctgtactgggtgcccagcgcctgcaagcaggtggtgagcgtggagaccaccagagacatcgagtgggccacctacacctgcaccctgggcttccacgtgttcggcgtgtggcccgagggcagcgacggcaccgacatcaacgccgtgtgcagagcccacgagaagaagctgctgagcaccggcgacgacttcggcaaggtgcacctgttcagctacccctgcagccagttcagagcccccagccacatctacggcggccacagcagccacgtgaccaacgtggacttcctgtgcgaggacagccacctgatcagcaccggcggcaaggacaccagcatcatgcagtggagagtgatctag

SEQ ID NO: 80057 - DNA, 2505 bp, synthetic construct
  misc_feature 1..2505: note = Description of Artificial Sequence: Synthetic coding sequence
  source 1..2505: mol_type = other DNA
atggaggacggcttcagcagctacagcagcctgtacgacaccagcagcctgctgcagttctgcaacgacgacagcgccagcgccgccagcagcatggaggtgaccgacagaatcgccagcctggagcagagagtgcagatgcaggaggacgacatccagctgctgaagagcgccctggccgacgtggtgagaagactgaacatcaccgaggagcagcaggccgtgctgaacagaaagggccccaccaaggccagacccctgatgcagaccctgcccctgagaaccaccgtgaacaacggcaccgtgctgcccaagaagcccaccggcagcctgcccagccccagcggcgtgagaaaggagaccgccgtgcccgccaccaagagactgaacagaagcgtgagcctgctgaacgcctgcaagctgaacagaagcacccccagcaacatcaagagaaccagcagcagcgagagagtgagccccggcggcagaagagagagcaacggcgacagcagaggcaacagaaacagaaccggcagcaccagcagcagcagcagcggcaagaagaacagcgagagcaagcccaaggagcccgtgttcagcgccgaggagggctacgtgaagatgttcctgagaggcagacccgtgaccatgtacatgcccaaggaccaggtggacagctacagcctggaggccaaggtggagctgcccaccaagagactgaagctggagtgggtgtacggctacagaggcagagactgcagaaacaacctgtacctgctgcccaccggcgagaccgtgtacttcatcgccagcgtggtggtgctgtacaacgtggaggagcagctgcagagacactacgccggccacaacgacgacgtgaagtgcctggccgtgcaccccgacagaatcaccatcgccaccggccaggtggccggcaccagcaaggacggcaagcagctgcccccccacgtgagaatctgggacagcgtgaccctgaacaccctgcacgtgatcggcatcggcttcttcgacagagccgtgacctgcatcgccttcagcaagagcaacggcggcaccaacctgtgcgccgtggacgacagcaacgaccacgtgctgagcgtgtgggactggcagaaggaggagaagctggccgacgtgaagtgcagcaacgaggccgtgttcgccgccgacttccaccccaccgacaccaacatcatcgtgacctgcggcaagagccacctgtacttctggaccctggagggcagcagcctgaacaagaagcagggcctgttcgagaagcaggagaagcccaagttcgtgctgtgcgtgaccttcagcgagaacggcgacaccatcaccggcgacagcagcggcaacatcctggtgtggggcaagggcaccaacagaatcagctacgccgtgcagggcgcccacgagggcggcatcttcgccctgtgcatgctgagagacggcaccctggtgagcggcggcggcaaggacagaaagctgatcagctggagcggcaactaccagaagctgagaaagaccgagatccccgagcagttcggccccatcagaaccgtggccgagggcaagggcgacgtgatcctgatcggcaccaccagaaacttcgtgctgcagggcaccctgagcggcgacttcacccccatcacccagggccacaccgacgagctgtggggcctggccatccacgccagcaagagccagttcctgacctgcggccacgacaagcacgccaccctgtgggacgccgtgggccacagacccgtgtgggacaagatcatcgaggaccccgcccagagcagcggcttccaccccagcggcagcgtggtggccgtgggcaccctgaccggcagatggttcgtgttcgacaccgagaccaaggacctggtgaccgtgcacaccgacggcaacgagcagctgagcgtgatgagatacagccccgacggcaacttcctggccatcggcagccacgacaactgcatctacatctacggcgtgagcgacaacggcagaaagtacaccagagtgggcaagtgcagcggccacagcagcttcatcacccacctggactggagcgtgaacagccagttcctggtgagcaacagcggcgactacgagatcctgtactgggtgcccagcgcctgcaagcaggtggtgagcgtggagaccaccagagacatcgagtgggccacctacacctgcaccctgggcttccacgtgttcggcgtgtggcccgagggcagcgacggcaccgacatcaacgccgtgtgcagagcccacgagaagaagctgctgagcaccggcgacgacttcggcaaggtgcacctgttcagctacccctgcagccagttcagagcccccagccacatctacggcggccacagcagccacgtgaccaacgtggacttcctgtgcgaggacagccacctgatcagcaccggcggcaaggacaccagcatcatgcagtggagagtgatctag

SEQ ID NO: 80058 - DNA, 2505 bp, synthetic construct; identical to SEQ ID NO: 80057
  misc_feature 1..2505: note = Description of Artificial Sequence: Synthetic coding sequence
  source 1..2505: mol_type = other DNA

SEQ ID NO: 80059 - DNA, 2946 bp, synthetic construct
  misc_feature 1..2946: note = Description of Artificial Sequence: Synthetic coding sequence
  source 1..2946: mol_type = other DNA
atggacggcttcgccggcagcctggacgacagcatcagcgccgccagcaccagcgacgtgcaggacagactgagcgccctggagagcagagtgcagcagcaggaggacgagatcaccgtgctgaaggccgccctggccgacgtgctgagaagactggccatcagcgaggaccacgtggccagcgtgaagaagagcgtgagcagcaagggccagcccagccccagagccgtgatccccatgagctgcatcaccaacggcagcggcgccaacagaaagcccagccacaccagcgccgtgagcatcgccggcaaggagaccctgagcagcgccgccaagagcggcaccgagaagaagaaggagaagccccagggccagagagagaagaaggaggagagccacagcaacgaccagagcccccagatcagagccagccccagcccccagcccagcagccagcccctgcagatccacagacagacccccgagagcaagaacgccacccccaccaagagcatcaagagacccagccccgccgagaagagccacaacagctgggagaacagcgacgacagcagaaacaagctgagcaagatccccagcacccccaagctgatccccaaggtgaccaagaccgccgacaagcacaaggacgtgatcatcaaccaggagggcgagtacatcaagatgttcatgagaggcagacccatcaccatgttcatccccagcgacgtggacaactacgacgacatcagaaccgagctgccccccgagaagctgaagctggagtgggcctacggctacagaggcaaggactgcagagccaacgtgtacctgctgcccaccggcaagatcgtgtacttcatcgccagcgtggtggtgctgttcaactacgaggagagaacccagagacactacctgggccacaccgactgcgtgaagtgcctggccatccaccccgacaagatcagaatcgccaccggccagatcgccggcgtggacaaggacggcagacccctgcagccccacgtgagagtgtgggacagcgtgaccctgagcaccctgcagatcatcggcctgggcaccttcgagagaggcgtgggctgcctggacttcagcaaggccgacagcggcgtgcacctgtgcatcatcgacgacagcaacgagcacatgctgaccgtgtgggactggcagaagaaggccaagggcgccgagatcaagaccaccaacgaggtggtgctggccgtggagttccaccccaccgacgccaacaccatcatcacctgcggcaagagccacatcttcttctggacctggagcggcaacagcctgaccagaaagcagggcatcttcggcaagtacgagaagcccaagttcgtgcagtgcctggccttcctgggcaacggcgacgtgctgaccggcgacagcggcggcgtgatgctgatctggagcaagaccaccgtggagcccacccccggcaagggccccaagggcgtgtaccagatcagcaagcagatcaaggcccacgacggcagcgtgttcaccctgtgccagatgagaaacggcatgctgctgaccggcggcggcaaggacagaaagatcatcctgtgggaccacgacctgaaccccgagagagagatcgaggtgcccgaccagtacggcaccatcagagccgtggccgagggcaaggccgaccagttcctggtgggcaccagcagaaacttcatcctgagaggcaccttcaacgacggcttccagatcgaggtgcagggccacaccgacgagctgtggggcctggccacccaccccttcaaggacctgctgctgacctgcgcccaggacagacaggtgtgcctgtggaacagcatggagcacagactggagtggaccagactggtggacgagcccggccactgcgccgacttccaccccagcggcaccgtggtggccatcggcacccacagcggcagatggttcgtgctggacgccgagaccagagacctggtgagcatccacaccgacggcaacgagcagctgagcgtgatgagatacagcatcgacggcaccttcctggccgtgggcagccacgacaacttcatctacctgtacgtggtgagcgagaacggcagaaagtacagcagatacggcagatgcaccggccacagcagctacatcacccacctggactggagccccgacaacaagtacatcatgagcaacagcggcgactacgagatcctgtactgggacatccccaacggctgcaagctgatcagaaacagaagcgactgcaaggacatcgactggaccacctacacctgcgtgctgggcttccaggtgttcggcgtgtggcccgagggcagcgacggcaccgacatcaacgccctggtgagaagccacaacagaaaggtgatcgccgtggccgacgacttctgcaaggtgcacctgttccagtacccctgcagcaaggccaaggcccccagccacaagtacagcgcccacagcagccacgtgaccaacgtgagcttcacccacaacgacagccacctgatcagcaccggcggcaaggacatgagcatcatccagtggaagctggtggagaagctgagcctgccccagaacgagaccgtggccgacaccaccctgaccaaggcccccgtgagcagcaccgagagcgtgatccagagcaacacccccacccccccccccagccagcccctgaacgagaccgccgaggaggagagcagaatcagcagcagccccaccctgctggagaacagcctggagcagaccgtggagcccagcgaggaccacagcgaggaggagagcgaggagggcagcggcgacctgggcgagcccctgtacgaggagccctgcaacgagatcagcaaggagcaggccaaggccaccctgctggaggaccagcaggaccccagccccagcagctag

SEQ ID NO: 80060 - DNA, 738 bp, synthetic construct
  misc_feature 1..738: note = Description of Artificial Sequence: Synthetic coding sequence
  source 1..738: mol_type = other DNA
atgagcaacagcggcgactacgagatcctgtactgggacatccccaacggctgcaagctgatcagaaacagaagcgactgcaaggacatcgactggaccacctacacctgcgtgctgggcttccaggtgttcggcgtgtggcccgagggcagcgacggcaccgacatcaacgccctggtgagaagccacaacagaaaggtgatcgccgtggccgacgacttctgcaaggtgcacctgttccagtacccctgcagcaaggccaaggcccccagccacaagtacagcgcccacagcagccacgtgaccaacgtgagcttcacccacaacgacagccacctgatcagcaccggcggcaaggacatgagcatcatccagtggaagctggtggagaagctgagcctgccccagaacgagaccgtggccgacaccaccctgaccaaggcccccgtgagcagcaccgagagcgtgatccagagcaacacccccacccccccccccagccagcccctgaacgagaccgccgaggaggagagcagaatcagcagcagccccaccctgctggagaacagcctggagcagaccgtggagcccagcgaggaccacagcgaggaggagagcgaggagggcagcggcgacctgggcgagcccctgtacgaggagccctgcaacgagatcagcaaggagcaggccaaggccaccctgctggaggaccagcaggaccccagccccagcagctag

SEQ ID NO: 80061 - DNA, 2772 bp, synthetic construct
  misc_feature 1..2772: note = Description of Artificial Sequence: Synthetic coding sequence
  source 1..2772: mol_type = other DNA
atggacggcttcgccggcagcctggacgacagcatcagcgccgccagcaccagcgacgtgcaggacagactgagcgccctggagagcagagtgcagcagcaggaggacgagatcaccgtgctgaaggccgccctggccgacgtgctgagaagactggccatcagcgaggaccacgtggccagcgtgaagaagagcgtgagcagcaagggccagcccagccccagagccgtgatccccatgagctgcatcaccaacggcagcggcgccaacagaaagcccagccacaccagcgccgtgagcatcgccggcaaggagaccctgagcagcgccgccaagagcatcaagagacccagccccgccgagaagagccacaacagctgggagaacagcgacgacagcagaaacaagctgagcaagatccccagcacccccaagctgatccccaaggtgaccaagaccgccgacaagcacaaggacgtgatcatcaaccaggagggcgagtacatcaagatgttcatgagaggcagacccatcaccatgttcatccccagcgacgtggacaactacgacgacatcagaaccgagctgccccccgagaagctgaagctggagtgggcctacggctacagaggcaaggactgcagagccaacgtgtacctgctgcccaccggcaagatcgtgtacttcatcgccagcgtggtggtgctgttcaactacgaggagagaacccagagacactacctgggccacaccgactgcgtgaagtgcctggccatccaccccgacaagatcagaatcgccaccggccagatcgccggcgtggacaaggacggcagacccctgcagccccacgtgagagtgtgggacagcgtgaccctgagcaccctgcagatcatcggcctgggcaccttcgagagaggcgtgggctgcctggacttcagcaaggccgacagcggcgtgcacctgtgcatcatcgacgacagcaacgagcacatgctgaccgtgtgggactggcagaagaaggccaagggcgccgagatcaagaccaccaacgaggtggtgctggccgtggagttccaccccaccgacgccaacaccatcatcacctgcggcaagagccacatcttcttctggacctggagcggcaacagcctgaccagaaagcagggcatcttcggcaagtacgagaagcccaagttcgtgcagtgcctggccttcctgggcaacggcgacgtgctgaccggcgacagcggcggcgtgatgctgatctggagcaagaccaccgtggagcccacccccggcaagggccccaagggcgtgtaccagatcagcaagcagatcaaggcccacgacggcagcgtgttcaccctgtgccagatgagaaacggcatgctgctgaccggcggcggcaaggacagaaagatcatcctgtgggaccacgacctgaaccccgagagagagatcgaggtgcccgaccagtacggcaccatcagagccgtggccgagggcaaggccgaccagttcctggtgggcaccagcagaaacttcatcctgagaggcaccttcaacgacggcttccagatcgaggtgcagggccacaccgacgagctgtggggcctggccacccaccccttcaaggacctgctgctgacctgcgcccaggacagacaggtgtgcctgtggaacagcatggagcacagactggagtggaccagactggtggacgagcccggccactgcgccgacttccaccccagcggcaccgtggtggccatcggcacccacagcggcagatggttcgtgctggacgccgagaccagagacctggtgagcatccacaccgacggcaacgagcagctgagcgtgatgagatacagcatcgacggcaccttcctggccgtgggcagccacgacaacttcatctacctgtacgtggtgagcgagaacggcagaaagtacagcagatacggcagatgcaccggccacagcagctacatcacccacctggactggagccccgacaacaagtacatcatgagcaacagcggcgactacgagatcctgtactgggacatccccaacggctgcaagctgatcagaaacagaagcgactgcaaggacatcgactggaccacctacacctgcgtgctgggcttccaggtgttcggcgtgtggcccgagggcagcgacggcaccgacatcaacgccctggtgagaagccacaacagaaaggtgatcgccgtggccgacgacttctgcaaggtgcacctgttccagtacccctgcagcaaggccaaggcccccagccacaagtacagcgcccacagcagccacgtgaccaacgtgagcttcacccacaacgacagccacctgatcagcaccggcggcaaggacatgagcatcatccagtggaagctggtggagaagctgagcctgccccagaacgagaccgtggccgacaccaccctgaccaaggcccccgtgagcagcaccgagagcgtgatccagagcaacacccccacccccccccccagccagcccctgaacgagaccgccgaggaggagagcagaatcagcagcagccccaccctgctggagaacagcctggagcagaccgtggagcccagcgaggaccacagcgaggaggagagcgaggagggcagcggcgacctgggcgagcccctgtacgaggagccctgcaacgagatcagcaaggagcaggccaaggccaccctgctggaggaccagcaggaccccagccccagcagctag

SEQ ID NO: 80062 - DNA, 780 bp, synthetic construct
  misc_feature 1..780: note = Description of Artificial Sequence: Synthetic coding sequence
  source 1..780: mol_type = other DNA
atgctgctgagaagctggttcggcaacaaggacttccaggccctgcccatcctggccagactgcccagcatgcccaccgacatggagcacaccggccactacctgcacctggccttcctgatgaccaccgtgttcagcctgagccccggcaccaaggccaactacaccagactgtgggccaacagcaccagcagctgggacagcgtgatccagaacaagaccggcagaaaccagaacgagaacatcaacaccaaccccatcacccccgaggtggactacaagggcaacagcaccaacatgcccgagaccagccacatcgtggccctgaccagcaagagcgagcaggagctgtacatccccagcgtggtgagcaacagccccagcaccgtgcagagcatcgagaacaccagcaagagccacggcgagatcttcaagaaggacgtgtgcgccgagaacaacaacaacatggccatgctgatctgcctgatcatcatcgccgtgctgttcctgatctgcaccttcctgttcctgagcaccgtggtgctggccaacaaggtgagcagcctgagaagaagcaagcaggtgggcaagagacagcccagaagcaacggcgacttcctggccagcggcctgtggcccgccgagagcgacacctggaagagaaccaagcagctgaccggccccaacctggtgatgcagagcaccggcgtgctgaccgccaccagagagagaaaggacgaggagggcaccgagaagctgaccaacaagcagatcggctag

SEQ ID NO: 80063 - DNA, 711 bp, synthetic construct
  misc_feature 1..711: note = Description of Artificial Sequence: Synthetic coding sequence
  source 1..711: mol_type = other DNA
atgcccaccgacatggagcacaccggccactacctgcacctggccttcctgatgaccaccgtgttcagcctgagccccggcaccaaggccaactacaccagactgtgggccaacagcaccagcagctgggacagcgtgatccagaacaagaccggcagaaaccagaacgagaacatcaacaccaaccccatcacccccgaggtggactacaagggcaacagcaccaacatgcccgagaccagccacatcgtggccctgaccagcaagagcgagcaggagctgtacatccccagcgtggtgagcaacagccccagcaccgtgcagagcatcgagaacaccagcaagagccacggcgagatcttcaagaaggacgtgtgcgccgagaacaacaacaacatggccatgctgatctgcctgatcatcatcgccgtgctgttcctgatctgcaccttcctgttcctgagcaccgtggtgctggccaacaaggtgagcagcctgagaagaagcaagcaggtgggcaagagacagcccagaagcaacggcgacttcctggccagcggcctgtggcccgccgagagcgacacctggaagagaaccaagcagctgaccggccccaacctggtgatgcagagcaccggcgtgctgaccgccaccagagagagaaaggacgaggagggcaccgagaagctgaccaacaagcagatcggctag

SEQ ID NO: 80064 - DNA, 711 bp, synthetic construct; identical to SEQ ID NO: 80063
  misc_feature 1..711: note = Description of Artificial Sequence: Synthetic coding sequence
  source 1..711: mol_type = other DNA

SEQ ID NO: 80065 - DNA, 699 bp, synthetic construct
  misc_feature 1..699: note = Description of Artificial Sequence: Synthetic coding sequence
  source 1..699: mol_type = other DNA
atggagcacaccggccactacctgcacctggccttcctgatgaccaccgtgttcagcctgagccccggcaccaaggccaactacaccagactgtgggccaacagcaccagcagctgggacagcgtgatccagaacaagaccggcagaaaccagaacgagaacatcaacaccaaccccatcacccccgaggtggactacaagggcaacagcaccaacatgcccgagaccagccacatcgtggccctgaccagcaagagcgagcaggagctgtacatccccagcgtggtgagcaacagccccagcaccgtgcagagcatcgagaacaccagcaagagccacggcgagatcttcaagaaggacgtgtgcgccgagaacaacaacaacatggccatgctgatctgcctgatcatcatcgccgtgctgttcctgatctgcaccttcctgttcctgagcaccgtggtgctggccaacaaggtgagcagcctgagaagaagcaagcaggtgggcaagagacagcccagaagcaacggcgacttcctggccagcggcctgtggcccgccgagagcgacacctggaagagaaccaagcagctgaccggccccaacctggtgatgcagagcaccggcgtgctgaccgccaccagagagagaaaggacgaggagggcaccgagaagctgaccaacaagcagatcggctag

SEQ ID NO: 80066 - DNA, 1347 bp, synthetic construct
  misc_feature 1..1347: note = Description of Artificial Sequence: Synthetic coding sequence
  source 1..1347: mol_type = other DNA
atggaccccaagtacttcatcctgatcctgttctgcggccacctgaacaacaccttcttcagcaagaccgagaccatcaccaccgagaagcagagccagcccaccctgttcaccagcagcatgagccaggtgctggccaacagccagaacaccaccggcaaccccctgggccagcccacccagttcagcgacaccttcagcggccagagcatcagccccgccaaggtgaccgccggccagcccacccccgccgtgtacaccagcagcgagaagcccgaggcccacaccagcgccggccagcccctggcctacaacaccaagcagcccacccccatcgccaacaccagcagccagcaggccgtgttcaccagcgccagacagctgcccagcgccagaaccagcaccacccagccccccaagagcttcgtgtacaccttcacccagcagagcagcagcgtgcagatccccagcagaaagcagatcaccgtgcacaaccccagcacccagcccaccagcaccgtgaagaacagccccagaagcacccccggcttcatcctggacaccaccagcaacaagcagaccccccagaagaacaactacaacagcatcgccgccatcctgatcggcgtgctgctgaccagcatgctggtggccatcatcatcatcgtgctgtggaagtgcctgagaaagcccgtgctgaacgaccagaactgggccggcagaagccccttcgccgacggcgagacccccgacatctgcatggacaacatcagagagaacgagatcagcaccaagagaaccagcatcatcagcctgaccccctggaagcccagcaagagcaccctgctggccgacgacctggagatcaagctgttcgagagcagcgagaacatcgaggacagcaacaaccccaagaccgagaagatcaaggaccaggtgaacggcaccagcgaggacagcgccgacggcagcaccgtgggcaccgccgtgagcagcagcgacgacgccgacctgcccccccccccccccctgctggacctggagggccaggagagcaaccagagcgacaagcccaccatgaccatcgtgagccccctgcccaacgacagcaccagcctgccccccagcctggactgcctgaaccaggactgcggcgaccacaagagcgagatcatccagagcttcccccccctggacagcctgaacctgcccctgccccccgtggacttcatgaagaaccaggaggacagcaacctggagatccagtgccaggagttcagcatcccccccaacagcgaccaggacctgaacgagagcctgccccccccccccgccgagctgctgtag

SEQ ID NO: 80067 - DNA, 1392 bp, synthetic construct
  misc_feature 1..1392: note = Description of Artificial Sequence: Synthetic coding sequence
  source 1..1392: mol_type = other DNA
atgctgttcagatacgccgagaagatcaccagaaagtacagcgagatggaccccaagtacttcatcctgatcctgttctgcggccacctgaacaacaccttcttcagcaagaccgagaccatcaccaccgagaagcagagccagcccaccctgttcaccagcagcatgagccaggtgctggccaacagccagaacaccaccggcaaccccctgggccagcccacccagttcagcgacaccttcagcggccagagcatcagccccgccaaggtgaccgccggccagcccacccccgccgtgtacaccagcagcgagaagcccgaggcccacaccagcgccggccagcccctggcctacaacaccaagcagcccacccccatcgccaacaccagcagccagcaggccgtgttcaccagcgccagacagctgcccagcgccagaaccagcaccacccagccccccaagagcttcgtgtacaccttcacccagcagagcagcagcgtgcagatccccagcagaaagcagatcaccgtgcacaaccccagcacccagcccaccagcaccgtgaagaacagccccagaagcacccccggcttcatcctggacaccaccagcaacaagcagaccccccagaagaacaactacaacagcatcgccgccatcctgatcggcgtgctgctgaccagcatgctggtggccatcatcatcatcgtgctgtggaagtgcctgagaaagcccgtgctgaacgaccagaactgggccggcagaagccccttcgccgacggcgagacccccgacatctgcatggacaacatcagagagaacgagatcagcaccaagagaaccagcatcatcagcctgaccccctggaagcccagcaagagcaccctgctggccgacgacctggagatcaagctgttcgagagcagcgagaacatcgaggacagcaacaaccccaagaccgagaagatcaaggaccaggtgaacggcaccagcgaggacagcgccgacggcagcaccgtgggcaccgccgtgagcagcagcgacgacgccgacctgcccccccccccccccctgctggacctggagggccaggagagcaaccagagcgacaagcccaccatgaccatcgtgagccccctgcccaacgacagcaccagcctgccccccagcctggactgcctgaaccaggactgcggcgaccacaagagcgagatcatccagagcttcccccccctggacagcctgaacctgcccctgccccccgtggacttcatgaagaaccaggaggacagcaacctggagatccagtgccaggagttcagcatcccccccaacagcgaccaggacctgaacgagagcctgccccccccccccgccgagctgctgtag

SEQ ID NO: 80068 - DNA, 924 bp, synthetic construct
  misc_feature 1..924: note = Description of Artificial Sequence: Synthetic coding sequence
  source 1..924: mol_type = other DNA
atgaaccaggccgagctgatgcagctggacatggagggcatgctgcagcacttccagaaggtgatcccccaccagttcgacggcgtgcccgacaagctgatccaggccgcctaccaggtgaagtacaacagcaagaagatgaagaagctggagaaggagtacaccaccatcaagaccaaggagatggaggagcaggtggagatcaagagactgagaaccgagaacagactgctgaagcagagaatcgagaccctggagaaggagagcgccagcctggccgacagactgatccagggccaggtgaccagagcccaggaggccgaggagaactacctgatcaagagagagctggccaccatcaagcagcagagcgacgaggccagcgccaagctggagcaggccgagaacaccatcagaaagctgcagcaccagcagcagtggcacaagtgcagcagcaactacaacgaggacttcgtgctgcagctggagaaggagctggtgcaggccagactgagcgaggccgagagccagtgcgccctgaaggagatgcaggacaaggtgctggacatcgagaagagaaacaacagcctgcccgacgagaacaacatcgccagactgcaggaggagctgatcgccgtgaagctgagagaggccgaggccatcatgggcctgaaggagctgagacagcaggtgaaggacctggaggagcactggcagagacacctggccagaaccaccggcagatggaaggacccccccaagaagaacgccatgaacgagctgcaggacgagctgatgaccatcagactgagagaggccgagacccaggccgagatcagagagatcaagcagagaatgatggagatggagacccagagcggcacctgcggccccctgctgaagatcatcttcttcaacgcctag

SEQ ID NO: 80069 - DNA, 2433 bp, synthetic construct
  misc_feature 1..2433: note = Description of Artificial Sequence: Synthetic coding sequence
  source 1..2433: mol_type = other DNA
atggtgaccaacaagatgaccgccgccttcagaaaccccagcggcaagcaggtggccaccgacaaggtggccgagaagctgagcagcaccctgagctgggtgaagaacaccgtgagccacaccgtgagccagatggccagccaggtggccagccccagcaccagcctgcacaccaccagcagcagcaccaccctgagcacccccgccctgagccccagcagccccagccagctgagccccgacgacctggagctgctggccaagctggaggagcagaacagactgctggagaccgacagcaagagcctgagaagcgtgaacggcagcagaagaaacagcggcagcagcctggtgagcagcagcagcgccagcagcaacctgagccacctggaggaggacagctggatcctgtggggcagaatcgtgaacgagtgggaggacgtgagaaagaagaaggagaagcaggtgaaggagctggtgcacaagggcatcccccaccacttcagagccatcgtgtggcagctgctgtgcagcgcccagagcatgcccatcaaggaccagtacagcgagctgctgaagatgaccagcccctgcgagaagctgatcagaagagacatcgccagaacctaccccgagcacaacttcttcaaggagaaggacagcctgggccaggaggtgctgttcaacgtgatgaaggcctacagcctggtggacagagaggtgggctactgccagggcagcgccttcatcgtgggcctgctgctgatgcagatgcccgaggaggaggccttctgcgtgttcgtgaagctgatgcaggactacagactgagagagctgttcaagcccagcatggccgagctgggcctgtgcatgtaccagttcgagtgcatgatccaggagcacctgcccgagctgttcgtgcacttccagagccagagcttccacaccagcatgtacgccagcagctggttcctgaccatcttcctgaccaccttccccctgcccatcgccaccagaatcttcgacatcttcatgagcgagggcctggagatcgtgttcagagtgggcctggccctgctgcagatgaaccaggccgagctgatgcagctggacatggagggcatgctgcagcacttccagaaggtgatcccccaccagttcgacggcgtgcccgacaagctgatccaggccgcctaccaggtgaagtacaacagcaagaagatgaagaagctggagaaggagtacaccaccatcaagaccaaggagatggaggagcaggtggagatcaagagactgagaaccgagaacagactgctgaagcagagaatcgagaccctggagaagcacaagtgcagcagcaactacaacgaggacttcgtgctgcagctggagaaggagctggtgcaggccagactgagcgaggccgagagccagtgcgccctgaaggagatgcaggacaaggtgctggacatcgagaagagaaacaacagcctgcccgacgagaacaacatcgccagactgcaggaggagctgatcgccgtgaagctgagagaggccgaggccatcatgggcctgaaggagctgagacagcaggtgaaggacctggaggagcactggcagagacacctggccagaaccaccggcagatggaaggacccccccaagaagaacgccatgaacgagctgcaggacgagctgatgaccatcagactgagagaggccgagacccaggccgagatcagagagatcaagcagagaatgatggagatggagacccagaaccagatcaacagcaaccacctgagaagagccgagcaggaggtgatcagcctgcaggagaaggtgcagtacctgagcgcccagaacaagggcctgctgacccagctgagcgaggccaagagaaagcaggccgagatcgagtgcaagaacaaggaggaggtgatggccgtgagactgagagaggccgacagcatcgccgccgtggccgagctgagacagcacatcgccgagctggagatccagaaggaggagggcaagctgcagggccagctgaacaagagcgacagcaaccagtacatcggcgagctgaaggaccagatcgccgagctgaaccacgagctgagatgcctgaagggccagagaggcttcagcggccagccccccttcgacggcatccacatcgtgaaccacctgatcggcgacgacgagagcttccacagcagcgacgaggacttcatcgacaacagcctgcaggagaccggcgtgggcttccccctgcacggcaagagcggcagcatgagcctggaccccgccgtggccgacggcagcgagagcgagaccgaggacagcgtgctggagaccagagagagcaaccaggtggtgcagaaggagagaccccccagaagaagagagagctacagcaccaccgtgtag

SEQ ID NO: 80070 - DNA, 2433 bp, synthetic construct; identical to SEQ ID NO: 80069
  misc_feature 1..2433: note = Description of Artificial Sequence: Synthetic coding sequence
  source 1..2433: mol_type = other DNA

SEQ ID NO: 80071 - DNA, 2466 bp, synthetic construct
  misc_feature 1..2466: note = Description of Artificial Sequence: Synthetic coding sequence
  source 1..2466: mol_type = other DNA
atggtgaccaacaagatgaccgccgccttcagaaaccccagcggcaagcaggtggccaccgacaaggtggccgagaagctgagcagcaccctgagctgggtgaagaacaccgtgagccacaccgtgagccagatggccagccaggtggccagccccagcaccagcctgcacaccaccagcagcagcaccaccctgagcacccccgccctgagccccagcagccccagccagctgagccccgacgacctggagctgctggccaagctggaggagcagaacagactgctggagaccgacagcaagagcctgagaagcgtgaacggcagcagaagaaacagcggcagcagcctggtgagcagcagcagcgccagcagcaacctgagccacctggaggaggacagctggatcctgtggggcagaatcgtgaacgagtgggaggacgtgagaaagaagaaggagaagcaggtgaaggagctggtgcacaagggcatcccccaccacttcagagccatcgtgtggcagctgctgtgcagcgcccagagcatgcccatcaaggaccagtacagcgagctgctgaagatgaccagcccctgcgagaagctgatcagaagagacatcgccagaacctaccccgagcacaacttcttcaaggagaaggacagcctgggccaggaggtgctgttcaacgtgatgaaggcctacagcctggtggacagagaggtgggctactgccagggcagcgccttcatcgtgggcctgctgctgatgcagatgcccgaggaggaggccttctgcgtgttcgtgaagctgatgcaggactacagactgagagagctgttcaagcccagcatggccgagctgggcctgtgcatgtaccagttcgagtgcatgatccaggagcacctgcccgagctgttcgtgcacttccagagccagagcttccacaccagcatgtacgccagcagctggttcctgaccatcttcctgaccaccttccccctgcccatcgccaccagaatcttcgacatcttcatgagcgagggcctggagatcgtgttcagagtgggcctggccctgctgcagatgaaccaggccgagctgatgcagctggacatggagggcatgctgcagcacttccagaaggtgatcccccaccagttcgacggcgtgcccgacaagctgatccaggccgcctaccaggtgaagtacaacagcaagaagatgaagaagctggagaaggagtacaccaccatcaagaccaaggagatggaggagcaggtggagatcaagagactgagaaccgagaacagactgctgaagcagagaatcgagaccctggagaaggagagcgccagcctggccgacagactgatccagcacaagtgcagcagcaactacaacgaggacttcgtgctgcagctggagaaggagctggtgcaggccagactgagcgaggccgagagccagtgcgccctgaaggagatgcaggacaaggtgctggacatcgagaagagaaacaacagcctgcccgacgagaacaacatcgccagactgcaggaggagctgatcgccgtgaagctgagagaggccgaggccatcatgggcctgaaggagctgagacagcaggtgaaggacctggaggagcactggcagagacacctggccagaaccaccggcagatggaaggacccccccaagaagaacgccatgaacgagctgcaggacgagctgatgaccatcagactgagagaggccgagacccaggccgagatcagagagatcaagcagagaatgatggagatggagacccagaaccagatcaacagcaaccacctgagaagagccgagcaggaggtgatcagcctgcaggagaaggtgcagtacctgagcgcccagaacaagggcctgctgacccagctgagcgaggccaagagaaagcaggccgagatcgagtgcaagaacaaggaggaggtgatggccgtgagactgagagaggccgacagcatcgccgccgtggccgagctgagacagcacatcgccgagctggagatccagaaggaggagggcaagctgcagggccagctgaacaagagcgacagcaaccagtacatcggcgagctgaaggaccagatcgccgagctgaaccacgagctgagatgcctgaagggccagagaggcttcagcggccagccccccttcgacggcatccacatcgtgaaccacctgatcggcgacgacgagagcttccacagcagcgacgaggacttcatcgacaacagcctgcaggagaccggcgtgggcttccccctgcacggcaagagcggcagcatgagcctggaccccgccgtggccgacggcagcgagagcgagaccgaggacagcgtgctggagaccagagagagcaaccaggtggtgcagaaggagagaccccccagaagaagagagagctacagcaccaccgtgtag

SEQ ID NO: 80072 - DNA, 891 bp, synthetic construct
  misc_feature 1..891: note = Description of Artificial Sequence: Synthetic coding sequence
  source 1..891: mol_type = other DNA
atgagctgggtgcaggccaccctgctggccagaggcctgtgcagagcctggggcggcacctgcggcgccgccctgaccggcaccagcatcagccaggtgcccagaagactgcccagaggcctgcactgcagcgccgccgcccacagcagcgagcagagcctggtgcccagcccccccgagcccagacagagacccaccaaggccctggtgcccttcgaggacctgttcggccaggcccccggcggcgagagagacaaggccagcttcctgcagaccgtgcagaagttcgccgagcacagcgtgagaaagagaggccacatcgacttcatctacctggccctgagaaagatgagagagtacggcgtggagagagacctggccgtgtacaaccagctgctgaacatcttccccaaggaggtgttcagacccagaaacatcatccagagaatcttcgtgcactaccccagacagcaggagtgcggcatcgccgtgctggagcagatggagaaccacggcgtgatgcccaacaaggagaccgagttcctgctgatccagatcttcggcagaaagagctaccccatgctgaagctggtgagactgaagctgtggttccccagattcatgaacgtgaaccccttccccgtgcccagagacctgccccaggaccccgtggagctggccatgttcggcctgagacacatggagcccgacctgagcgccagagtgaccatctaccaggtgcccctgcccaaggacagcaccggcgccgccgaccccccccagccccacatcgtgggcagcggcagagacgccggcggcgtggagcccctgctgcccgacgccgccggccccggcgtgtgcgaggagtggctgggccagctgagagtgtag

SEQ ID NO: 80073 - DNA, 1296 bp, synthetic construct
  misc_feature 1..1296: note = Description of Artificial Sequence: Synthetic coding sequence
  source 1..1296: mol_type = other DNA
atgagctgggtgcaggccaccctgctggccagaggcctgtgcagagcctggggcggcacctgcggcgccgccctgaccggcaccagcatcagccaggtgcccagaagactgcccagaggcctgcactgcagcgccgccgcccacagcagcgagcagagcctggtgcccagcccccccgagcccagacagagacccaccaaggccctggtgcccttcgaggacctgttcggccaggcccccggcggcgagagagacaaggccagcttcctgcagaccgtgcagaagttcgccgagcacagcgtgagaaagagaggccacatcgacttcatctacctggccctgagaaagatgagagagtacggcgtggagagagacctggccgtgtacaaccagctgctgaacatcttccccaaggaggtgttcagacccagaaacatcatccagagaatcttcgtgcactaccccagacagcaggagtgcggcatcgccgtgctggagcagatggagaaccacggcgtgatgcccaacaaggagaccgagttcctgctgatccagatcttcggcagaaagagctaccccatgctgaagctggtgagactgaagctgtggttccccagattcatgaacgtgaaccccttccccgtgcccagagacctgccccaggaccccgtggagctggccatgttcggcctgagacacatggagcccgacctgagcgccagagtgaccatctaccaggtgcccctgcccaaggacagcaccggcgccgccgaccccccccagccccacatcgtgggcatccagagccccgaccagcaggccgccctggccagacacaaccccgccagacccgtgttcgtggagggccccttcagcctgtggctgagaaacaagtgcgtgtactaccacatcctgagagccgacctgctgccccccgaggagagagaggtggaggagacccccgaggagtggaacctgtactaccccatgcagctggacctggagtacgtgagaagcggctgggacaactacgagttcgacatcaacgaggtggaggagggccccgtgttcgccatgtgcatggccggcgcccacgaccaggccaccatggccaagtggatccagggcctgcaggagaccaaccccaccctggcccagatccccgtggtgttcagactggccggcagcaccagagagctgcagaccagcagcgccggcctggaggagccccccctgcccgaggaccaccaggaggaggacgacaacctgcagagacagcagcagggccagagctag

SEQ ID NO: 80074 - DNA, 654 bp, synthetic construct
  misc_feature 1..654: note = Description of Artificial Sequence: Synthetic coding sequence
  source 1..654: mol_type = other DNA
atgagctgggtgcaggccaccctgctggccagaggcctgtgcagagcctggggcggcacctgcggcgccgccctgaccggcaccagcatcagccaggtgcccctgcccaaggacagcaccggcgccgccgaccccccccagccccacatcgtgggcatccagagccccgaccagcaggccgccctggccagacacaaccccgccagacccgtgttcgtggagggccccttcagcctgtggctgagaaacaagtgcgtgtactaccacatcctgagagccgacctgctgccccccgaggagagagaggtggaggagacccccgaggagtggaacctgtactaccccatgcagctggacctggagtacgtgagaagcggctgggacaactacgagttcgacatcaacgaggtggaggagggccccgtgttcgccatgtgcatggccggcgcccacgaccaggccaccatggccaagtggatccagggcctgcaggagaccaaccccaccctggcccagatccccgtggtgttcagactggccggcagcaccagagagctgcagaccagcagcgccggcctggaggagccccccctgcccgaggaccaccaggaggaggacgacaacctgcagagacagcagcagggccagagctag

SEQ ID NO: 80075 - DNA, 891 bp, synthetic construct
  misc_feature 1..891: note = Description of Artificial Sequence: Synthetic coding sequence
  source 1..891: mol_type = other DNA
atgagctgggtgcaggccaccctgctggccagaggcctgtgcagagcctggggcggcacctgcggcgccgccctgaccggcaccagcatcagccaggtgcccagaagactgcccagaggcctgcactgcagcgccgccgcccacagcagcgagcagagcctggtgcccagcccccccgagcccagacagagacccaccaaggccctggtgcccttcgaggacctgttcggccaggcccccggcggcgagagagacaaggccagcttcctgcagaccgtgcagaagttcgccgagcacagcgtgagaaagagaggccacatcgacttcatctacctggccctgagaaagatgagagagtacggcgtggagagagacctggccgtgtacaaccagctgctgaacatcttccccaaggaggtgttcagacccagaaacatcatccagagaatcttcgtgcactaccccagacagcaggagtgcggcatcgccgtgctggagcagatggagaaccacggcgtgatgcccaacaaggagaccgagttcctgctgatccagatcttcggcagaaagagctaccccatgctgaagctggtgagactgaagctgtggttccccagattcatgaacgtgaaccccttccccgtgcccagagacctgccccaggaccccgtggagctggccatgttcggcctgagacacatggagcccgacctgagcgccagagtgaccatctaccaggtgcccctgcccaaggacagcaccggcgccgccgaccccccccagccccacatcgtggagctgacctgctgccccagaagaagaggcaagtggaagagaagaagaagaagcggcaccagcaccaccagatgcagctggacctggagcatgtag

SEQ ID NO: 80076 - DNA, 1770 bp, synthetic construct
  misc_feature 1..1770: note = Description of Artificial Sequence: Synthetic coding sequence
  source 1..1770: mol_type = other DNA
atgagcgtgagcgtgcacgagaacagaaagagcagagccagcagcggcagcatcaacatctacctgttccacaagagcagctacgccgacagcgtgctgacccacctgaacctgctgagacagcagagactgttcaccgacgtgctgctgcacgccggcaacagaaccttcccctgccacagagccgtgctggccgcctgcagcagatacttcgaggccatgttcagcggcggcctgaaggagagccaggacagcgaggtgaacttcgacaacagcatccaccccgaggtgctggagctgctgctggactacgcctacagcagcagagtgatcatcaacgaggagaacgccgagagcctgctggaggccggcgacatgctggagttccaggacatcagagacgcctgcgccgagttcctggagaagaacctgcaccccaccaactgcctgggcatgctgctgctgagcgacgcccaccagtgcaccaagctgtacgagctgagctggagaatgtgcctgagcaacttccagaccatcagaaagaacgaggacttcctgcagctgccccaggacatggtggtgcagctgctgagcagcgaggagctggagaccgaggacgagagactggtgtacgagagcgccatcaactggatcagctacgacctgaagaagagatactgctacctgcccgagctgctgcagaccgtgagactggccctgctgcccgccatctacctgatggagaacgtggccatggaggagctgatcaccaagcagagaaagagcaaggagatcgtggaggaggccatcagatgcaagctgaagatcctgcagaacgacggcgtggtgaccagcctgtgcgccagacccagaaagaccggccacgccctgttcctgctgggcggccagaccttcatgtgcgacaagctgtacctggtggaccagaaggccaaggagatcatccccaaggccgacatccccagccccagaaaggagttcagcgcctgcgccatcggctgcaaggtgtacatcaccggcggcagaggcagcgagaacggcgtgagcaaggacgtgtgggtgtacgacaccctgcacgaggagtggagcaaggccgcccccatgctggtggccagattcggccacggcagcgccgagctgaagcactgcctgtacgtggtgggcggccacaccgccgccaccggctgcctgcccgccagccccagcgtgagcctgaagcaggtggagcactacgaccccaccatcaacaagtggaccatggtggcccccctgagagagggcgtgagcaacgccgccgtggtgagcgccaagctgaagctgttcgccttcggcggcaccagcgtgagccacgacaagctgcccaaggtgcagtgctacgaccagtgcgagaacagatggaccgtgcccgccacctgcccccagccctggagatacaccgccgccgccgtgctgggcaaccagatcttcatcatgggcggcgacaccgagttcagcgcctgcagcgcctacaagttcaacagcgagacctaccagtggaccaaggtgggcgacgtgaccgccaagagaatgagctgccacgccgtggccagcggcaacaagctgtacgtggtgggcggctacttcggcatccagagatgcaagaccctggactgctacgaccccaccctggacgtgtggaacagcatcaccaccgtgccctacagcctgatccccaccgccttcgtgagcacctggaagcacctgcccagctag

SEQ ID NO: 80077 - DNA, 153 bp, synthetic construct
  misc_feature 1..153: note = Description of Artificial Sequence: Synthetic coding sequence
  source 1..153: mol_type = other DNA
atgagcgtgagcgtgcacgagaacagaaagagcagagccagcagcggcagcatcaacatctacctgttccacaagagcagctacgccgacagcgtgctgacccacctgaacctgctgagacagcagagactgttcaccgacgtgctgctgtag

SEQ ID NO: 80078 - DNA, 15 bp, synthetic construct
  misc_feature 1..15: note = Description of Artificial Sequence: Synthetic coding sequence
  source 1..15: mol_type = other DNA
atgagcgtgagctag

SEQ ID NO: 80079 - DNA, 1770 bp, synthetic construct; identical to SEQ ID NO: 80076
  misc_feature 1..1770: note = Description of Artificial Sequence: Synthetic coding sequence
  source 1..1770: mol_type = other DNA

SEQ ID NO: 80080 - DNA, 1551 bp, synthetic construct
  misc_feature 1..1551: note = Description of Artificial Sequence: Synthetic coding sequence
  source 1..1551: mol_type = other DNA
atgttcagcggcggcctgaaggagagccaggacagcgaggtgaacttcgacaacagcatccaccccgaggtgctggagctgctgctggactacgcctacagcagcagagtgatcatcaacgaggagaacgccgagagcctgctggaggccggcgacatgctggagttccaggacatcagagacgcctgcgccgagttcctggagaagaacctgcaccccaccaactgcctgggcatgctgctgctgagcgacgcccaccagtgcaccaagctgtacgagctgagctggagaatgtgcctgagcaacttccagaccatcagaaagaacgaggacttcctgcagctgccccaggacatggtggtgcagctgctgagcagcgaggagctggagaccgaggacgagagactggtgtacgagagcgccatcaactggatcagctacgacctgaagaagagatactgctacctgcccgagctgctgcagaccgtgagactggccctgctgcccgccatctacctgatggagaacgtggccatggaggagctgatcaccaagcagagaaagagcaaggagatcgtggaggaggccatcagatgcaagctgaagatcctgcagaacgacggcgtggtgaccagcctgtgcgccagacccagaaagaccggccacgccctgttcctgctgggcggccagaccttcatgtgcgacaagctgtacctggtggaccagaaggccaaggagatcatccccaaggccgacatccccagccccagaaaggagttcagcgcctgcgccatcggctgcaaggtgtacatcaccggcggcagaggcagcgagaacggcgtgagcaaggacgtgtgggtgtacgacaccctgcacgaggagtggagcaaggccgcccccatgctggtggccagattcggccacggcagcgccgagctgaagcactgcctgtacgtggtgggcggccacaccgccgccaccggctgcctgcccgccagccccagcgtgagcctgaagcaggtggagcactacgaccccaccatcaacaagtggaccatggtggcccccctgagagagggcgtgagcaacgccgccgtggtgagcgccaagctgaagctgttcgccttcggcggcaccagcgtgagccacgacaagctgcccaaggtgcagtgctacgaccagtgcgagaacagatggaccgtgcccgccacctgcccccagccctggagatacaccgccgccgccgtgctgggcaaccagatcttcatcatgggcggcgacaccgagttcagcgcctgcagcgcctacaagttcaacagcgagacctaccagtggaccaaggtgggcgacgtgaccgccaagagaatgagctgccacgccgtggccagcggcaacaagctgtacgtggtgggcggctacttcggcatccagagatgcaagaccctggactgctacgaccccaccctggacgtgtggaacagcatcaccaccgtgccctacagcctgatccccaccgccttcgtgagcacctggaagcacctgcccagctag

SEQ ID NO: 80081 - DNA, 1932 bp, synthetic construct
  misc_feature 1..1932: note = Description of Artificial Sequence: Synthetic coding sequence
  source 1..1932: mol_type = other DNA
atggtggacgccggcggcgtggagaacatcacccagctgccccaggagctgccccagatgatggccgccgccgccgacggcctgggcagcatcgccatcgacaccacccagctgaacatgagcgtgaccgaccccaccgcctgggccaccgccatgaacaacctgggcatggtgcccgtgggcctgcccggccagcagctggtgagcgacagcatctgcgtgcccggcttcgaccccagcctgaacatgatgaccggcatcacccccatcaaccccatgatccccggcctgggcctggtgcccccccccccccccaccgaggtggccgtggtgaaggagatcatccactgcaagagctgcaccctgttcccccagaaccccaacctgcccccccccagcaccagagagagaccccccggctgcaagaccgtgttcgtgggcggcctgcccgagaacgccaccgaggagatcatccaggaggtgttcgagcagtgcggcgacatcaccgccatcagaaagagcaagaagaacttctgccacatcagattcgccgaggagttcatggtggacaaggccatctacctgagcggctacagaatgagactgggcagcagcaccgacaagaaggacagcggcagactgcacgtggacttcgcccaggccagagacgacttctacgagtgggagtgcaagcagagaatgagagccagagaggagagacacagaagaaagctggaggaggacagactgagaccccccagcccccccgccatcatgcactacagcgagcacgaggccgccctgctggccgagaagctgaaggacgacagcaagttcagcgaggccatcaccgtgctgctgagctggatcgagagaggcgaggtgaacagaagaagcgccaaccagttctacagcatggtgcagagcgccaacagccacgtgagaagactgatgaacgagaaggccacccacgagcaggagatggaggaggccaaggagaacttcaagaacgccctgaccggcatcctgacccagttcgagcagatcgtggccgtgttcaacgccagcaccagacagaaggcctgggaccacttcagcaaggcccagagaaagaacatcgacatctggagaaagcacagcgaggagctgagaaacgcccagagcgagcagctgatgggcatcagaagagaggaggagatggagatgagcgacgacgagaactgcgacagccccaccaagaagatgagagtggacgagagcgccctggccgcccaggcctacgccctgaaggaggagaacgacagcctgagatggcagctggacgcctacagaaacgaggtggagctgctgaagcaggagaaggagcagctgttcagaaccgaggagaacctgaccaaggaccagcagctgcagttcctgcagcagaccatgcagggcatgcagcagcagctgctgaccatccaggaggagctgaacaacaagaagagcgagctggagcaggccaaggaggagcagagccacacccaggccctgctgaaggtgctgcaggagcagctgaagggcaccaaggagctggtggagaccaacggccacagccacgaggacagcaacgagatcaacgtgctgaccgtggccctggtgaaccaggacagagagaacaacatcgagaagagaagccagggcctgaagagcgagaaggaggccctgctgatcggcatcatcagcaccttcctgcacgtgcaccccttcggcgccaacatcgagtacctgtggagctacatgcagcagctggacagcaagatcagcgccaacgagatcgagatgctgctgatgagactgcccagaatgttcaagcaggagttcaccggcgtgggcgccaccctggagaagagatggaagctgtgcgccttcgagggcatcaagaccacctag

SEQ ID NO: 80082 - DNA, 1932 bp, synthetic construct; identical to SEQ ID NO: 80081
  misc_feature 1..1932: note = Description of Artificial Sequence: Synthetic coding sequence
  source 1..1932: mol_type = other DNA

SEQ ID NO: 80083 - DNA, 708 bp, synthetic construct
  misc_feature 1..708: note = Description of Artificial Sequence: Synthetic coding sequence
  source 1..708: mol_type = other DNA
atggtggacaaggccatctacctgagcggctacagaatgagactgggcagcagcaccgacaagaaggacagcggcagactgcacgtggacttcgcccaggccagagacgacttctacgagtgggagtgcaagcagagaatgagagccagagaggagagacacagaagaaagctggaggaggacagactgagaccccccagcccccccgccatcatgcactacagcgagcacgaggccgccctgctggccgagaagctgaaggacgacagcaagttcagcgaggccatcaccgtgctgctgagctggatcgagagaggcgaggtgaacagaagaagcgccaaccagttctacagcatggtgcagagcgccaacagccacgtgagaagactgatgaacgagaaggccacccacgagcaggagatggaggaggccaaggagaacttcaagaacgccctgaccggcatcctgacccagttcgagcagatcgtggccgtgttcaacgccagcaccagacagaaggcctgggaccacttcagcaaggcccagagaaagaacatcgacatctggagaaagcacagcgaggagctgagaaacgcccagagcgagcagctgatgggcatcagaagagaggaggagatggagatgagcgacgacgagaactgcgacagccccaccaagaagatgagagtggacgagagcggcgcctag

SEQ ID NO: 80084 - DNA, 1833 bp, synthetic construct
  misc_feature 1..1833: note = Description of Artificial Sequence: Synthetic coding sequence
  source 1..1833: mol_type = other DNA
atgcagagagacttcagatggctgtgggtgtacgagatcggctacgccgccgacaacagcagaaccctgaacgtggacagcaccgccatgaccctgcccatgagcgaccccaccgcctgggccaccgccatgaacaacctgggcatggcccccctgggcatcgccggccagcccatcctgcccgacttcgaccccgccctgggcatgatgaccggcatcccccccatcacccccatgatgcccggcctgggcatcgtgcccccccccatcccccccgacatgcccgtggtgaaggagatcatccactgcaagagctgcaccctgttcccccccaaccccaacctgcccccccccgccaccagagagagaccccccggctgcaagaccgtgttcgtgggcggcctgcccgagaacggcaccgagcagatcatcgtggaggtgttcgagcagtgcggcgagatcatcgccatcagaaagagcaagaagaacttctgccacatcagattcgccgaggagtacatggtggacaaggccctgtacctgagcggctacagaatcagactgggcagcagcaccgacaagaaggacaccggcagactgcacgtggacttcgcccaggccagagacgacctgtacgagtgggagtgcaagcagagaatgctggccagagaggagagacacagaagaagaatggaggaggagagactgagaccccccagccccccccccgtggtgcactacagcgaccacgagtgcagcatcgtggccgagaagctgaaggacgacagcaagttcagcgaggccgtgcagaccctgctgacctggatcgagagaggcgaggtgaacagaagaagcgccaacaacttctacagcatgatccagagcgccaacagccacgtgagaagactggtgaacgagaaggccgcccacgagaaggacatggaggaggccaaggagaagttcaagcaggccctgagcggcatcctgatccagttcgagcagatcgtggccgtgtaccacagcgccagcaagcagaaggcctgggaccacttcaccaaggcccagagaaagaacatcagcgtgtggtgcaagcaggccgaggagatcagaaacatccacaacgacgagctgatgggcatcagaagagaggaggagatggagatgagcgacgacgagatcgaggagatgaccgagaccaaggagaccgaggagagcgccctggtgagccaggccgaggccctgaaggaggagaacgacagcctgagatggcagctggacgcctacagaaacgaggtggagctgctgaagcaggagcagggcaaggtgcacagagaggacgaccccaacaaggagcagcagctgaagctgctgcagcaggccctgcagggcatgcagcagcacctgctgaaggtgcaggaggagtacaagaagaaggaggccgagctggagaagctgaaggacgacaagctgcaggtggagaagatgctggagaacctgaaggagaaggagagctgcgccagcagactgtgcgccagcaaccaggacagcgagtaccccctggagaagaccatgaacagcagccccatcaagagcgagagagaggccctgctggtgggcatcatcagcaccttcctgcacgtgcaccccttcggcgccagcatcgagtacatctgcagctacctgcacagactggacaacaagatctgcaccagcgacgtggagtgcctgatgggcagactgcagcacaccttcaagcaggagatgaccggcgtgggcgccagcctggagaagagatggaagttctgcggcttcgagggcctgaagctgacctag

SEQ ID NO: 80085 - DNA, 1917 bp, synthetic construct
  misc_feature 1..1917: note = Description of Artificial Sequence: Synthetic coding sequence
  source 1..1917: mol_type = other DNA
ctgcccttcgaccccgccaacaacaacgagcccctgcagttcggcagcgccagcggccccctggtgaccgagggcctgatcgagaacggcggcgagagcagcaagaagagaaagagaaccaacacccccagcgccgacaacagcagaaccctgaacgtggacagcaccgccatgaccctgcccatgagcgaccccaccgcctgggccaccgccatgaacaacctgggcatggcccccctgggcatcgccggccagcccatcctgcccgacttcgaccccgccctgggcatgatgaccggcatcccccccatcacccccatgatgcccggcctgggcatcgtgcccccccccatcccccccgacatgcccgtggtgaaggagatcatccactgcaagagctgcaccctgttcccccccaaccccaacctgcccccccccgccaccagagagagaccccccggctgcaagaccgtgttcgtgggcggcctgcccgagaacggcaccgagcagatcatcgtggaggtgttcgagcagtgcggcgagatcatcgccatcagaaagagcaagaagaacttctgccacatcagattcgccgaggagtacatggtggacaaggccctgtacctgagcggctacagaatcagactgggcagcagcaccgacaagaaggacaccggcagactgcacgtggacttcgcccaggccagagacgacctgtacgagtgggagtgcaagcagagaatgctggccagagaggagagacacagaagaagaatggaggaggagagactgagaccccccagccccccccccgtggtgcactacagcgaccacgagtgcagcatcgtggccgagaagctgaaggacgacagcaagttcagcgaggccgtgcagaccctgctgacctggatcgagagaggcgaggtgaacagaagaagcgccaacaacttctacagcatgatccagagcgccaacagccacgtgagaagactggtgaacgagaaggccgcccacgagaaggacatggaggaggccaaggagaagttcaagcaggccctgagcggcatcctgatccagttcgagcagatcgtggccgtgtaccacagcgccagcaagcagaaggcctgggaccacttcaccaaggcccagagaaagaacatcagcgtgtggtgcaagcaggccgaggagatcagaaacatccacaacgacgagctgatgggcatcagaagagaggaggagatggagatgagcgacgacgagatcgaggagatgaccgagaccaaggagaccgaggagagcgccctggtgagccaggccgaggccctgaaggaggagaacgacagcctgagatggcagctggacgcctacagaaacgaggtggagctgctgaagcaggagcagggcaaggtgcacagagaggacgaccccaacaaggagcagcagctgaagctgctgcagcaggccctgcagggcatgcagcagcacctgctgaaggtgcaggaggagtacaagaagaaggaggccgagctggagaagctgaaggacgacaagctgcaggtggagaagatgctggagaacctgaaggagaaggagagctgcgccagcagactgtgcgccagcaaccaggacagcgagtaccccctggagaagaccatgaacagcagccccatcaagagcgagagagaggccctgctggtgggcatcatcagcaccttcctgcacgtgcaccccttcggcgccagcatcgagtacatctgcagctacctgcacagactggacaacaagatctgcaccagcgacgtggagtgcctgatgggcagactgcagcacaccttcaagcaggagatgaccggcgtgggcgccagcctggagaagagatggaagttctgcggcttcgagggcctgaagctgacctag

SEQ ID NO: 80086 - DNA, 1833 bp, synthetic construct; identical to SEQ ID NO: 80084
  misc_feature 1..1833: note = Description of Artificial Sequence: Synthetic coding sequence
  source 1..1833: mol_type = other DNA

SEQ ID NO: 80087 - DNA, 1746 bp, synthetic construct
  misc_feature 1..1746: note = Description of Artificial Sequence: Synthetic coding sequence
  source 1..1746: mol_type = other DNA
atgaccctgcccatgagcgaccccaccgcctgggccaccgccatgaacaacctgggcatggcccccctgggcatcgccggccagcccatcctgcccgacttcgaccccgccctgggcatgatgaccggcatcccccccatcacccccatgatgcccggcctgggcatcgtgcccccccccatcccccccgacatgcccgtggtgaaggagatcatccactgcaagagctgcaccctgttcccccccaaccccaacctgcccccccccgccaccagagagagaccccccggctgcaagaccgtgttcgtgggcggcctgcccgagaacggcaccgagcagatcatcgtggaggtgttcgagcagtgcggcgagatcatcgccatcagaaagagcaagaagaacttctgccacatcagattcgccgaggagtacatggtggacaaggccctgtacctgagcggctacagaatcagactgggcagcagcaccgacaagaaggacaccggcagactgcacgtggacttcgcccaggccagagacgacctgtacgagtgggagtgcaagcagagaatgctggccagagaggagagacacagaagaagaatggaggaggagagactgagaccccccagccccccccccgtggtgcactacagcgaccacgagtgcagcatcgtggccgagaagctgaaggacgacagcaagttcagcgaggccgtgcagaccctgctgacctggatcgagagaggcgaggtgaacagaagaagcgccaacaacttctacagcatgatccagagcgccaacagccacgtgagaagactggtgaacgagaaggccgcccacgagaaggacatggaggaggccaaggagaagttcaagcaggccctgagcggcatcctgatccagttcgagcagatcgtggccgtgtaccacagcgccagcaagcagaaggcctgggaccacttcaccaaggcccagagaaagaacatcagcgtgtggtgcaagcaggccgaggagatcagaaacatccacaacgacgagctgatgggcatcagaagagaggaggagatggagatgagcgacgacgagatcgaggagatgaccgagaccaaggagaccgaggagagcgccctggtgagccaggccgaggccctgaaggaggagaacgacagcctgagatggcagctggacgcctacagaaacgaggtggagctgctgaagcaggagcagggcaaggtgcacagagaggacgaccccaacaaggagcagcagctgaagctgctgcagcaggccctgcagggcatgcagcagcacctgctgaaggtgcaggaggagtacaagaagaaggaggccgagctggagaagctgaaggacgacaagctgcaggtggagaagatgctggagaacctgaaggagaaggagagctgcgccagcagactgtgcgccagcaaccaggacagcgagtaccccctggagaagaccatgaacagcagccccatcaagagcgagagagaggccctgctggtgggcatcatcagcaccttcctgcacgtgcaccccttcggcgccagcatcgagtacatctgcagctacctgcacagactggacaacaagatctgcaccagcgacgtggagtgcctgatgggcagactgcagcacaccttcaagcaggagatgaccggcgtgggcgccagcctggagaagagatggaagttctgcggcttcgagggcctgaagctgacctag

SEQ ID NO: 80088 - DNA, 1746 bp, synthetic construct; identical to SEQ ID NO: 80087
  misc_feature 1..1746: note = Description of Artificial Sequence: Synthetic coding sequence
  source 1..1746: mol_type = other DNA

SEQ ID NO: 80089 - DNA, 1131 bp, synthetic construct
  misc_feature 1..1131: note = Description of Artificial Sequence: Synthetic coding sequence
  source 1..1131: mol_type = other DNA
atgaccctgcccatgagcgaccccaccgcctgggccaccgccatgaacaacctgggcatggcccccctgggcatcgccggccagcccatcctgcccgacttcgaccccgccctgggcatgatgaccggcatcccccccatcacccccatgatgcccggcctgggcatcgtgcccccccccatcccccccgacatgcccgtggtgaaggagatcatccactgcaagagctgcaccctgttcccccccaaccccaacctgcccccccccgccaccagagagagaccccccggctgcaagaccgtgttcgtgggcggcctgcccgagaacggcaccgagcagatcatcgtggaggtgttcgagcagtgcggcgagatcatcgccatcagaaagagcaagaagaacttctgccacatcagattcgccgaggagtacatggtggacaaggccctgtacctgagcggctacagaatcagactgggcagcagcaccgacaagaaggacaccggcagactgcacgtggacttcgcccaggccagagacgacctgtacgagtgggagtgcaagcagagaatgctggccagagaggagagacacagaagaagaatggaggaggagagactgagaccccccagccccccccccgtggtgcactacagcgaccacgagtgcagcatcgtggccgagaagctgaaggacgacagcaagttcagcgaggccgtgcagaccctgctgacctggatcgagagaggcgaggtgaacagaagaagcgccaacaacttctacagcatgatccagagcgccaacagccacgtgagaagactggtgaacgagaaggccgcccacgagaaggacatggaggaggccaaggagaagttcaagcaggccctgagcggcatcctgatccagttcgagcagatcgtggccgtgtaccacagcgccagcaagcagaaggcctgggaccacttcaccaaggcccagagaaagaacatcagcgtgtggtgcaagcaggccgaggagatcagaaacatccacaacgacgagctgatgggcatcagaagagaggaggagatggagatgagcgacgacgagatcgaggagatgaccgagaccaaggagaccgaggagagctag

SEQ ID NO: 80090 - DNA, 1407 bp, synthetic construct
  misc_feature 1..1407: note = Description of Artificial Sequence: Synthetic coding sequence
  source 1..1407: mol_type = other DNA
atgaccctgcccatgagcgaccccaccgcctgggccaccgccatgaacaacctgggcatggcccccctgggcatcgccggccagcccatcctgcccgacttcgaccccgccctgggcatgatgaccggcatcccccccatcacccccatgatgcccggcctgggcatcgtgcccccccccatcccccccgacatgcccgtggtgaaggagatcatccactgcaagagctgcaccctgttcccccccaaccccaacctgcccccccccgccaccagagagagaccccccggctgcaagaccgtgttcgtgggcggcctgcccgagaacggcaccgagcagatcatcgtggaggtgttcgagcagtgcggcgagatcatcgccatcagaaagagcaagaagaacttctgccacatcagattcgccgaggagtacatggtggacaaggccctgtacctgagcggctacagaatcagactgggcagcagcaccgacaagaaggacaccggcagactgcacgtggacttcgcccaggccagagacgacctgtacgagtgggagtgcaagcagagaatgctggccagagaggagagacacagaagaagaatggaggaggagagactgagaccccccagccccccccccgtggtgcactacagcgaccacgagtgcagcatcgtggccgagaagctgaaggacgacagcaagttcagcgaggccgtgcagaccctgctgacctggatcgagagaggcgaggtgaacagaagaagcgccaacaacttctacagcatgatccagagcgccaacagccacgtgagaagactggtgaacgagaaggccgcccacgagaaggacatggaggaggccaaggagaagttcaagcaggccctgagcggcatcctgatccagttcgagcagatcgtggccgtgtaccacagcgccagcaagcagaaggcctgggaccacttcaccaaggcccagagaaagaacatcagcgtgtggtgcaagcaggccgaggagatcagaaacatccacaacgacgagctgatgggcatcagaagagaggaggagatggagatgagcgacgacgagatcgaggagatgaccgagaccaaggagaccgaggagagcgccctggtgagccaggccgaggccctgaaggaggagaacgacagcctgagatggcagctggacgcctacagaaacgaggtggagctgctgaagcaggagcagggcaaggtgcacagagaggacgaccccaacaaggagcagcagctgaagctgctgcagcaggccctgcagggcatgcagcagcacctgctgaaggtgcaggaggagtacaagaagaaggaggccgagctggagaagctgaaggacgacaagctgcaggtggagaagatgaagaagtag

SEQ ID NO: 80091 - DNA, 1119 bp, synthetic construct
  misc_feature 1..1119: note = Description of Artificial Sequence: Synthetic coding sequence
  source 1..1119: mol_type = other DNA
atggagagcgaggagctggccgacagagtgctggacgtggtggagagaagcctgagcaactaccccttcgacttccagggcgccagaatcatcaccggccaggaggagggcgcctacggctggatcaccatcaactacctgctgggcaagttcagccagaagaccagatggttcagcatcgtgccctacgagaccaacaaccaggagaccttcggcgccctggacctgggcggcgccagcacccaggtgaccttcgtgccccagaaccagaccatcgagagccccgacaacgccctgcagttcagactgtacggcaaggactacaacgtgtacacccacagcttcctgtgctacggcaaggaccaggccctgtggcagaagctggccaaggacatccaggtggccagcaacgagatcctgagagacccctgcttccaccccggctacaagaaggtggtgaacgtgagcgacctgtacaagaccccctgcaccaagagattcgagatgaccctgcccttccagcagttcgagatccagggcatcggcaactaccagcagtgccaccagagcatcctggagctgttcaacaccagctactgcccctacagccagtgcgccttcaacggcatcttcctgccccccctgcagggcgacttcggcgccttcagcgccttctacttcgtgatgaagttcctgaacctgaccagcgagaaggtgagccaggagaaggtgaccgagatgatgaagaagttctgcgcccagccctgggaggagatcaagaccagctacgccggcgtgaaggagaagtacctgagcgagtactgcttcagcggcacctacatcctgagcctgctgctgcagggctaccacttcaccgccgacagctgggagcacatccacttcatcggcaagatccagggcagcgacgccggctggaccctgggctacatgctgaacctgaccaacatgatccccgccgagcagcccctgagcacccccctgagccacagcacctacgtgttcctgatggtgctgttcagcctggtgctgttcaccgtggccatcatcggcctgctgatcttccacaagcccagctacttctggaaggacatggtgtag

SEQ ID NO: 80092 - DNA, 1533 bp, synthetic construct
  misc_feature 1..1533: note = Description of Artificial Sequence: Synthetic coding sequence
  source 1..1533: mol_type = other DNA
atggaggacaccaaggagagcaacgtgaagaccttctgcagcaagaacatcctggccatcctgggcttcagcagcatcatcgccgtgatcgccctgctggccgtgggcctgacccagaacaaggccctgcccgagaacgtgaagtacggcatcgtgctggacgccggcagcagccacaccagcctgtacatctacaagtggcccgccgagaaggagaacgacaccggcgtggtgcaccaggtggaggagtgcagagtgaagggccccggcatcagcaagttcgtgcagaaggtgaacgagatcggcatctacctgaccgactgcatggagagagccagagaggtgatccccagaagccagcaccaggagacccccgtgtacctgggcgccaccgccggcatgagactgctgagaatggagagcgaggagctggccgacagagtgctggacgtggtggagagaagcctgagcaactaccccttcgacttccagggcgccagaatcatcaccggccaggaggagggcgcctacggctggatcaccatcaactacctgctgggcaagttcagccagaagaccagatggttcagcatcgtgccctacgagaccaacaaccaggagaccttcggcgccctggacctgggcggcgccagcacccaggtgaccttcgtgccccagaaccagaccatcgagagccccgacaacgccctgcagttcagactgtacggcaaggactacaacgtgtacacccacagcttcctgtgctacggcaaggaccaggccctgtggcagaagctggccaaggacatccaggtggccagcaacgagatcctgagagacccctgcttccaccccggctacaagaaggtggtgaacgtgagcgacctgtacaagaccccctgcaccaagagattcgagatgaccctgcccttccagcagttcgagatccagggcatcggcaactaccagcagtgccaccagagcatcctggagctgttcaacaccagctactgcccctacagccagtgcgccttcaacggcatcttcctgccccccctgcagggcgacttcggcgccttcagcgccttctacttcgtgatgaagttcctgaacctgaccagcgagaaggtgagccaggagaaggtgaccgagatgatgaagaagttctgcgcccagccctgggaggagatcaagaccagctacgccggcgtgaaggagaagtacctgagcgagtactgcttcagcggcacctacatcctgagcctgctgctgcagggctaccacttcaccgccgacagctgggagcacatccacttcatcggcaagatccagggcagcgacgccggctggaccctgggctacatgctgaacctgaccaacatgatccccgccgagcagcccctgagcacccccctgagccacagcacctacgtgttcctgatggtgctgttcagcctggtgctgttcaccgtggccatcatcggcctgctgatcttccacaagcccagctacttctggaaggacatggtgtag

SEQ ID NO: 80093 - DNA, 921 bp, synthetic construct
  misc_feature 1..921: note = Description of Artificial Sequence: Synthetic coding sequence
  source 1..921: mol_type = other DNA
atgaagggcaccaaggacctgaccagccagcagaaggagagcaacgtgaagaccttctgcagcaagaacatcctggccatcctgggcttcagcagcatcatcgccgtgatcgccctgctggccgtgggcctgacccagaacaaggccctgcccgagaacgtgaagtacggcatcgtgctggacgccggcagcagccacaccagcctgtacatctacaagtggcccgccgagaaggagaacgacaccggcgtggtgcaccaggtggaggagtgcagagtgaagggccccggcatcagcaagttcgtgcagaaggtgaacgagatcggcatctacctgaccgactgcatggagagagccagagaggtgatccccagaagccagcaccaggagacccccgtgtacctgggcgccaccgccggcatgagactgctgagaatggagagcgaggagctggccgacagagtgctggacgtggtggagagaagcctgagcaactaccccttcgacttccagggcgccagaatcatcaccggccaggaggagggcgcctacggctggatcaccatcaactacctgctgggcaagttcagccagaagaccagatggttcagcatcgtgccctacgagaccaacaaccaggagaccttcggcgccctggacctgggcggcgccagcacccaggtgaccttcgtgccccagaaccagaccatcgagagccccgacaacgccctgcagttcagactgtacggcaaggactacaacgtgtacacccacagcttcctgtgctacggcaaggaccaggccctgtggcagaagctggccaaggacatccaggccagcatcacccagagcagacccgcccccttcaccagcgccccccccgcccccaccagctgctgcttcctgttccagatccagtag

SEQ ID NO: 80094 - DNA, 1569 bp, synthetic construct
  misc_feature 1..1569: note = Description of Artificial Sequence: Synthetic coding sequence
  source 1..1569: mol_type = other DNA
atgggcagagaggagctgttcctgaccttcagcttcagcagcggcttccaggagagcaacgtgaagaccttctgcagcaagaacatcctggccatcctgggcttcagcagcatcatcgccgtgatcgccctgctggccgtgggcctgacccagaacaaggccctgcccgagaacgtgaagtacggcatcgtgctggacgccggcagcagccacaccagcctgtacatctacaagtggcccgccgagaaggagaacgacaccggcgtggtgcaccaggtggaggagtgcagagtgaagggccccggcatcagcaagttcgtgcagaaggtgaacgagatcggcatctacctgaccgactgcatggagagagccagagaggtgatccccagaagccagcaccaggagacccccgtgtacctgggcgccaccgccggcatgagactgctgagaatggagagcgaggagctggccgacagagtgctggacgtggtggagagaagcctgagcaactaccccttcgacttccagggcgccagaatcatcaccggccaggaggagggcgcctacggctggatcaccatcaactacctgctgggcaagttcagccagaagaccagatggttcagcatcgtgccctacgagaccaacaaccaggagaccttcggcgccctggacctgggcggcgccagcacccaggtgaccttcgtgccccagaaccagaccatcgagagccccgacaacgccctgcagttcagactgtacggcaaggactacaacgtgtacacccacagcttcctgtgctacggcaaggaccaggccctgtggcagaagctggccaaggacatccaggtggccagcaacgagatcctgagagacccctgcttccaccccggctacaagaaggtggtgaacgtgagcgacctgtacaagaccccctgcaccaagagattcgagatgaccctgcccttccagcagttcgagatccagggcatcggcaactaccagcagtgccaccagagcatcctggagctgttcaacaccagctactgcccctacagccagtgcgccttcaacggcatcttcctgccccccctgcagggcgacttcggcgccttcagcgccttctacttcgtgatgaagttcctgaacctgaccagcgagaaggtgagccaggagaaggtgaccgagatgatgaagaagttctgcgcccagccctgggaggagatcaagaccagctacgccggcgtgaaggagaagtacctgagcgagtactgcttcagcggcacctacatcctgagcctgctgctgcagggctaccacttcaccgccgacagctgggagcacatccacttcatcggcaagatccagggcagcgacgccggctggaccctgggctacatgctgaacctgaccaacatgatccccgccgagcagcccctgagcacccccctgagccacagcacctacgtgttcctgatggtgctgttcagcctggtgctgttcaccgtggccatcatcggcctgctgatcttccacaagcccagctacttctggaaggacatggtgtag

SEQ ID NO: 80095 - DNA, 1554 bp, synthetic construct
  misc_feature 1..1554: note = Description of Artificial Sequence: Synthetic coding sequence
  source 1..1554: mol_type = other DNA
atgaagggcaccaaggacctgaccagccagcagaaggagagcaacgtgaagaccttctgcagcaagaacatcctggccatcctgggcttcagcagcatcatcgccgtgatcgccctgctggccgtgggcctgacccagaacaaggccctgcccgagaacgtgaagtacggcatcgtgctggacgccggcagcagccacaccagcctgtacatctacaagtggcccgccgagaaggagaacgacaccggcgtggtgcaccaggtggaggagtgcagagtgaagggccccggcatcagcaagttcgtgcagaaggtgaacgagatcggcatctacctgaccgactgcatggagagagccagagaggtgatccccagaagccagcaccaggagacccccgtgtacctgggcgccaccgccggcatgagactgctgagaatggagagcgaggagctggccgacagagtgctggacgtggtggagagaagcctgagcaactaccccttcgacttccagggcgccagaatcatcaccggccaggaggagggcgcctacggctggatcaccatcaactacctgctgggcaagttcagccagaagaccagatggttcagcatcgtgccctacgagaccaacaaccaggagaccttcggcgccctggacctgggcggcgccagcacccaggtgaccttcgtgccccagaaccagaccatcgagagccccgacaacgccctgcagttcagactgtacggcaaggactacaacgtgtacacccacagcttcctgtgctacggcaaggaccaggccctgtggcagaagctggccaaggacatccaggtggccagcaacgagatcctgagagacccctgcttccaccccggctacaagaaggtggtgaacgtgagcgacctgtacaagaccccctgcaccaagagattcgagatgaccctgcccttccagcagttcgagatccagggcatcggcaactaccagcagtgccaccagagcatcctggagctgttcaacaccagctactgcccctacagccagtgcgccttcaacggcatcttcctgccccccctgcagggcgacttcggcgccttcagcgccttctacttcgtgatgaagttcctgaacctgaccagcgagaaggtgagccaggagaaggtgaccgagatgatgaagaagttctgcgcccagccctgggaggagatcaagaccagctacgccggcgtgaaggagaagtacctgagcgagtactgcttcagcggcacctacatcctgagcctgctgctgcagggctaccacttcaccgccgacagctgggagcacatccacttcatcggcaagatccagggcagcgacgccggctggaccctgggctacatgctgaacctgaccaacatgatccccgccgagcagcccctgagcacccccctgagccacagcacctacgtgttcctgatggtgctgttcagcctggtgctgttcaccgtggccatcatcggcctgctgatcttccacaagcccagctacttctggaaggacatggtgtag

SEQ ID NO: 80096 - DNA, 1119 bp, synthetic construct; identical to SEQ ID NO: 80091
  misc_feature 1..1119: note = Description of Artificial Sequence: Synthetic coding sequence
  source 1..1119: mol_type = other DNA

SEQ ID NO: 80097 - DNA, 1209 bp, synthetic construct
  misc_feature 1..1209: note = Description of Artificial Sequence: Synthetic coding sequence
  source 1..1209: mol_type = other DNA
atggagagagccagagaggtgatccccagaagccagcaccaggagacccccgtgtacctgggcgccaccgccggcatgagactgctgagaatggagagcgaggagctggccgacagagtgctggacgtggtggagagaagcctgagcaactaccccttcgacttccagggcgccagaatcatcaccggccaggaggagggcgcctacggctggatcaccatcaactacctgctgggcaagttcagccagaagaccagatggttcagcatcgtgccctacgagaccaacaaccaggagaccttcggcgccctggacctgggcggcgccagcacccaggtgaccttcgtgccccagaaccagaccatcgagagccccgacaacgccctgcagttcagactgtacggcaaggactacaacgtgtacacccacagcttcctgtgctacggcaaggaccaggccctgtggcagaagctggccaaggacatccaggtggccagcaacgagatcctgagagacccctgcttccaccccggctacaagaaggtggtgaacgtgagcgacctgtacaagaccccctgcaccaagagattcgagatgaccctgcccttccagcagttcgagatccagggcatcggcaactaccagcagtgccaccagagcatcctggagctgttcaacaccagctactgcccctacagccagtgcgccttcaacggcatcttcctgccccccctgcagggcgacttcggcgccttcagcgccttctacttcgtgatgaagttcctgaacctgaccagcgagaaggtgagccaggagaaggtgaccgagatgatgaagaagttctgcgcccagccctgggaggagatcaagaccagctacgccggcgtgaaggagaagtacctgagcgagtactgcttcagcggcacctacatcctgagcctgctgctgcagggctaccacttcaccgccgacagctgggagcacatccacttcatcggcaagatccagggcagcgacgccggctggaccctgggctacatgctgaacctgaccaacatgatccccgccgagcagcccctgagcacccccctgagccacagcacctacgtgttcctgatggtgctgttcagcctggtgctgttcaccgtggccatcatcggcctgctgatcttccacaagcccagctacttctggaaggacatggtgtag

SEQ ID NO: 80098 - DNA, 1419 bp, synthetic construct
  misc_feature 1..1419: note = Description of Artificial Sequence: Synthetic coding sequence
  source 1..1419: mol_type = other DNA
atggccggcaaggtgagaagcctgctgccccccctgctgctggccgccgccggcctggccggcctgctgctgctgtgcgtgcccaccagagacgtgagagagccccccgccctgaagtacggcatcgtgctggacgccggcagcagccacaccagcatgttcatctacaagtggcccgccgacaaggagaacgacaccggcatcgtgggccagcacagcagctgcgacgtgcccggcggcggcatcagcagctacgccgacaaccccagcggcgccagccagagcctggtgggctgcctggagcaggccctgcaggacgtgcccaaggagagacacgccggcacccccctgtacctgggcgccaccgccggcatgagactgctgaacctgaccaaccccgaggccagcaccagcgtgctgatggccgtgacccacaccctgacccagtaccccttcgacttcagaggcgccagaatcctgagcggccaggaggagggcgtgttcggctgggtgaccgccaactacctgctggagaacttcatcaagtacggctgggtgggcagatggttcagacccagaaagggcaccctgggcgccatggacctgggcggcgccagcacccagatcaccttcgagaccaccagccccgccgaggacagagccagcgaggtgcagctgcacctgtacggccagcactacagagtgtacacccacagcttcctgtgctacggcagagaccaggtgctgcagagactgctggccagcgccctgcagacccacggcttccacccctgctggcccagaggcttcagcacccaggtgctgctgggcgacgtgtaccagagcccctgcaccatggcccagagaccccagaacttcaacagcagcgccagagtgagcctgagcggcagcagcgacccccacctgtgcagagacctggtgagcggcctgttcagcttcagcagctgccccttcagcagatgcagcttcaacggcgtgttccagccccccgtggccggcaacttcgtggccttcagcgccttcttctacaccgtggacttcctgagaaccagcatgggcctgcccgtggccaccctgcagcagctggaggccgccgccgtgaacgtgtgcaaccagacctgggcccagcagctgctgagcagaggctacggcttcgacgagagagccttcggcggcgtgatcttccagaagaaggccgccgacaccgccgtgggctgggccctgggctacatgctgaacctgaccaacctgatccccgccgacccccccggcctgagaaagggcaccgacttcagcagctgggtggtgctgctgctgctgttcgccagcgccctgctggccgccctggtgctgctgctgagacaggtgcacagcgccaagctgcccagcaccatctag

SEQ ID NO: 80099 - DNA, 1488 bp, synthetic construct
  misc_feature 1..1488: note = Description of Artificial Sequence: Synthetic coding sequence
  source 1..1488: mol_type = other DNA
atggccggcaaggtgagaagcctgctgccccccctgctgctggccgccgccggcctggccggcctgctgctgctgtgcgtgcccaccagagacgtgagagagccccccgccctgaagtacggcatcgtgctggacgccggcagcagccacaccagcatgttcatctacaagtggcccgccgacaaggagaacgacaccggcatcgtgggccagcacagcagctgcgacgtgcccggcggcggcatcagcagctacgccgacaaccccagcggcgccagccagagcctggtgggctgcctggagcaggccctgcaggacgtgcccaaggagagacacgccggcacccccctgtacctgggcgccaccgccggcatgagactgctgaacctgaccaaccccgaggccagcaccagcgtgctgatggccgtgacccacaccctgacccagtaccccttcgacttcagaggcgccagaatcctgagcggccaggaggagggcgtgttcggctgggtgaccgccaactacctgctggagaacttcatcaagtacggctgggtgggcagatggttcagacccagaaagggcaccctgggcgccatggacctgggcggcgccagcacccagatcaccttcgagaccaccagccccgccgaggacagagccagcgaggtgcagctgcacctgtacggccagcactacagagtgtacacccacagcttcctgtgctacggcagagaccaggtgctgcagagactgctggccagcgccctgcagacccacggcttccacccctgctggcccagaggcttcagcacccaggtgctgctgggcgacgtgtaccagagcccctgcaccatggcccagagaccccagaacttcaacagcagcgccagagtgagcctgagcggcagcagcgacccccacctgtgcagagacctggtgagcggcctgttcagcttcagcagctgccccttcagcagatgcagcttcaacggcgtgttccagccccccgtggccggcaacttcgtggccttcagcgccttcttctacaccgtggacttcctgagaaccagcatgggcctgcccgtggccaccctgcagcagctggaggccgccgccgtgaacgtgtgcaaccagacctgggcccagctgcaggccagagtgcccggccagagagccagactggccgactactgcgccggcgccatgttcgtgcagcagctgctgagcagaggctacggcttcgacgagagagccttcggcggcgtgatcttccagaagaaggccgccgacaccgccgtgggctgggccctgggctacatgctgaacctgaccaacctgatccccgccgacccccccggcctgagaaagggcaccgacttcagcagctgggtggtgctgctgctgctgttcgccagcgccctgctggccgccctggtgctgctgctgagacaggtgcacagcgccaagctgcccagcaccatctag

SEQ ID NO: 80100 - DNA, 1590 bp, synthetic construct
  misc_feature 1..1590: note = Description of Artificial Sequence: Synthetic coding sequence
  source 1..1590: mol_type = other DNA
atgttcaccgtgctgaccagacagccctgcgagcaggccggcctgaaggccctgtacagaacccccaccatcatcgccctggtggtgctgctggtgagcatcgtggtgctggtgagcatcaccgtgatccagatccacaagcaggaggtgctgccccccggcctgaagtacggcatcgtgctggacgccggcagcagcagaaccaccgtgtacgtgtaccagtggcccgccgagaaggagaacaacaccggcgtggtgagccagaccttcaagtgcagcgtgaagggcagcggcatcagcagctacggcaacaacccccaggacgtgcccagagccttcgaggagtgcatgcagaaggtgaagggccaggtgcccagccacctgcacggcagcacccccatccacctgggcgccaccgccggcatgagactgctgagactgcagaacgagaccgccgccaacgaggtgctggagagcatccagagctacttcaagagccagcccttcgacttcagaggcgcccagatcatcagcggccaggaggagggcgtgtacggctggatcaccgccaactacctgatgggcaacttcctggagaagaacctgtggcacatgtgggtgcacccccacggcgtggagaccaccggcgccctggacctgggcggcgccagcacccagatcagcttcgtggccggcgagaagatggacctgaacaccagcgacatcatgcaggtgagcctgtacggctacgtgtacaccctgtacacccacagcttccagtgctacggcagaaacgaggccgagaagaagttcctggccatgctgctgcagaacagccccaccaagaaccacctgaccaacccctgctaccccagagactacagcatcagcttcaccatgggccacgtgttcgacagcctgtgcaccgtggaccagagacccgagagctacaaccccaacgacgtgatcaccttcgagggcaccggcgaccccagcctgtgcaaggagaaggtggccagcatcttcgacttcaaggcctgccacgaccaggagacctgcagcttcgacggcgtgtaccagcccaagatcaagggccccttcgtggccttcgccggcttctactacaccgccagcgccctgaacctgagcggcagcttcagcctggacaccttcaacagcagcacctggaacttctgcagccagaactggagccagctgcccctgctgctgcccaagttcgacgaggtgtacgccagaagctactgcttcagcgccaactacatctaccacctgttcgtgaacggctacaagttcaccgaggagacctggccccagatccacttcgagaaggaggtgggcaacagcagcatcgcctggagcctgggctacatgctgagcctgaccaaccagatccccgccgagagccccctgatcagactgcccatcgagccccccgtgttcgtgggcaccctggccttcttcaccgccgccgccctgctgtgcctggccttcctggcctacctgtgcagcgccaccagaagaaagagacacagcgagcacgccttcgaccacgccgtggacagcgactag

SEQ ID NO: 80101 - DNA, 1590 bp, synthetic construct; identical to SEQ ID NO: 80100
  misc_feature 1..1590: note = Description of Artificial Sequence: Synthetic coding sequence
  source 1..1590: mol_type = other DNA

SEQ ID NO: 80102 - DNA, 1287 bp, synthetic construct
  misc_feature 1..1287: note = Description of Artificial Sequence: Synthetic coding sequence
  source 1..1287: mol_type = other DNA
atggccaccagctggggcaccgtgttcttcatgctggtggtgagctgcgtgtgcagcgccgtgagccacagaaaccagcagacctggttcgagggcatcttcctgagcagcatgtgccccatcaacgtgagcgccagcaccctgtacggcatcatgttcgacgccggcagcaccggcaccagaatccacgtgtacaccttcgtgcagaagatgcccggccagctgcccatcctggagggcgaggtgttcgacagcgtgaagcccggcctgagcgccttcgtggaccagcccaagcagggcgccgagaccgtgcagggcctgctggaggtggccaaggacagcatccccagaagccactggaagaagacccccgtggtgctgaaggccaccgccggcctgagactgctgcccgagcacaaggccaaggccctgctgttcgaggtgaaggagatcttcagaaagagccccttcctggtgcccaagggcagcgtgagcatcatggacggcagcgacgagggcatcctggcctgggtgaccgtgaacttcctgaccggccagctgcacggccacagacaggagaccgtgggcaccctggacctgggcggcgccagcacccagatcaccttcctgccccagttcgagaagaccctggagcagacccccagaggctacctgaccagcttcgagatgttcaacagcacctacaagctgtacacccacagctacctgggcttcggcctgaaggccgccagactggccaccctgggcgccctggagaccgagggcaccgacggccacaccttcagaagcgcctgcctgcccagatggctggaggccgagtggatcttcggcggcgtgaagtaccagtacggcggcaaccaggagggcgaggtgggcttcgagccctgctacgccgaggtgctgagagtggtgagaggcaagctgcaccagcccgaggaggtgcagagaggcagcttctacgccttcagctactactacgacagagccgtggacaccgacatgatcgactacgagaagggcggcatcctgaaggtggaggacttcgagagaaaggccagagaggtgtgcgacaacctggagaacttcaccagcggcagccccttcctgtgcatggacctgagctacatcaccgccctgctgaaggacggcttcggcttcgccgacagcaccgtgctgcagctgaccaagaaggtgaacaacatcgagaccggctgggccctgggcgccaccttccacctgctgcagagcctgggcatcagccactag

SEQ ID NO: 80103 - DNA, 1404 bp, synthetic construct
  misc_feature 1..1404: note = Description of Artificial Sequence: Synthetic coding sequence
  source 1..1404: mol_type = other DNA
atgcagccccagcacggcccctggcagaccagaatgagaaagatcagcaaccacggcagcctgagagtggccaaggtggcctaccccctgggcctgtgcgtgggcgtgttcatctacgtggcctacatcaagtggcacagagccaccgccacccaggccttcttcagcatcaccagagccgcccccggcgccagatggggccagcaggcccacagccccctgggcaccgccgccgacggccacgaggtgttctacggcatcatgttcgacgccggcagcaccggcaccagagtgcacgtgttccagttcaccagaccccccagagagacccccaccctgacccacgagaccttcaaggccctgaagcccggcctgagcgcctacgccgacgacgtggagaagagcgcccagggcatcagagagctgctggacgtggccaagcaggacatccccttcgacttctggaaggccacccccctggtgctgaaggccaccgccggcctgagactgctgcccggcgagaaggcccagaagctgctgcagaaggtgaagaaggtgttcaaggccagccccttcctggtgggcgacgactgcgtgagcatcatgaacggcaccgacgagggcgtgagcgcctggatcaccatcaacttcctgaccggcagcctgaagacccccggcggcagcagcgtgggcatgctggacctgggcggcggcagcacccagatcgccttcctgcccagagtggagggcaccctgcaggccagcccccccggctacctgaccgccctgagaatgttcaacagaacctacaagctgtacagctacagctacctgggcctgggcctgatgagcgccagactggccatcctgggcggcgtggagggccagcccgccaaggacggcaaggagctggtgagcccctgcctgagccccagcttcaagggcgagtgggagcacgccgaggtgacctacagagtgagcggccagaaggccgccgccagcctgcacgagctgtgcgccgccagagtgagcgaggtgctgcagaacagagtgcacagaaccgaggaggtgaagcacgtggacttctacgccttcagctactactacgacctggccgccggcgtgggcctgatcgacgccgagaagggcggcagcctggtggtgggcgacttcgagatcgccgccaagtacgtgtgcagaaccctggagacccagccccagagcagccccttcagctgcatggacctgacctacgtgagcctgctgctgcaggagttcggcttccccagaagcaaggtgctgaagctgaccagaaagatcgacaacgtggagaccagctgggccctgggcgccatcttccactacatcgacagcctgaacagacagaagagccccgccagctag

SEQ ID NO: 80104 - DNA, 1452 bp, synthetic construct
  misc_feature 1..1452: note = Description of Artificial Sequence: Synthetic coding sequence
  source 1..1452: mol_type = other DNA
atgaagaagggcatcagatacgagaccagcagaaagaccagctacatcttccagccccagcacggcccctggcagaccagaatgagaaagatcagcaaccacggcagcctgagagtggccaaggtggcctaccccctgggcctgtgcgtgggcgtgttcatctacgtggcctacatcaagtggcacagagccaccgccacccaggccttcttcagcatcaccagagccgcccccggcgccagatggggccagcaggcccacagccccctgggcaccgccgccgacggccacgaggtgttctacggcatcatgttcgacgccggcagcaccggcaccagagtgcacgtgttccagttcaccagaccccccagagagacccccaccctgacccacgagaccttcaaggccctgaagcccggcctgagcgcctacgccgacgacgtggagaagagcgcccagggcatcagagagctgctggacgtggccaagcaggacatccccttcgacttctggaaggccacccccctggtgctgaaggccaccgccggcctgagactgctgcccggcgagaaggcccagaagctgctgcagaaggtgaagaaggtgttcaaggccagccccttcctggtgggcgacgactgcgtgagcatcatgaacggcaccgacgagggcgtgagcgcctggatcaccatcaacttcctgaccggcagcctgaagacccccggcggcagcagcgtgggcatgctggacctgggcggcggcagcacccagatcgccttcctgcccagagtggagggcaccctgcaggccagcccccccggctacctgaccgccctgagaatgttcaacagaacctacaagctgtacagctacagctacctgggcctgggcctgatgagcgccagactggccatcctgggcggcgtggagggccagcccgccaaggacggcaaggagctggtgagcccctgcctgagccccagcttcaagggcgagtgggagcacgccgaggtgacctacagagtgagcggccagaaggccgccgccagcctgcacgagctgtgcgccgccagagtgagcgaggtgctgcagaacagagtgcacagaaccgaggaggtgaagcacgtggacttctacgccttcagctactactacgacctggccgccggcgtgggcctgatcgacgccgagaagggcggcagcctggtggtgggcgacttcgagatcgccgccaagtacgtgtgcagaaccctggagacccagccccagagcagccccttcagctgcatggacctgacctacgtgagcctgctgctgcaggagttcggcttccccagaagcaaggtgctgaagctgaccagaaagatcgacaacgtggagaccagctgggccctgggcgccatcttccactacatcgacagcctgaacagacagaagagccccgccagctag

SEQ ID NO: 80105 - DNA, 1104 bp, synthetic construct
  misc_feature 1..1104: note = Description of Artificial Sequence: Synthetic coding sequence
  source 1..1104: mol_type = other DNA
atgttcgacgccggcagcaccggcaccagagtgcacgtgttccagttcaccagaccccccagagagacccccaccctgacccacgagaccttcaaggccctgaagcccggcctgagcgcctacgccgacgacgtggagaagagcgcccagggcatcagagagctgctggacgtggccaagcaggacatccccttcgacttctggaaggccacccccctggtgctgaaggccaccgccggcctgagactgctgcccggcgagaaggcccagaagctgctgcagaaggtgaagaaggtgttcaaggccagccccttcctggtgggcgacgactgcgtgagcatcatgaacggcaccgacgagggcgtgagcgcctggatcaccatcaacttcctgaccggcagcctgaagacccccggcggcagcagcgtgggcatgctggacctgggcggcggcagcacccagatcgccttcctgcccagagtggagggcaccctgcaggccagcccccccggctacctgaccgccctgagaatgttcaacagaacctacaagctgtacagctacagctacctgggcctgggcctgatgagcgccagactggccatcctgggcggcgtggagggccagcccgccaaggacggcaaggagctggtgagcccctgcctgagccccagcttcaagggcgagtgggagcacgccgaggtgacctacagagtgagcggccagaaggccgccgccagcctgcacgagctgtgcgccgccagagtgagcgaggtgctgcagaacagagtgcacagaaccgaggaggtgaagcacgtggacttctacgccttcagctactactacgacctggccgccggcgtgggcctgatcgacgccgagaagggcggcagcctggtggtgggcgacttcgagatcgccgccaagtacggcggcagccacctggagagagagggcacctgcctgatccccagcgtgagcgaccccggcgacaccgccgccgagcagcccctgctgatgcacggcccccacctgagacagcccgccacccccggcgtgagactgagccaggagcagagcgccgaggcccacagcgagaactag

SEQ ID NO: 80106 - DNA, 1455 bp, synthetic construct
  misc_feature 1..1455: note = Description of Artificial Sequence: Synthetic coding sequence
  source 1..1455: mol_type = other DNA
atgaagaagggcatcagatacgagaccagcagaaagaccagctacatcttccagcagccccagcacggcccctggcagaccagaatgagaaagatcagcaaccacggcagcctgagagtggccaaggtggcctaccccctgggcctgtgcgtgggcgtgttcatctacgtggcctacatcaagtggcacagagccaccgccacccaggccttcttcagcatcaccagagccgcccccggcgccagatggggccagcaggcccacagccccctgggcaccgccgccgacggccacgaggtgttctacggcatcatgttcgacgccggcagcaccggcaccagagtgcacgtgttccagttcaccagaccccccagagagacccccaccctgacccacgagaccttcaaggccctgaagcccggcctgagcgcctacgccgacgacgtggagaagagcgcccagggcatcagagagctgctggacgtggccaagcaggacatccccttcgacttctggaaggccacccccctggtgctgaaggccaccgccggcctgagactgctgcccggcgagaaggcccagaagctgctgcagaaggtgaagaaggtgttcaaggccagccccttcctggtgggcgacgactgcgtgagcatcatgaacggcaccgacgagggcgtgagcgcctggatcaccatcaacttcctgaccggcagcctgaagacccccggcggcagcagcgtgggcatgctggacctgggcggcggcagcacccagatcgccttcctgcccagagtggagggcaccctgcaggccagcccccccggctacctgaccgccctgagaatgttcaacagaacctacaagctgtacagctacagctacctgggcctgggcctgatgagcgccagactggccatcctgggcggcgtggagggccagcccgccaaggacggcaaggagctggtgagcccctgcctgagccccagcttcaagggcgagtgggagcacgccgaggtgacctacagagtgagcggccagaaggccgccgccagcctgcacgagctgtgcgccgccagagtgagcgaggtgctgcagaacagagtgcacagaaccgaggaggtgaagcacgtggacttctacgccttcagctactactacgacctggccgccggcgtgggcctgatcgacgccgagaagggcggcagcctggtggtgggcgacttcgagatcgccgccaagtacgtgtgcagaaccctggagacccagccccagagcagccccttcagctgcatggacctgacctacgtgagcctgctgctgcaggagttcggcttccccagaagcaaggtgctgaagctgaccagaaagatcgacaacgtggagaccagctgggccctgggcgccatcttccactacatcgacagcctgaacagacagaagagccccgccagctag

SEQ ID NO: 80107 - DNA, 888 bp, synthetic construct
  misc_feature 1..888: note = Description of Artificial Sequence: Synthetic coding sequence
  source 1..888: mol_type = other DNA
tgagtgctgaaggccaccgccggcctgagactgctgcccggcgagaaggcccagaagctgctgcagaaggtgaagaaggtgttcaaggccagccccttcctggtgggcgacgactgcgtgagcatcatgaacggcaccgacgagggcgtgagcgcctggatcaccatcaacttcctgaccggcagcctgaagacccccggcggcagcagcgtgggcatgctggacctgggcggcggcagcacccagatcgccttcctgcccagagtggagggcaccctgcaggccagcccccccggctacctgaccgccctgagaatgttcaacagaacctacaagctgtacagctacagctacctgggcctgggcctgatgagcgccagactggccatcctgggcggcgtggagggccagcccgccaaggacggcaaggagctggtgagcccctgcctgagccccagcttcaagggcgagtgggagcacgccgaggtgacctacagagtgagcggccagaaggccgccgccagcctgcacgagctgtgcgccgccagagtgagcgaggtgctgcagaacagagtgcacagaaccgaggaggtgaagcacgtggacttctacgccttcagctactactacgacctggccgccggcgtgggcctgatcgacgccgagaagggcggcagcctggtggtgggcgacttcgagatcgccgccaagtacggcggcagccacctggagagagagggcacctgcctgatccccagcgtgagcgaccccggcgacaccgccgccgagcagcccctgctgatgcacggcccccacctgagacagcccgccacccccggcgtgagactgagccaggagcagagcgccgaggcccacagcgagaactag

SEQ ID NO: 80108 - DNA, 681 bp, synthetic construct
  misc_feature 1..681: note = Description of Artificial Sequence: Synthetic coding sequence
  source 1..681: mol_type = other DNA
atgccccagcacggcccctggcagaccagaatgagaaagatcagcaaccacggcagcctgagagtggccaaggtggcctaccccctgggcctgtgcgtgggcgtgttcatctacgtggcctacatcaagtggcacagagccaccgccacccaggccttcttcagcatcaccagagccgcccccggcgccagatggggccagcaggcccacagccccctgggcaccgccgccgacggccacgaggtgttctacggcatcatgttcgacgccggcagcaccggcaccagagtgcacgtgttccagttcaccagaccccccagagagacccccaccctgacccacgagaccttcaaggccctgaagcccggcctgagcgcctacgccgacgacgtggagaaggtgaagaaggtgttcaaggccagccccttcctggtgggcgacgactgcgtgagcatcatgaacggcaccgacgagggcgtgagcgcctggatcaccatcaacttcctgaccggcagcctgaagacccccggcggcagcagcgtgggcatgctggacctgggcggcggcagcacccagatcgccttcctgcccagagtggagggcaccctgcaggccagcccccccggctacctgaccgccctgagaatgttcaacagaacctacaagctgtacagctactag

SEQ ID NO: 80109 - DNA, 588 bp, synthetic construct
  misc_feature 1..588: note = Description of Artificial Sequence: Synthetic coding sequence
  source 1..588: mol_type = other DNA
atgcagccccagcacggcccctggcagaccagaatgagaaagatcagcaaccacggcagcctgagagtggccaaggtggcctaccccctgggcctgtgcgtgggcgtgttcatctacgtggcctacatcaagtggcacagagccaccgccacccaggccttcttcagcatcaccagagccgcccccggcgccagatggggccagcaggcccacagccccctgggcaccgccgccgacggccacgaggtgttctacggcatcatgttcgacgccggcagcaccggcaccagagtgcacgtgttccagttcaccagaccccccagagagacccccaccctgacccacgagaccttcaaggccctgaagcccggcctgagcgcctacgccgacgacgtggagaaggtgaagaaggtgttcaaggccagccccttcctggtgggcgacgactgcgtgagcatcatgaacggcaccgacgagggcgtgagcgcctggatcaccatcaacttcctgaccggcagcctgaagacccccggcggcagcagcgtgggcatgctggacctgggcggcggcagcacccagatcgcctag

SEQ ID NO: 80110 - DNA, 903 bp, synthetic construct
  misc_feature 1..903: note = Description of Artificial Sequence: Synthetic coding sequence
  source 1..903: mol_type = other DNA
atgaagaagggcatcagatacgagaccagcagaaagaccagctacatcttccagcagccccagcacggcccctggcagaccagaatgagaaagatcagcaaccacggcagcctgagagtggccaaggtggcctaccccctgggcctgtgcgtgggcgtgttcatctacgtggcctacatcaagtggcacagagccaccgccacccaggccttcttcagcatcaccagagccgcccccggcgccagatggggccagcaggcccacagccccctgggcaccgccgccgacggccacgaggtgttctacggcatcatgttcgacgccggcagcaccggcaccagagtgcacgtgttccagttcaccagaccccccagagagacccccaccctgacccacgagaccttcaaggccctgaagcccggcctgagcgcctacgccgacgacgtggagaaggtgaagaaggtgttcaaggccagccccttcctggtgggcgacgactgcgtgagcatcatgaacggcaccgacgagggcgtgagcgcctggatcaccatcaacttcctgaccggcagcctgaagacccccggcggcagcagcgtgggcatgctggacctgggcggcggcagcacccagatcgccttcctgcccagagtggagggcaccctgcaggccagcccccccggctacctgaccgccctgagaatgttcaacagaacctacaagctgtacagctacagctacctgggcctgggcctgatgagcgccagactggccatcctgggcggcgtggagggccagcccgccaaggacggcaaggagctggtgagcccctgcctgagccccagcttcaagggcgagtgggagcacgccgaggtgacctacagagtgagcggccagaaggcctag

SEQ ID NO: 80111 - DNA, 453 bp, synthetic construct
  misc_feature 1..453: note = Description of Artificial Sequence: Synthetic coding sequence
  source 1..453: mol_type = other DNA
tgacccggcagaggcagccccaaggacagactgccccccgcccccagaaagagagccctggtgagcgtgggcgtggccgagagagccgtgcacgagacccccaccctgacccacgagaccttcaaggccctgaagcccggcctgagcgcctacgccgacgacgtggagaaggtgaagaaggtgttcaaggccagccccttcctggtgggcgacgactgcgtgagcatcatgaacggcaccgacgagggcgtgagcgcctggatcaccatcaacttcctgaccggcagcctgaagacccccggcggcagcagcgtgggcatgctggacctgggcggcggcagcacccagatcgccttcctgcccagagtggagggcaccctgcaggccagcccccccggctacctgaccgccctgagaatgttcaacagaacctacaagctgtacagctactag

SEQ ID NO: 80112 - DNA, 1314 bp, synthetic construct
  misc_feature 1..1314: note = Description of Artificial Sequence: Synthetic coding sequence
  source 1..1314: mol_type = other DNA
atgaagaagggcatcagatacgagaccagcagaaagaccagctacatcttccagcagccccagcacggcccctggcagaccagaatgagaaagatcagcaaccacggcagcctgagagtggccaaggtggcctaccccctgggcctgtgcgtgggcgtgttcatctacgtggcctacatcaagtggcacagagccaccgccacccaggccttcttcagcatcaccagagccgcccccggcgccagatggggccagcaggcccacagccccctgggcaccgccgccgacggccacgaggtgttctacggcatcatgttcgacgccggcagcaccggcaccagagtgcacgtgttccagttcaccagaccccccagagagacccccaccctgacccacgagaccttcaaggccctgaagcccggcctgagcgcctacgccgacgacgtggagaagagcgcccagggcatcagagagctgctggacgtggccaagcaggacatccccttcgacttctggaaggccacccccctggtgctgaaggccaccgccggcctgagactgctgcccggcgagaaggcccagaagctgctgcagaaggtgaagaaggtgttcaaggccagccccttcctggtgggcgacgactgcgtgagcatcatgaacggcaccgacgagggcgtgagcgcctggatcaccatcaacttcctgaccggcagcctgaagacccccggcggcagcagcgtgggcatgctggacctgggcggcggcagcacccagatcgccttcctgcccagagtggagggcaccctgcaggccagcccccccggctacctgaccgccctgagaatgttcaacagaacctacaagctgtacagctacagctacctgggcctgggcctgatgagcgccagactggccatcctgggcggcgtggagggccagcccgccgccagcctgcacgagctgtgcgccgccagagtgagcgaggtgctgcagaacagagtgcacagaaccgaggaggtgaagcacgtggacttctacgccttcagctactactacgacctggccgccggcgtgggcctgatcgacgccgagaagggcggcagcctggtggtgggcgacttcgagatcgccgccaagtacggcggcagccacctggagagagagggcacctgcctgatccccagcgtgagcgaccccggcgacaccgccgccgagcagcccctgctgatgcacggcccccacctgagacagcccgccacccccggcgtgagactgagccaggagcagagcgccgaggcccacagcgagaactag

SEQ ID NO: 80113 - DNA, 945 bp, synthetic construct
  misc_feature 1..945: note = Description of Artificial Sequence: Synthetic coding sequence
  source 1..945: mol_type = other DNA
tgaaacagaggcgtggtgagcagaggctggagacccggctggagaagacccggcagaggcagccccaaggacagactgccccccgcccccagaaagagagccctggtgagcgtgggcgtggccgagagagccgtgcacgagacccccaccctgacccacgagaccttcaaggccctgaagcccggcctgagcgcctacgccgacgacgtggagaagagcgcccagggcatcagagagctgctggacgtggccaagcaggacatccccttcgacttctggaaggccacccccctggtgctgaaggccaccgccggcctgagactgctgcccggcgagaaggcccagaagctgctgcagaaggtgaagaaggtgttcaaggccagccccttcctggtgggcgacgactgcgtgagcatcatgaacggcaccgacgagggcgtgagcgcctggatcaccatcaacttcctgaccggcagcctgaagacccccggcggcagcagcgtgggcatgctggacctgggcggcggcagcacccagatcgccttcctgcccagagtggagggcaccctgcaggccagcccccccggctacctgaccgccctgagaatgttcaacagaacctacaagctgtacagctacagctacctgggcctgggcctgatgagcgccagactggccatcctgggcggcgtggagggccagcccgccaaggacggcaaggagctggtgagcccctgcctgagccccagcttcaagggcgagtgggagcacgccgaggtgacctacagagtgagcggccagaaggccgccgccagcctgcacgagctgtgcgccgccagagtgagcgaggtgctgcagaacagagtgcacagaaccgaggaggtgaagcacgtggacttctacgccttcagctactactacgacctggccgccggcgtgggctag

SEQ ID NO: 80114 - DNA, 567 bp, synthetic construct
  misc_feature 1..567: note = Description of Artificial Sequence: Synthetic coding sequence
  source 1..567: mol_type = other DNA
atgaagaagggcatcagatacgagaccagcagaaagaccagctacatcttccagccccagcacggcccctggcagaccagaatgagaaagatcagcaaccacggcagcctgagagtggccaaggtggcctaccccctgggcctgtgcgtgggcgtgttcatctacgtggcctacatcaagtggcacagagccaccgccacccaggccttcttcagcatcaccagagccgcccccggcgccagatggggccagcaggcccacagccccctgggcaccgccgccgacggccacgaggtgttctacggcatcatgttcgacgccggcagcaccggcaccagagtgcacgtgttccagttcaccagaccccccagagagacccccaccctgacccacgagaccttcaaggccctgaagcccggcctgagcgcctacgccgacgacgtggagaagagcgcccagggcatcagagagctgctggacgtggccaagcaggacatccccttcgacttctggaaggccacccccctggtgctgaaggccaccgccggcctgagactgctgccctag

SEQ ID NO: 80115 - DNA, 891 bp, synthetic construct
  misc_feature 1..891: note = Description of Artificial Sequence: Synthetic coding sequence
  source 1..891: mol_type = other DNA
atgccccagcacggcccctggcagaccagaatgagaaagatcagcaaccacggcagcctgagagtggccaaggtggcctaccccctgggcctgtgcgtgggcgtgttcatctacgtggcctacatcaagtggcacagagccaccgccacccaggccttcttcagcatcaccagagccgcccccggcgccagatggggccagcaggcccacagccccctgggcaccgccgccgacggccacgaggtgttctacggcatcatgttcgacgccggcagcaccggcaccagagtgcacgtgttccagttcaccagaccccccagagagacccccaccctgacccacgagaccttcaaggccctgaagcccggcctgagcgcctacgccgacgacgtggagaagagcgcccagggcatcagagagctgctggacgtggccaagcaggacatccccttcgacttctggaaggccacccccctggtgctgaaggccaccgccggcctgagactgctgcccggcgagaaggcccagaagctgctgcagaaggtgaagaaggtgttcaaggccagccccttcctggtgggcgacgactgcgtgagcatcatgaacggcaccgacgagggcgtgagcgcctggatcaccatcaacttcctgaccggcagcctgaagacccccggcggcagcagcgtgggcatgctggacctgggcggcggcagcacccagatcgccttcctgcccagagtggagggcaccctgcaggccagcccccccggctacctgaccgccctgagaatgttcaacagaacctacaagctgtacagctacagctacctgggcctgggcctgatgagcgccagactggccatcctgggcggcgtggagggccagccctag

SEQ ID NO: 80116 - DNA, 936 bp, synthetic construct
  misc_feature 1..936: note = Description of Artificial Sequence: Synthetic coding sequence
  source 1..936: mol_type = other DNA
tgaggcagcaccggcaccagagtgcacgtgttccagttcaccagaccccccagagagacccccaccctgacccacgagaccttcaaggccctgaagcccggcctgagcgcctacgccgacgacgtggagaagagcgcccagggcatcagagagctgctggacgtggccaagcaggacatccccttcgacttctggaaggccacccccctggtgctgaaggccaccgccggcctgagactgctgcccggcgagaaggcccagaagctgctgcagaaggtgaagaaggtgttcaaggccagccccttcctggtgggcgacgactgcgtgagcatcatgaacggcaccgacgagggcgtgagcgcctggatcaccatcaacttcctgaccggcagcctgaagacccccggcggcagcagcgtgggcatgctggacctgggcggcggcagcacccagatcgccttcctgcccagagtggagggcaccctgcaggccagcccccccggctacctgaccgccctgagaatgttcaacagaacctacaagctgtacagctacagctacctgggcctgggcctgatgagcgccagactggccatcctgggcggcgtggagggccagcccgccgccagcctgcacgagctgtgcgccgccagagtgagcgaggtgctgcagaacagagtgcacagaaccgaggaggtgaagcacgtggacttctacgccttcagctactactacgacctggccgccggcgtgggcctgatcgacgccgagaagggcggcagcctggtggtgggcgacttcgagatcgccgccaagtacgtgtgcagaaccctggagacccagccccagagcagccccttcagctgcatggacctgacctacgtgagcctgctgctgcaggagttcggcttccccagaagcaaggtgctgaagtag

SEQ ID NO: 80117 - DNA, 942 bp, synthetic construct
  misc_feature 1..942: note = Description of Artificial Sequence: Synthetic coding sequence
  source 1..942: mol_type = other DNA
aacagaggcgtggtgagcagaggctggagacccggctggagaagacccggcagaggcagccccaaggacagactgccccccgcccccagaaagagagccctggtgagcgtgggcgtggccgagagagccgtgcacgagacccccaccctgacccacgagaccttcaaggccctgaagcccggcctgagcgcctacgccgacgacgtggagaagagcgcccagggcatcagagagctgctggacgtggccaagcaggacatccccttcgacttctggaaggccacccccctggtgctgaaggccaccgccggcctgagactgctgcccggcgagaaggcccagaagctgctgcagaaggtgaagaaggtgttcaaggccagccccttcctggtgggcgacgactgcgtgagcatcatgaacggcaccgacgagggcgtgagcgcctggatcaccatcaacttcctgaccggcagcctgaagacccccggcggcagcagcgtgggcatgctggacctgggcggcggcagcacccagatcgccttcctgcccagagtggagggcaccctgcaggccagcccccccggctacctgaccgccctgagaatgttcaacagaacctacaagctgtacagctacagctacctgggcctgggcctgatgagcgccagactggccatcctgggcggcgtggagggccagcccgccaaggacggcaaggagctggtgagcccctgcctgagccccagcttcaagggcgagtgggagcacgccgaggtgacctacagagtgagcggccagaaggccgccgccagcctgcacgagctgtgcgccgccagagtgagcgaggtgctgcagaacagagtgcacagaaccgaggaggtgaagcacgtggacttctacgccttcagctactactacgacctggccgccggcgtgggctag

SEQ ID NO: 80118 - DNA, 2778 bp, synthetic construct
  misc_feature 1..2778: note = Description of Artificial Sequence: Synthetic coding sequence
  source 1..2778: mol_type = other DNA
atggagagagacggctgcgccggcggcggcagcagaggcggcgagggcggcagagcccccagagagggccccgccggcaacggcagagacagaggcagaagccacgccgccgaggcccccggcgacccccaggccgccgccagcctgctggcccccatggacgtgggcgaggagcccctggagaaggccgccagagccagaaccgccaaggaccccaacacctacaaggtgctgagcctggtgctgagcgtgtgcgtgctgaccaccatcctgggctgcatcttcggcctgaagcccagctgcgccaaggaggtgaagagctgcaagggcagatgcttcgagagaaccttcggcaactgcagatgcgacgccgcctgcgtggagctgggcaactgctgcctggactaccaggagacctgcatcgagcccgagcacatctggacctgcaacaagttcagatgcggcgagaagagactgaccagaagcctgtgcgcctgcagcgacgactgcaaggacaagggcgactgctgcatcaactacagcagcgtgtgccagggcgagaagagctgggtggaggagccctgcgagagcatcaacgagccccagtgccccgccggcttcgagaccccccccaccctgctgttcagcctggacggcttcagagccgagtacctgcacacctggggcggcctgctgcccgtgatcagcaagctgaagaagtgcggcacctacaccaagaacatgagacccgtgtaccccaccaagaccttccccaaccactacagcatcgtgaccggcctgtaccccgagagccacggcatcatcgacaacaagatgtacgaccccaagatgaacgccagcttcagcctgaagagcaaggagaagttcaaccccgagtggtacaagggcgagcccatctgggtgaccgccaagtaccagggcctgaagagcggcaccttcttctggcccggcagcgacgtggagatcaacggcatcttccccgacatctacaagatgtacaacggcagcgtgcccttcgaggagagaatcctggccgtgctgcagtggctgcagctgcccaaggacgagagaccccacttctacaccctgtacctggaggagcccgacagcagcggccacagctacggccccgtgagcagcgaggtgatcaaggccctgcagagagtggacggcatggtgggcatgctgatggacggcctgaaggagctgaacctgcacagatgcctgaacctgatcctgatcagcgaccacggcatggagcagggcagctgcaagaagtacatctacctgaacaagtacctgggcgacgtgaagaacatcaaggtgatctacggccccgccgccagactgagacccagcgacgtgcccgacaagtactacagcttcaactacgagggcatcgccagaaacctgagctgcagagagcccaaccagcacttcaagccctacctgaagcacttcctgcccaagagactgcacttcgccaagagcgacagaatcgagcccctgaccttctacctggacccccagtggcagctggccctgaaccccagcgagagaaagtactgcggcagcggcttccacggcagcgacaacgtgttcagcaacatgcaggccctgttcgtgggctacggccccggcttcaagcacggcatcgaggccgacaccttcgagaacatcgaggtgtacaacctgatgtgcgacctgctgaacctgacccccgcccccaacaacggcacccacggcagcctgaaccacctgctgaagaaccccgtgtacacccccaagcaccccaaggaggtgcaccccctggtgcagtgccccttcaccagaaaccccagagacaacctgggctgcagctgcaaccccagcatcctgcccatcgaggacttccagacccagttcaacctgaccgtggccgaggagaagatcatcaagcacgagaccctgccctacggcagacccagagtgctgcagaaggagaacaccatctgcctgctgagccagcaccagttcatgagcggctacagccaggacatcctgatgcccctgtggaccagctacaccgtggacagaaacgacagcttcagcaccgaggacttcagcaactgcctgtaccaggacttcagaatccccctgagccccgtgcacaagtgcagcttctacaagaacaacaccaaggtgagctacggcttcctgagccccccccagctgaacaagaacagcagcggcatctacagcgaggccctgctgaccaccaacatcgtgcccatgtaccagagcttccaggtgatctggagatacttccacgacaccctgctgagaaagtacgccgaggagagaaacggcgtgaacgtggtgagcggccccgtgttcgacttcgactacgacggcagatgcgacagcctggagaacctgagacagaagagaagagtgatcagaaaccaggagatcctgatccccacccacttcttcatcgtgctgaccagctgcaaggacaccagccagacccccctgcactgcgagaacctggacaccctggccttcatcctgccccacagaaccgacaacagcgagagctgcgtgcacggcaagcacgacagcagctgggtggaggagctgctgatgctgcacagagccagaatcaccgacgtggagcacatcaccggcctgagcttctaccagcagagaaaggagcccgtgagcgacatcctgaagctgaagacccacctgcccaccttcagccaggaggactag

SEQ ID NO: 80119 - DNA, 2592 bp, synthetic construct
  misc_feature 1..2592: note = Description of Artificial Sequence: Synthetic coding sequence
  source 1..2592: mol_type = other DNA
atggccagaagaagcagcttccagagctgccagatcatcagcctgttcaccttcgccgtgggcgtgaacatctgcctgggcttcaccgcccacagaatcaagagagccgagggctgggaggagggcccccccaccgtgctgagcgacagcccctggaccaacatcagcggcagctgcaagggcagatgcttcgagctgcaggaggccggcccccccgactgcagatgcgacaacctgtgcaagagctacaccagctgctgccacgacttcgacgagctgtgcctgaagaccgccagaggctgggagtgcaccaaggacagatgcggcgaggtgagaaacgaggagaacgcctgccactgcagcgaggactgcctggccagaggcgactgctgcaccaactaccaggtggtgtgcaagggcgagagccactgggtggacgacgactgcgaggagatcaaggccgccgagtgccccgccggcttcgtgagaccccccctgatcatcttcagcgtggacggcttcagagccagctacatgaagaagggcagcaaggtgatgcccaacatcgagaagctgagaagctgcggcacccacagcccctacatgagacccgtgtaccccaccaagaccttccccaacctgtacaccctggccaccggcctgtaccccgagagccacggcatcgtgggcaacagcatgtacgaccccgtgttcgacgccaccttccacctgagaggcagagagaagttcaaccacagatggtggggcggccagcccctgtggatcaccgccaccaagcagggcgtgaaggccggcaccttcttctggagcgtggtgatcccccacgagagaagaatcctgaccatcctgcagtggctgaccctgcccgaccacgagagacccagcgtgtacgccttctacagcgagcagcccgacttcagcggccacaagtacggccccttcggccccgagatgaccaaccccctgagagagatcgacaagatcgtgggccagctgatggacggcctgaagcagctgaagctgcacagatgcgtgaacgtgatcttcgtgggcgaccacggcatggaggacgtgacctgcgacagaaccgagttcctgagcaactacctgaccaacgtggacgacatcaccctggtgcccggcaccctgggcagaatcagaagcaagttcagcaacaacgccaagtacgaccccaaggccatcatcgccaacctgacctgcaagaagcccgaccagcacttcaagccctacctgaagcagcacctgcccaagagactgcactacgccaacaacagaagaatcgaggacatccacctgctggtggagagaagatggcacgtggccagaaagcccctggacgtgtacaagaagcccagcggcaagtgcttcttccagggcgaccacggcttcgacaacaaggtgaacagcatgcagaccgtgttcgtgggctacggcagcaccttcaagtacaagaccaaggtgccccccttcgagaacatcgagctgtacaacgtgatgtgcgacctgctgggcctgaagcccgcccccaacaacggcacccacggcagcctgaaccacctgctgagaaccaacaccttcagacccaccatgcccgaggaggtgaccagacccaactaccccggcatcatgtacctgcagagcgacttcgacctgggctgcacctgcgacgacaaggtggagcccaagaacaagctggacgagctgaacaagagactgcacaccaagggcagcaccgaggagagacacctgctgtacggcagacccgccgtgctgtacagaaccagatacgacatcctgtaccacaccgacttcgagagcggctacagcgagatcttcctgatgcccctgtggaccagctacaccgtgagcaagcaggccgaggtgagcagcgtgcccgaccacctgaccagctgcgtgagacccgacgtgagagtgagccccagcttcagccagaactgcctggcctacaagaacgacaagcagatgagctacggcttcctgttccccccctacctgagcagcagccccgaggccaagtacgacgccttcctggtgaccaacatggtgcccatgtaccccgccttcaagagagtgtggaactacttccagagagtgctggtgaagaagtacgccagcgagagaaacggcgtgaacgtgatcagcggccccatcttcgactacgactacgacggcctgcacgacaccgaggacaagatcaagcagtacgtggagggcagcagcatccccgtgcccacccactactacagcatcatcaccagctgcctggacttcacccagcccgccgacaagtgcgacggccccctgagcgtgagcagcttcatcctgccccacagacccgacaacgaggagagctgcaacagcagcgaggacgagagcaagtgggtggaggagctgatgaagatgcacaccgccagagtgagagacatcgagcacctgaccagcctggacttcttcagaaagaccagcagaagctaccccgagatcctgaccctgaagacctacctgcacacctacgagagcgagatctag

SEQ ID NO: 80120 - DNA, 2748 bp, synthetic construct
  misc_feature 1..2748: note = Description of Artificial Sequence: Synthetic coding sequence
  source 1..2748: mol_type = other DNA
atggccagaagaagcagcttccagagctgccagatcatcagcctgttcaccttcgccgtgggcgtgaacatctgcctgggcttcaccgcccacagaatcaagagagccgagggctgggaggagggcccccccaccgtgctgagcgacagcccctggaccaacatcagcggcagctgcaagggcagatgcttcgagctgcaggaggccggcccccccgactgcagatgcgacaacctgtgcaagagctacaccagctgctgccacgacttcgacgagctgtgcctgaagaccgccagaggctgggagtgcaccaaggacagatgcggcgaggtgagaaacgaggagaacgcctgccactgcagcgaggactgcctggccagaggcgactgctgcaccaactaccaggtggtgtgcaagggcgagagccactgggtggacgacgactgcgaggagatcaaggccgccgagtgccccgccggcttcgtgagaccccccctgatcatcttcagcgtggacggcttcagagccagctacatgaagaagggcagcaaggtgatgcccaacatcgagaagctgagaagctgcggcacccacagcccctacatgagacccgtgtaccccaccaagaccttccccaacctgtacaccctggccaccggcctgtaccccgagagccacggcatcgtgggcaacagcatgtacgaccccgtgttcgacgccaccttccacctgagaggcagagagaagttcaaccacagatggtggggcggccagcccctgtggatcaccgccaccaagcagggcgtgaaggccggcaccttcttctggagcgtggtgatcccccacgagagaagaatcctgaccatcctgcagtggctgaccctgcccgaccacgagagacccagcgtgtacgccttctacagcgagcagcccgacttcagcggccacaagtacggccccttcggccccgaggagagcagctacggcagccccttcacccccgccaagagacccaagagaaaggtggcccccaagagaagacaggagagacccgtggccccccccaagaagagaagaagaaagatccacagaatggaccactacgccgccgagaccagacaggacaagatgaccaaccccctgagagagatcgacaagatcgtgggccagctgatggacggcctgaagcagctgaagctgcacagatgcgtgaacgtgatcttcgtgggcgaccacggcatggaggacgtgacctgcgacagaaccgagttcctgagcaactacctgaccaacgtggacgacatcaccctggtgcccggcaccctgggcagaatcagaagcaagttcagcaacaacgccaagtacgaccccaaggccatcatcgccaacctgacctgcaagaagcccgaccagcacttcaagccctacctgaagcagcacctgcccaagagactgcactacgccaacaacagaagaatcgaggacatccacctgctggtggagagaagatggcacgtggccagaaagcccctggacgtgtacaagaagcccagcggcaagtgcttcttccagggcgaccacggcttcgacaacaaggtgaacagcatgcagaccgtgttcgtgggctacggcagcaccttcaagtacaagaccaaggtgccccccttcgagaacatcgagctgtacaacgtgatgtgcgacctgctgggcctgaagcccgcccccaacaacggcacccacggcagcctgaaccacctgctgagaaccaacaccttcagacccaccatgcccgaggaggtgaccagacccaactaccccggcatcatgtacctgcagagcgacttcgacctgggctgcacctgcgacgacaaggtggagcccaagaacaagctggacgagctgaacaagagactgcacaccaagggcagcaccgaggagagacacctgctgtacggcagacccgccgtgctgtacagaaccagatacgacatcctgtaccacaccgacttcgagagcggctacagcgagatcttcctgatgcccctgtggaccagctacaccgtgagcaagcaggccgaggtgagcagcgtgcccgaccacctgaccagctgcgtgagacccgacgtgagagtgagccccagcttcagccagaactgcctggcctacaagaacgacaagcagatgagctacggcttcctgttccccccctacctgagcagcagccccgaggccaagtacgacgccttcctggtgaccaacatggtgcccatgtaccccgccttcaagagagtgtggaactacttccagagagtgctggtgaagaagtacgccagcgagagaaacggcgtgaacgtgatcagcggccccatcttcgactacgactacgacggcctgcacgacaccgaggacaagatcaagcagtacgtggagggcagcagcatccccgtgcccacccactactacagcatcatcaccagctgcctggacttcacccagcccgccgacaagtgcgacggccccctgagcgtgagcagcttcatcctgccccacagacccgacaacgaggagagctgcaacagcagcgaggacgagagcaagtgggtggaggagctgatgaagatgcacaccgccagagtgagagacatcgagcacctgaccagcctggacttcttcagaaagaccagcagaagctaccccgagatcctgaccctgaagacctacctgcacacctacgagagcgagatctag

SEQ ID NO: 80121 - DNA, 2667 bp, synthetic construct
  misc_feature 1..2667: note = Description of Artificial Sequence: Synthetic coding sequence
  source 1..2667: mol_type = other DNA
atggccagaagaagcagcttccagagctgccagatcatcagcctgttcaccttcgccgtgggcgtgaacatctgcctgggcttcaccgcccacagaatcaagagagccgagggctgggaggagggcccccccaccgtgctgagcgacagcccctggaccaacatcagcggcagctgcaagggcagatgcttcgagctgcaggaggccggcccccccgactgcagatgcgacaacctgtgcaagagctacaccagctgctgccacgacttcgacgagctgtgcctgaagaccgccagaggctgggagtgcaccaaggacagatgcggcgaggtgagaaacgaggagaacgcctgccactgcagcgaggactgcctggccagaggcgactgctgcaccaactaccaggtggtgtgcaagggcgagagccactgggtggacgacgactgcgaggagatcaaggccgccgagtgccccgccggcttcgtgagaccccccctgatcatcttcagcgtggacggcttcagagccagctacatgaagaagggcagcaaggtgatgcccaacatcgagaagctgagaagctgcggcacccacagcccctacatgagacccgtgtaccccaccaagaccttccccaacctgtacaccctggccaccggcctgtaccccgagagccacggcatcgtgggcaacagcatgtacgaccccgtgttcgacgccaccttccacctgagaggcagagagaagttcaaccacagatggtggggcggccagcccctgtggatcaccgccaccaagcagggcgtgaaggccggcaccttcttctggagcgtggtgatcccccacgagagaagaatcctgaccatcctgcagtggctgaccctgcccgaccacgagagacccagcgtgtacgccttctacagcgagcagcccgacttcagcggccacaagtacggccccttcggccccgagatgaccaaccccctgagagagatcgacaagatcgtgggccagctgatggacggcctgaagcagctgaagctgcacagatgcgtgaacgtgatcttcgtgggcgaccacggcatggaggacgtgacctgcgacagaaccgagttcctgagcaactacctgaccaacgtggacgacatcaccctggtgcccggcaccctgggcagaatcagaagcaagttcagcaacaacgccaagtacgaccccaaggccatcatcgccaacctgacctgcaagaagcccgaccagcacttcaagccctacctgaagcagcacctgcccaagagactgcactacgccaacaacagaagaatcgaggacatccacctgctggtggagagaagatggcacgtggccagaaagcccctggacgtgtacaagaagcccagcggcaagtgcttcttccagggcgaccacggcttcgacaacaaggtgaacagcatgcagaccgtgttcgtgggctacggcagcaccttcaagtacaagaccaaggtgccccccttcgagaacatcgagctgtacaacgtgatgtgcgacctgctgggcctgaagcccgcccccaacaacggcacccacggcagcctgaaccacctgctgagaaccaacaccttcagacccaccatgcccgaggaggtgaccagacccaactaccccggcatcatgtacctgcagagcgacttcgacctgggctgcacctgcgacgacaaggtggagcccaagaacaagctggacgagctgaacaagagactgcacaccaagggcagcaccgaggccgagaccagaaagttcagaggcagcagaaacgagaacaaggagaacatcaacggcaacttcgagcccagaaaggagagacacctgctgtacggcagacccgccgtgctgtacagaaccagatacgacatcctgtaccacaccgacttcgagagcggctacagcgagatcttcctgatgcccctgtggaccagctacaccgtgagcaagcaggccgaggtgagcagcgtgcccgaccacctgaccagctgcgtgagacccgacgtgagagtgagccccagcttcagccagaactgcctggcctacaagaacgacaagcagatgagctacggcttcctgttccccccctacctgagcagcagccccgaggccaagtacgacgccttcctggtgaccaacatggtgcccatgtaccccgccttcaagagagtgtggaactacttccagagagtgctggtgaagaagtacgccagcgagagaaacggcgtgaacgtgatcagcggccccatcttcgactacgactacgacggcctgcacgacaccgaggacaagatcaagcagtacgtggagggcagcagcatccccgtgcccacccactactacagcatcatcaccagctgcctggacttcacccagcccgccgacaagtgcgacggccccctgagcgtgagcagcttcatcctgccccacagacccgacaacgaggagagctgcaacagcagcgaggacgagagcaagtgggtggaggagctgatgaagatgcacaccgccagagtgagagacatcgagcacctgaccagcctggacttcttcagaaagaccagcagaagctaccccgagatcctgaccctgaagacctacctgcacacctacgagagcgagatctag

SEQ ID NO: 80122 - DNA, 2628 bp, synthetic construct
  misc_feature 1..2628: note = Description of Artificial Sequence: Synthetic coding sequence
  source 1..2628: mol_type = other DNA
atggagagcaccctgaccctggccaccgagcagcccgtgaagaagaacaccctgaagaagtacaagatcgcctgcatcgtgctgctggccctgctggtgatcatgagcctgggcctgggcctgggcctgggcctgagaaagctggagaagcagggcagctgcagaaagaagtgcttcgacgccagcttcagaggcctggagaactgcagatgcgacgtggcctgcaaggacagaggcgactgctgctgggacttcgaggacacctgcgtggagagcaccagaatctggatgtgcaacaagttcagatgcggcgagaccagactggaggccagcctgtgcagctgcagcgacgactgcctgcagagaaaggactgctgcgccgactacaagagcgtgtgccagggcgagaccagctggctggaggagaactgcgacaccgcccagcagagccagtgccccgagggcttcgacctgccccccgtgatcctgttcagcatggacggcttcagagccgagtacctgtacacctgggacaccctgatgcccaacatcaacaagctgaagacctgcggcatccacagcaagtacatgagagccatgtaccccaccaagaccttccccaaccactacaccatcgtgaccggcctgtaccccgagagccacggcatcatcgacaacaacatgtacgacgtgaacctgaacaagaacttcagcctgagcagcaaggagcagaacaaccccgcctggtggcacggccagcccatgtggctgaccgccatgtaccagggcctgaaggccgccacctacttctggcccggcagcgaggtggccatcaacggcagcttccccagcatctacatgccctacaacggcagcgtgcccttcgaggagagaatcagcaccctgctgaagtggctggacctgcccaaggccgagagacccagattctacaccatgtacttcgaggagcccgacagcagcggccacgccggcggccccgtgagcgccagagtgatcaaggccctgcaggtggtggaccacgccttcggcatgctgatggagggcctgaagcagagaaacctgcacaactgcgtgaacatcatcctgctggccgaccacggcatggaccagacctactgcaacaagatggagtacatgaccgactacttccccagaatcaacttcttctacatgtacgagggccccgcccccagaatcagagcccacaacatcccccacgacttcttcagcttcaacagcgaggagatcgtgagaaacctgagctgcagaaagcccgaccagcacttcaagccctacctgacccccgacctgcccaagagactgcactacgccaagaacgtgagaatcgacaaggtgcacctgttcgtggaccagcagtggctggccgtgagaagcaagagcaacaccaactgcggcggcggcaaccacggctacaacaacgagttcagaagcatggaggccatcttcctggcccacggccccagcttcaaggagaagaccgaggtggagcccttcgagaacatcgaggtgtacaacctgatgtgcgacctgctgagaatccagcccgcccccaacaacggcacccacggcagcctgaaccacctgctgaaggtgcccttctacgagcccagccacgccgaggaggtgagcaagttcagcgtgtgcggcttcgccaaccccctgcccaccgagagcctggactgcttctgcccccacctgcagaacagcacccagctggagcaggtgaaccagatgctgaacctgacccaggaggagatcaccgccaccgtgaaggtgaacctgcccttcggcagacccagagtgctgcagaagaacgtggaccactgcctgctgtaccacagagagtacgtgagcggcttcggcaaggccatgagaatgcccatgtggagcagctacaccgtgccccagctgggcgacaccagccccctgccccccaccgtgcccgactgcctgagagccgacgtgagagtgccccccagcgagagccagaagtgcagcttctacctggccgacaagaacatcacccacggcttcctgtacccccccgccagcaacagaaccagcgacagccagtacgacgccctgatcaccagcaacctggtgcccatgtacgaggagttcagaaagatgtgggactacttccacagcgtgctgctgatcaagcacgccaccgagagaaacggcgtgaacgtggtgagcggccccatcttcgactacaactacgacggccacttcgacgcccccgacgagatcaccaagcacctggccaacaccgacgtgcccatccccacccactacttcgtggtgctgaccagctgcaagaacaagagccacacccccgagaactgccccggctggctggacgtgctgcccttcatcatcccccacagacccaccaacgtggagagctgccccgagggcaagcccgaggccctgtgggtggaggagagattcaccgcccacatcgccagagtgagagacgtggagctgctgaccggcctggacttctaccaggacaaggtgcagcccgtgagcgagatcctgcagctgaagacctacctgcccaccttcgagaccaccatctag

SEQ ID NO: 80123 - DNA, 1992 bp, synthetic construct
  misc_feature 1..1992: note = Description of Artificial Sequence: Synthetic coding sequence
  source 1..1992: mol_type = other DNA
atggagagcaccctgaccctggccaccgagcagcccgtgaagaagaacaccctgaagaagtacaagatcgcctgcatcgtgctgctggccctgctggtgatcatgagcctgggcctgggcctgggcctgggcctgagaaagctggagaagcagggcagctgcagaaagaagtgcttcgacgccagcttcagaggcctggagaactgcagatgcgacgtggcctgcaaggacagaggcgactgctgctgggacttcgaggacacctgcgtggagagcaccagaatctggatgtgcaacaagttcagatgcggcgagaccagactggaggccagcctgtgcagctgcagcgacgactgcctgcagagaaaggactgctgcgccgactacaagagcgtgtgccagggcgagaccagctggctggaggagaactgcgacaccgcccagcagagccagtgccccgagggcttcgacctgccccccgtgatcctgttcagcatggacggcttcagagccgagtacctgtacacctgggacaccctgatgcccaacatcaacaagctgaagacctgcggcatccacagcaagtacatgagagccatgtaccccaccaagaccttccccaaccactacaccatcgtgaccggcctgtaccccgagagccacggcatcatcgacaacaacatgtacgacgtgaacctgaacaagaacttcagcctgagcagcaaggagcagaacaaccccgcctggtggcacggccagcccatgtggctgaccgccatgtaccagggcctgaaggccgccacctacttctggcccggcagcgaggtggccatcaacggcagcttccccagcatctacatgccctacaacggcagcgtgcccttcgaggagagaatcagcaccctgctgaagtggctggacctgcccaaggccgagagacccagattctacaccatgtacttcgaggagcccgacagcagcggccacgccggcggccccgtgagcgccagagtgatcaaggccctgcaggtggtggaccacgccttcggcatgctgatggagggcctgaagcagagaaacctgcacaactgcgtgaacatcatcctgctggccgaccacggcatggaccagacctactgcaacaagatggagtacatgaccgactacttccccagaatcaacttcttctacatgtacgagggccccgcccccagaatcagagcccacaacatcccccacgacttcttcagcttcaacagcgaggagatcgtgagaaacctgagctgcagaaagcccgaccagcacttcaagccctacctgacccccgacctgcccaagagactgcactacgccaagaacgtgagaatcgacaaggtgcacctgttcgtggaccagcagtggctggccgtgagaagcaagagcaacaccaactgcggcggcggcaaccacggctacaacaacgagttcagaagcatggaggccatcttcctggcccacggccccagcttcaaggagaagaccgaggtggagcccttcgagaacatcgaggtgtacaacctgatgtgcgacctgctgagaatccagcccgcccccaacaacggcacccacggcagcctgaaccacctgctgaaggtgcccttctacgagcccagccacgccgaggaggtgagcaagttcagcgtgtgcggcttcgccaaccccctgcccaccgagagcctggactgcttctgcccccacctgcagaacagcacccagctggagcaggtgaaccagatgctgaacctgacccaggaggagatcaccgccaccgtgaaggtgaacctgcccttcggcagacccagagtgctgcagaagaacgtggaccactgcctgctgtaccacagagagtacgtgagcggcttcggcaaggccatgagaatgcccatgtggagcagctacaccgtgccccagctgcccgccatcgagcaccagatcgccaacatgatgctgtag

SEQ ID NO: 80124 - DNA, 2628 bp, synthetic construct; identical to SEQ ID NO: 80122
  misc_feature 1..2628: note = Description of Artificial Sequence: Synthetic coding sequence
  source 1..2628: mol_type = other DNA

SEQ ID NO: 80125 - DNA, 765 bp, synthetic construct
  misc_feature 1..765: note = Description of Artificial Sequence: Synthetic coding sequence
  source 1..765: mol_type = other DNA
atgagcctgggcctgggcctgggcctgggcctgagaaagctggagaagcagggcagctgcagaaagaagtgcttcgacgccagcttcagaggcctggagaactgcagatgcgacgtggcctgcaaggacagaggcgactgctgctgggacttcgaggacacctgcgtggagagcaccagaatctggatgtgcaacaagttcagatgcggcgagaccagactggaggccagcctgtgcagctgcagcgacgactgcctgcagagaaaggactgctgcgccgactacaagagcgtgtgccagggcgagaccagctggctggaggagaactgcgacaccgcccagcagagccagtgccccgagggcttcgacctgccccccgtgatcctgttcagcatggacggcttcagagccgagtacctgtacacctgggacaccctgatgcccaacatcaacaagctgaagacctgcggcatccacagcaagtacatgagagccatgtaccccaccaagaccttccccaaccactacaccatcgtgaccggcctgtaccccgagagccacggcatcatcgacaacaacatgtacgacgtgaacctgaacaagaacttcagcctgagcagcaaggagcagaacaaccccgcctggtggcacggccagcccgtgtgcagcatcctgcacgtggccaccgaggtgaccagcatcagccagtgcgacagaagaaccctgttcagcctgagcggcgccagcagcatgagccccatctag

SEQ ID NO: 80126 - DNA, 774 bp, synthetic construct
  misc_feature 1..774: note = Description of Artificial Sequence: Synthetic coding sequence
  source 1..774: mol_type = other DNA
atgagcctgggcctgggcctgggcctgggcctgagaaagctggagaagcagggcagctgcagaaagaagtgcttcgacgccagcttcagaggcctggagaactgcagatgcgacgtggcctgcaaggacagaggcgactgctgctgggacttcgaggacacctgcgtggagagcaccagaatctggatgtgcaacaagttcagatgcggcgagaccagactggaggccagcctgtgcagctgcagcgacgactgcctgcagagaaaggactgctgcgccgactacaagagcgtgtgccagggcgagaccagctggctggaggagaactgcgacaccgcccagcagagccagtgccccgagggcttcgacctgccccccgtgatcctgttcagcatggacggcttcagagccgagtacctgtacacctgggacaccctgatgcccaacatcaacaagctgaagacctgcggcatccacagcaagtacatgagagccatgtaccccaccaagaccttccccaaccactacaccatcgtgaccggcctgtaccccgagagccacggcatcatcgacaacaacatgtacgacgtgaacctgaacaagaacttcagcctgagcagcaaggagcagaacaaccccgcctggtggcacggccagcccatgtggctgaccgccatgtaccagggcctgaaggccgccacctacttctggcccggcagcgaggtggccatcaacggcagcttccccagcatctacatgccctacaacggctag

SEQ ID NO: 80127 - DNA, 1200 bp, synthetic construct
  misc_feature 1..1200: note = Description of Artificial Sequence: Synthetic coding sequence
  source 1..1200: mol_type = other DNA
atggccagccccggcaagcccggcgccgacgaggcccaggaggaggagggcgagctggagggcggcagcgccggccccagagccgccatcctggagcaggccgaggagctgttcctgctgtgcgacaaggaggccaagggcttcatcaccaagcacgacctgcagggcctgcagagcgacctgcccctgacccccgagcagctggaggccgtgttcgagagcctggacagagcccacaccggcttcctgaccgccagagagttctgcctgggcctgggcatgttcgtgggcgtggccagcgcccagggcgccaacccctgcagaacccccgaggagaccttcgagagcggcggcctggacgtgcagggcaccgccggcagcctggacgaggaggaggaggaggaggagagattccacaccgtgctggagcagctgggcgtggcccccgtgctgggcaagcagagagccgtgagaaccctgtgggccagactgcagagagagagacccgagctgctgggcagcttcgaggacgtgctgatcagagccagcgcctgcctggaggaggccgccagagagagagacggcctggagcaggccctgagaagaagagagagcgagcacgagagagaggtgagagccctgtacgaggagaccgagcagctgagagagcagagcagaagaccccccagccagaacttcgccagaggcgagagaagaagcagactggagctggagctgcagagcagagagcaggacctggagagagccggcctgagacagagagagctggagcagcagctgcacgcccaggccgccgagcacctggaggcccaggcccagaacagccagctgtggagagcccacgaggccctgagaacccagctggagggcgcccaggagcagatcagaagactggagagcgaggccagaggcagacaggagcagacccagagagacgtggtggccgtgagcagaaacatgcagaaggagaaggtgagcctgctgagacagctggagctgctgagagagctgaacaccagactgagagacgacagagacgcctgcgaggccagaagagccggcagcagctgcagaaaggccctgaccaccgccagactgcccggccccacctgctgctgctgctgctgctgggccagaccccccagaagaggcagcggccacctgcccagcgccagatag

SEQ ID NO: 80128 - DNA, 885 bp, synthetic construct
  misc_feature 1..885: note = Description of Artificial Sequence: Synthetic coding sequence
  source 1..885: mol_type = other DNA
atggccagccccggcaagcccggcgccgacgaggcccaggaggaggagggcgagctggagggcggcagcgccggccccagagccgccatcctggagcaggccgaggagctgttcctgctgtgcgacaaggaggccaagggcttcatcaccaagcacgacctgcagggcctgcagagcgacctgcccctgacccccgagcagctggaggccgtgttcgagagcctggacagagcccacaccggcttcctgaccgccagagagttctgcctgggcctgggcatgttcgtgggcgtggccagcgcccagggcgccaacccctgcagaacccccgaggagaccttcgagagcggcggcctggacgtgcagggcaccgccggcagcctggacgaggaggaggaggaggaggagagattccacaccgtgctggagcagctgggcgtggcccccgtgctgggcaagcagagagccgtgagaaccctgtgggccagactgcagagagagagacccgagctgctgggcagcttcgaggacgtgctgatcagagccagcgcctgcctggaggaggccgccagagagagagacggcctggagcaggccctgagaagaagagagagcgagcacgagagagaggtgagagccctgtacgaggagaccgagcagctgagagagcagagcagaagaccccccagccagaacttcgccagaggcgagagaagaagcagactggagctggagctgcagagcagagagcaggacctggagagagccggcctgagacagagagagagaagaggcagaagactgcaggagcacgccgagagagagagccagcccgccaccgccaccggcgccgcccagggcgccgagtacaccgccgccggctag

SEQ ID NO: 80129 - DNA, 267 bp, synthetic construct
  misc_feature 1..267: note = Description of Artificial Sequence: Synthetic coding sequence
  source 1..267: mol_type = other DNA
atggccagccccggcaagcccggcgccgacgaggcccaggaggaggagggcgagctggagggcggcagcgccggccccagagccgccatcctggagcaggccgaggagctgttcctgctgtgcgacaaggaggccaagggcttcatcaccaagcacgacctgcagggcctgcagagcgacctgcccctgacccccgagcagctggaggccgtgttcgagagcctggacagagcccacaccggcttcctgaccgccagagagttctag

SEQ ID NO: 80130 - DNA, 105 bp, synthetic construct
  misc_feature 1..105: note = Description of Artificial Sequence: Synthetic coding sequence
  source 1..105: mol_type = other DNA
atggccagccccggcaagcccggcgccgacgaggcccaggaggaggagggcgagctggagggcggcagcgccggccccagagccgccatcctggagcaggcctag

SEQ ID NO: 80131 - DNA, 885 bp, synthetic construct; identical to SEQ ID NO: 80128
  misc_feature 1..885: note = Description of Artificial Sequence: Synthetic coding sequence
  source 1..885: mol_type = other DNA

SEQ ID NO: 80132 - DNA, 162 bp, synthetic construct
  misc_feature 1..162: note = Description of Artificial Sequence: Synthetic coding sequence
  source 1..162: mol_type = other DNA
atggccagccccggcaagcccggcgccgacgaggcccaggaggaggagggcgagctggagggcggcagcgccggccccagagccgccatcctggagcaggccgaggagctgttcctgctgtgcgacaaggaggccaagggcttcatcaccaagcacgactag

SEQ ID NO: 80133 - DNA, 246 bp, synthetic construct
  misc_feature 1..246: note = Description of Artificial Sequence: Synthetic coding sequence
  source 1..246: mol_type = other DNA
atggccagccccggcaagcccggcgccgacgaggcccaggaggaggagggcgagctggagggcggcagcgccggccccagagccgccatcctggagcaggccgaggagctgttcctgctgtgcgacaaggaggccaagggcttcatcaccaagcacgacctgcagggcctgcagagcgacctgcccctgacccccgagcagctggaggccgtgttcgagagcctggacagagcccacaccggctag

SEQ ID NO: 80134 - DNA, 1188 bp, synthetic construct
  misc_feature 1..1188: note = Description of Artificial Sequence: Synthetic coding sequence
  source 1..1188: mol_type = other DNA
atggccgcccccgacggcagagtggtgagcagaccccagagactgggccagggcagcggccagggccccaagggcagcggcgcctgcctgcaccccctggacagcctggagcagaaggagacccaggagcagaccagcggccagctggtgatgctgagaaaggcccaggagttcttccagacctgcgacgccgagggcaagggcttcatcgccagaaaggacatgcagagactgcacaaggagctgcccctgagcctggaggagctggaggacgtgttcgacgccctggacgccgacggcaacggctacctgaccccccaggagttcaccaccggcttcagccacttcttcttcagccagaacaaccccagccaggaggacgccggcgagcaggtggcccagagacacgaggagaaggtgtacctgagcagaggcgacgaggacctgggcgacatgggcgaggacgaggaggcccagttcagaatgctgatggacagactgggcgcccagaaggtgctggaggacgagagcgacgtgaagcagctgtggctgcagctgaagaaggaggagccccacctgctgagcaacttcgaggacttcctgaccagaatcatcagccagctgcaggaggcccacgaggagaagaacgagctggagtgcgccctgaagagaaagatcgccgcctacgacgaggagatccagcacctgtacgaggagatggagcagcagatcaagagcgagaaggagcagttcctgctgaaggacaccgagagattccaggccagaagccaggagctggagcagaagctgctgtgcaaggagcaggagctggagcagctgacccagaagcagaagagactggagggccagtgcaccgccctgcaccacgacaagcacgagaccaaggccgagaacaccaagctgaagctgaccaaccaggagctggccagagagctggagagaaccagctgggagctgcaggacgcccagcagcagctggagagcctgcagcaggaggcctgcaagctgcaccaggagaaggagatggaggtgtacagagtgaccgagagcctgcagagagagaaggccggcctgctgaagcagctggacttcctgagatgcgtgggcggccactggcccgtgctgagagccccccccagaagcctgggcagcgagggccccgtgtag

SEQ ID NO: 80135 - DNA, 2196 bp, synthetic construct
  misc_feature 1..2196: note = Description of Artificial Sequence: Synthetic coding sequence
  source 1..2196: mol_type = other DNA
atggccgcccccgacggcagagtggtgagcagaccccagagactgggccagggcagcggccagggccccaagggcagcggcgcctgcctgcaccccctggacagcctggagcagaaggagacccaggagcagaccagcggccagctggtgatgctgagaaaggcccaggagttcttccagacctgcgacgccgagggcaagggcttcatcgccagaaaggacatgcagagactgcacaaggagctgcccctgagcctggaggagctggaggacgtgttcgacgccctggacgccgacggcaacggctacctgaccccccaggagttcaccaccggcttcagccacttcttcttcagccagaacaaccccagccaggaggacgccggcgagcaggtggcccagagacacgaggagaaggtgtacctgagcagaggcgacgaggacctgggcgacatgggcgaggacgaggaggcccagttcagaatgctgatggacagactgggcgcccagaaggtgctggaggacgagagcgacgtgaagcagctgtggctgcagctgaagaaggaggagccccacctgctgagcaacttcgaggacttcctgaccagaatcatcagccagctgcaggaggcccacgaggagaagaacgagctggagtgcgccctgaagagaaagatcgccgcctacgacgaggagatccagcacctgtacgaggagatggagcagcagatcaagagcgagaaggagcagttcctgctgaaggacaccgagagattccaggccagaagccaggagctggagcagaagctgctgtgcaaggagcaggagctggagcagctgacccagaagcagaagagactggagggccagtgcaccgccctgcaccacgacaagcacgagaccaaggccgagaacaccaagctgaagctgaccaaccaggagctggccagagagctggagagaaccagctgggagctgcaggacgcccagcagcagctggagagcctgcagcaggaggcctgcaagctgcaccaggagaaggagatggaggtgtacagagtgaccgagagcctgcagagagagaaggccggcctgctgaagcagctggacttcctgagagagagaaacaagcacctgagagacgagagagacatctgcttccagaagaacaaggccgccaaggccaacaccgccgccagcagagccagctggaagaagagaagcggcagcgtgatcggcaagtacgtggacagcagaggcatcctgagaagccagagcgaggaggaggaggaggtgttcggcatccccagaagaagcagcctgggcctgagcggctaccccctgaccgaggaggagcccggcaccggcgagcccggccccggcggcccctaccccagacccctgagaagaatcatcagcgtggaggaggaccccctgccccagctgctggacggcggcttcgagcagcccctgagcaagtgcagcgaggaggaggaggtgagcgaccagggcgtgcagggccagatccccgaggccccccccctgaagctgacccccaccagccccagaggccagcccgtgggcaaggaggccctgtgcaaggaggagagcagccccagcgcccccgacagactgttcaagatcgtgttcgtgggcaacagcgccgtgggcaagaccagcttcctgagaagattctgcgaggacagattcagccccggcatggccgccaccgtgggcatcgactacagagtgaagaccctgaacgtggacaacagccaggtggccctgcagctgtgggacaccgccggccaggagagatacagatgcatcacccagcagttcttcagaaaggccgacggcgtgatcgtgatgtacgacctgaccgacaagcagagcttcctgagcgtgagaagatggctgagcagcgtggaggaggccgtgggcgacagagtgcccgtgctgctgctgggcaacaagctggacaacgagaaggagagagaggtgcccagaggcctgggcgagcagctggccaccgagaacaacctgatcttctacgagtgcagcgcctacagcggccacaacaccaaggagagcctgctgcacctggccagattcctgaaggagcaggaggacaccgtgagagaggacaccatccaggtgggccaccccgccaagaagaagagctgctgcggctag

SEQ ID NO: 80136 - DNA, 1389 bp, synthetic construct
  misc_feature 1..1389: note = Description of Artificial Sequence: Synthetic coding sequence
  source 1..1389: mol_type = other DNA
atggccgcccccgacggcagagtggtgagcagaccccagagactgggccagggcagcggccagggccccaagggcagcggcgcctgcctgcaccccctggacagcctggagcagaaggagacccaggagcagaccagcggccagctggtgatgctgagaaaggcccaggagttcttccagacctgcgacgccgagggcaagggcttcatcgccagaaaggacatgcagagactgcacaaggagctgcccctgagcctggaggagctggaggacgtgttcgacgccctggacgccgacggcaacggctacctgaccccccaggagttcaccaccggcttcagccacttcttcttcagccagaacaaccccagccaggaggacgccggcgagcaggtggcccagagacacgaggagaaggtgtacctgagcagaggcgacgaggacctgggcgacatgggcgaggacgaggaggcccagttcagaatgctgatggacagactgggcgcccagaaggtgctggaggacgagagcgacgtgaagcagctgtggctgcagctgaagaaggaggagccccacctgctgagcaacttcgaggacttcctgaccagaatcatcagccagctgcaggaggcccacgaggagaagaacgagctggagtgcgccctgaagagaaagatcgccgcctacgacgaggagatccagcacctgtacgaggagatggagcagcagatcaagagcgagaaggagcagttcctgctgaaggacaccgagagattccaggccagaagccaggagctggagcagaagctgctgtgcaaggagcaggagctggagcagctgacccagaagcagaagagactggagggccagtgcaccgccctgcaccacgacaagcacgagaccaaggccgagaacaccaagctgaagctgaccaaccaggagctggccagagagctggagagaaccagctgggagctgcaggacgcccagcagcagctggagagcctgcagcaggaggcctgcaagctgcaccaggagaaggagatggaggtgtacagagtgaccgagagcctgcagagagagaaggccggcctgctgaagcagctggacttcctgagagagagaaacaagcacctgagagacgagagagacatctgcttccagaagaacaaggccgccaaggccaacaccgccgccagcagagccagctggaagaagagaagcggcagcgtgatcggcaagtacgtggacagcagaggcatcctgagaagatggccccagagagacagaggcatccccaccctgcagtaccagacccagagagacctggaggactgcaagcacgagatgaagaagatctgcaaggccgaggtgaccctggagatgtag

SEQ ID NO: 80137 - DNA, 357 bp, synthetic construct
  misc_feature 1..357: note = Description of Artificial Sequence: Synthetic coding sequence
  source 1..357: mol_type = other DNA
tgagagaaggagatggaggtgtacagagtgaccgagagcctgcagagagagaaggccggcctgctgaagcagctggacttcctgagagagagaaacaagcacctgagagacgagagagacatctgcttccagaagaacaaggccgccaaggccaacaccgccgccagcagagccagctggaagaagagaagcggcagcgtgatcggcaagtacgtggacagcagaggcatcctgagaagatggccccagagagacagaggcatccccaccctgcagtaccagacccagagagacctggaggactgcaagcacgagatgaagaagatctgcaaggccgaggtgaccctggagatgtag

SEQ ID NO: 80138 - DNA, 1923 bp, synthetic construct
  misc_feature 1..1923: note = Description of Artificial Sequence: Synthetic coding sequence
  source 1..1923: mol_type = other DNA
atggtgagcaaccccgtgcacggcctgcccttcctgcccggcaccagcttcaaggacagcaccaagaccgccttccacagaagccagaccctgagctacagaaacggctacgccatcgtgagaagacccaccgtgggcatcggcggcgacagactgcagttcaaccagctgagccaggccgagctggacgagctggccagcaaggcccccgtgctgacctacggccagcccaagcaggccccccccgccgacttcatccccgcccacgtggccttcgacaagaaggtgctgaagttcgacgcctacttccaggaggacgtgcccatgagcaccgaggagcagtacagaatcagacaggtgaacatctactactacctggaggacgacagcatgagcgtgatcgagcccgtggtggagaacagcggcatcctgcagggcaagctgatcaagagacagagactggccaagaacgacagaggcgaccactaccactggaaggacctgaacagaggcatcaacatcaccatctacggcaagaccttcagagtggtggactgcgaccagttcacccaggtgttcctggagagccagggcatcgagctgaacccccccgagaagatggccctggacccctacaccgagctgagaaagcagcccctgagaaagtacgtgacccccagcgacttcgaccagctgaagcagttcctgaccttcgacaagcaggtgctgagattctacgccatctgggacgacaccgacagcatgtacggcgagtgcagaacctacatcatccactactacctgatggacgacaccgtggagatcagagaggtgcacgagagaaacgacggcagagaccccttccccctgctgatgaacagacagagagtgcccaaggtgctggtggagaacgccaagaacttcccccagtgcgtgctggagatcagcgaccaggaggtgctggagtggtacaccgccaaggacttcatcgtgggcaagagcctgaccatcctgggcagaaccttcttcatctacgactgcgaccccttcaccagaagatactacaaggagaagttcggcatcaccgacctgcccagaatcgacgtgagcaagagagagcccccccccgtgaagcaggagctgcccccctacaacggcttcggcctggtggaggacagcgcccagaactgcttcgccctgatccccaaggcccccaagaaggacgtgatcaagatgctggtgaacgacaacaaggtgctgagatacctggccgtgctggagagccccatccccgaggacaaggacagaagattcgtgttcagctacttcctggccaccgacatgatcagcatcttcgagccccccgtgagaaacagcggcatcatcggcggcaagtacctgggcagaaccaaggtggtgaagccctacagcaccgtggacaaccccgtgtactacggccccagcgacttcttcatcggcgccgtgatcgaggtgttcggccacagattcatcatcctggacaccgacgagtacgtgctgaagtacatggagagcaacgccgcccagtacagccccgaggccctggccagcatccagaaccacgtgagaaagagagaggcccccgcccccgaggccgagagcaagcagaccgagaaggaccccggcgtgcaggagctggaggccctgatcgacaccatccagaagcagctgaaggaccacagctgcaaggacaacatcagagaggccttccagatctacgacaaggaggccagcggctacgtggacagagacatgttcttcaagatctgcgagagcctgaacgtgcccgtggacgacagcctggtgaaggagctgatcagaatgtgcagccacggcgagggcaagatcaactactacaacttcgtgagagccttcagcaactag

SEQ ID NO: 80139 - DNA, 1653 bp, synthetic construct
  misc_feature 1..1653: note = Description of Artificial Sequence: Synthetic coding sequence
  source 1..1653: mol_type = other DNA
atgagctggcccgtgctgaagttcgacgcctacttccaggaggacgtgcccatgagcaccgaggagcagtacagaatcagacaggtgaacatctactactacctggaggacgacagcatgagcgtgatcgagcccgtggtggagaacagcggcatcctgcagggcaagctgatcaagagacagagactggccaagaacgacagaggcgaccactaccactggaaggacctgaacagaggcatcaacatcaccatctacggcaagaccttcagagtggtggactgcgaccagttcacccaggtgttcctggagagccagggcatcgagctgaacccccccgagaagatggccctggacccctacaccgagctgagaaagcagcccctgagaaagtacgtgacccccagcgacttcgaccagctgaagcagttcctgaccttcgacaagcaggtgctgagattctacgccatctgggacgacaccgacagcatgtacggcgagtgcagaacctacatcatccactactacctgatggacgacaccgtggagatcagagaggtgcacgagagaaacgacggcagagaccccttccccctgctgatgaacagacagagagtgcccaaggtgctggtggagaacgccaagaacttcccccagtgcgtgctggagatcagcgaccaggaggtgctggagtggtacaccgccaaggacttcatcgtgggcaagagcctgaccatcctgggcagaaccttcttcatctacgactgcgaccccttcaccagaagatactacaaggagaagttcggcatcaccgacctgcccagaatcgacgtgagcaagagagagcccccccccgtgaagcaggagctgcccccctacaacggcttcggcctggtggaggacagcgcccagaactgcttcgccctgatccccaaggcccccaagaaggacgtgatcaagatgctggtgaacgacaacaaggtgctgagatacctggccgtgctggagagccccatccccgaggacaaggacagaagattcgtgttcagctacttcctggccaccgacatgatcagcatcttcgagccccccgtgagaaacagcggcatcatcggcggcaagtacctgggcagaaccaaggtggtgaagccctacagcaccgtggacaaccccgtgtactacggccccagcgacttcttcatcggcgccgtgatcgaggtgttcggccacagattcatcatcctggacaccgacgagtacgtgctgaagtacatggagagcaacgccgcccagtacagccccgaggccctggccagcatccagaaccacgtgagaaagagagaggcccccgcccccgaggccgagagcaagcagaccgagaaggaccccggcgtgcaggagctggaggccctgatcgacaccatccagaagcagctgaaggaccacagctgcaaggacaacatcagagaggccttccagatctacgacaaggaggccagcggctacgtggacagagacatgttcttcaagatctgcgagagcctgaacgtgcccgtggacgacagcctggtgaaggaggtgacctgcaagagactgctgctgcccgccttcaccttccccagccccgtgtggatccccctgtgcggcctgtag

SEQ ID NO: 80140 - DNA, 1866 bp, synthetic construct
  misc_feature 1..1866: note = Description of Artificial Sequence: Synthetic coding sequence
  source 1..1866: mol_type = other DNA
atgctgaagaccgccttccacagaagccagaccctgagctacagaaacggctacgccatcgtgagaagacccaccgtgggcatcggcggcgacagactgcagttcaaccagctgagccaggccgagctggacgagctggccagcaaggcccccgtgctgacctacggccagcccaagcaggccccccccgccgacttcatccccgcccacgtggccttcgacaagaaggtgctgaagttcgacgcctacttccaggaggacgtgcccatgagcaccgaggagcagtacagaatcagacaggtgaacatctactactacctggaggacgacagcatgagcgtgatcgagcccgtggtggagaacagcggcatcctgcagggcaagctgatcaagagacagagactggccaagaacgacagaggcgaccactaccactggaaggacctgaacagaggcatcaacatcaccatctacggcaagaccttcagagtggtggactgcgaccagttcacccaggtgttcctggagagccagggcatcgagctgaacccccccgagaagatggccctggacccctacaccgagctgagaaagcagcccctgagaaagtacgtgacccccagcgacttcgaccagctgaagcagttcctgaccttcgacaagcaggtgctgagattctacgccatctgggacgacaccgacagcatgtacggcgagtgcagaacctacatcatccactactacctgatggacgacaccgtggagatcagagaggtgcacgagagaaacgacggcagagaccccttccccctgctgatgaacagacagagagtgcccaaggtgctggtggagaacgccaagaacttcccccagtgcgtgctggagatcagcgaccaggaggtgctggagtggtacaccgccaaggacttcatcgtgggcaagagcctgaccatcctgggcagaaccttcttcatctacgactgcgaccccttcaccagaagatactacaaggagaagttcggcatcaccgacctgcccagaatcgacgtgagcaagagagagcccccccccgtgaagcaggagctgcccccctacaacggcttcggcctggtggaggacagcgcccagaactgcttcgccctgatccccaaggcccccaagaaggacgtgatcaagatgctggtgaacgacaacaaggtgctgagatacctggccgtgctggagagccccatccccgaggacaaggacagaagattcgtgttcagctacttcctggccaccgacatgatcagcatcttcgagccccccgtgagaaacagcggcatcatcggcggcaagtacctgggcagaaccaaggtggtgaagccctacagcaccgtggacaaccccgtgtactacggccccagcgacttcttcatcggcgccgtgatcgaggtgttcggccacagattcatcatcctggacaccgacgagtacgtgctgaagtacatggagagcaacgccgcccagtacagccccgaggccctggccagcatccagaaccacgtgagaaagagagaggcccccgcccccgaggccgagagcaagcagaccgagaaggaccccggcgtgcaggagctggaggccctgatcgacaccatccagaagcagctgaaggaccacagctgcaaggacaacatcagagaggccttccagatctacgacaaggaggccagcggctacgtggacagagacatgttcttcaagatctgcgagagcctgaacgtgcccgtggacgacagcctggtgaaggagctgatcagaatgtgcagccacggcgagggcaagatcaactactacaacttcgtgagagccttcagcaactag

SEQ ID NO: 80141 - DNA, 2250 bp, synthetic construct
  misc_feature 1..2250: note = Description of Artificial Sequence: Synthetic coding sequence
  source 1..2250: mol_type = other DNA
atggccctgcccctgctgcccggcaacagcttcaacagaaacgtgggcaaggagaagttccacaagagccagcactggggcttctgcaacaacgtgatgatgctggtgagcgacgagaagcccggcatcggcggcgagcccctgctgggccagaagatcaagcccaagtgcagcatctaccccaagggcgacggcagcgacgtgcccagctgggtggccttcgacaagcaggtgctgagcttcgacgcctacctggaggaggaggtgctggacaagagccagaccaactacagaatcagatactacaagatctacttctaccccgaggacgacaccatccaggtgaacgagcccgaggtgaagaacagcggcctgctgcagggcaccagcatcagaagacacagaatcaccctgcccccccccgacgaggaccagttctacaccgtgtaccacttcaacgtgggcaccgaggtggtgttctacggcagaaccttcaagatctacgactgcgacgccttcaccagaaacttcctgagaaagatcggcgtgaaggtgaacccccccgtgcagtgccccgaggacccctacatgaagatcagaagagaggtggtggagcacgtggagcccctgagaccctacgagagcctggacaccctgaagcagttcctgcagtaccacggcaagatcctgtgcttcttctgcctgtgggacgacagcgtgagcatgttcggcgacagaagagagctgatcctgcactacttcctgtgcgacgacaccatcgagatcaaggagctgctgccccacagcagcggcagagacgccctgaagatgttcctgagaagaagcaagctgcccaagaactgcccccccagagtgtaccagcccggccagatcaccgacagagccgtgctgaacagctacggcgacttcatcaagaaccaggccgacggctacctgttcgacagatacaagctgggcaaggtggaccaggagttctacaaggacagcgacctgagcctgggcgtgaccatcaacgtgtggggcagaaaggtgctgctgtacgactgcgacgagttcaccaagagctactacaagagcaagtacggcatcgagaacttcaccagcgtgagctgcaagccccccagccccccccccaagatcgagagaaagttccccccctacaacggcttcggcagcgaggaggacagcctgagaaactgcatcgacctgaagcccaccccccacagaagaaacttcaagaagttcatggagaaggacagctacggcagcaagagcaacatcctgagattcttcgccaagctggtgaccgacaagtgcgtggacctggacagaatgttcgtgatcagctactacctgggcgacgacaccatcagcgtgttcgagcccatcgagagaaacagcggcatcgccggcggcatgttcctgaagagaagcagagtgaagaagcccggccaggaggtgttcaagagcgagctgagcgagtacatcaaggccgaggagctgtacatcggcgtgaccgtgaacgtgaacggctacctgttcagactgctgaacgccgacgagtacaccctgaactacatggagcagaacaccgacaagtaccccttcagcaacctgaagctggccctgcagaagctgaagcaggaggagggcaagagcagagagctgaagcaggtgttcaaggccgccgacagcaagcacaccaacatggtggactacaacaccttcagagacatcctgatgagcctgaccgtgggcaacctggccgagcaggagttcgtgaccatcgccagacactacagagtgcccgagggcacctgcagcgacatggacttcctgatcgccctggcccacgagaagttcaagaagaacatgttcgagaacttcgacaccttcatctacagctgcgtgtacgaggacagagagaagaagaacgtgctgcccaccaaggacatcaagagactgtgcaagagcagcagactgcccctgagcgacgacctgctggagagcctgctgagcagattcgaggacagcgagaagcagatcgactacaagagcttcttcagcgccctgaactggagaaagaaccccgtgcccgagctgcagcccgccagctacctgaaggagagatgcgaggacgtgtggctgggcatgcccagccccatccccgccaagtacatcgactactggaccttcctgaaggacgccttcggcctggaggaggagtag

SEQ ID NO: 80142 - DNA, 489 bp, synthetic construct
  misc_feature 1..489: note = Description of Artificial Sequence: Synthetic coding sequence
  source 1..489: mol_type = other DNA
atgagcctgaccgtgggcaacctggccgagcaggagttcgtgaccatcgccagacactacagagtgcccgagggcacctgcagcgacatggacttcctgatcgccctggcccacgagaagttcaagaagaacatgttcgagaacttcgacaccttcatctacagctgcgtgtacgaggacagagagaagaagaacgtgctgcccaccaaggacatcaagagactgtgcaagagcagcagactgcccctgagcgacgacctgctggagagcctgctgagcagattcgaggacagcgagaagcagatcgactacaagagcttcttcagcgccctgaactggagaaagaaccccgtgcccgagctgcagcccgccagctacctgaaggagagatgcgaggacgtgtggctgggcatgcccagccccatccccgccaagtacatcgactactggaccttcctgaaggacgccttcggcctggaggaggagtag

SEQ ID NO: 80143 - DNA, 753 bp, synthetic construct
  misc_feature 1..753: note = Description of Artificial Sequence: Synthetic coding sequence
  source 1..753: mol_type = other DNA
atgaagatcagaagagaggtggtggagcacgtggagcccctgagaccctacgagagcctggacaccctgaagcagttcctgcagtaccacggcaagatcctgtgcttcttctgcctgtgggacgacagcgtgagcatgttcggcgacagaagagagctgatcctgcactacttcctgtgcgacgacaccatcgagatcaaggagctgctgccccacagcagcggcagagacgccctgaagatgttcctgagaagaagcaagctgcccaagaactgcccccccagagtgtaccagcccggccagatcaccgacagagccgtgctgaacagctacggcgacttcatcaagaaccaggccgacggctacctgttcgacagatacaagctgggcaaggtggaccaggagttctacaaggacagcgacctgagcctgggcgtgaccatcaacgtgtggggcagaaaggtgctgctgtacgactgcgacgagttcaccaagagctactacaagagcaagtacggcatcgagaacttcaccagcgtgagctgcaagccccccagccccccccccaagatcgagagaaagttccccccctacaacggcttcggcagcgaggaggacagcctgagaaactgcatcgacctgaagcccaccccccacagaagaaacttcaagaagttcatggagaaggacagctacggcagcaagagcaacatcctgttcttctgcaagaccagccacagacagatgtgctag

SEQ ID NO: 80144 - DNA, 2334 bp, synthetic construct
  misc_feature 1..2334: note = Description of Artificial Sequence: Synthetic coding sequence
  source 1..2334: mol_type = other DNA
ggcggccagaccaccagacccggcggcgccgccgcctgcagagccctgagcagcggcaccctggacttcagaaccctgagcgccatggccctgcccctgctgcccggcaacagcttcaacagaaacgtgggcaaggagaagttccacaagagccagcactggggcttctgcaacaacgtgatgatgctggtgagcgacgagaagcccggcatcggcggcgagcccctgctgggccagaagatcaagcccaagtgcagcatctaccccaagggcgacggcagcgacgtgcccagctgggtggccttcgacaagcaggtgctgagcttcgacgcctacctggaggaggaggtgctggacaagagccagaccaactacagaatcagatactacaagatctacttctaccccgaggacgacaccatccaggtgaacgagcccgaggtgaagaacagcggcctgctgcagggcaccagcatcagaagacacagaatcaccctgcccccccccgacgaggaccagttctacaccgtgtaccacttcaacgtgggcaccgaggtggtgttctacggcagaaccttcaagatctacgactgcgacgccttcaccagaaacttcctgagaaagatcggcgtgaaggtgaacccccccgtgcagtgccccgaggacccctacatgaagatcagaagagaggtggtggagcacgtggagcccctgagaccctacgagagcctggacaccctgaagcagttcctgcagtaccacggcaagatcctgtgcttcttctgcctgtgggacgacagcgtgagcatgttcggcgacagaagagagctgatcctgcactacttcctgtgcgacgacaccatcgagatcaaggagctgctgccccacagcagcggcagagacgccctgaagatgttcctgagaagaagcaagctgcccaagaactgcccccccagagtgtaccagcccggccagatcaccgacagagccgtgctgaacagctacggcgacttcatcaagaaccaggccgacggctacctgttcgacagatacaagctgggcaaggtggaccaggagttctacaaggacagcgacctgagcctgggcgtgaccatcaacgtgtggggcagaaaggtgctgctgtacgactgcgacgagttcaccaagagctactacaagagcaagtacggcatcgagaacttcaccagcgtgagctgcaagccccccagccccccccccaagatcgagagaaagttccccccctacaacggcttcggcagcgaggaggacagcctgagaaactgcatcgacctgaagcccaccccccacagaagaaacttcaagaagttcatggagaaggacagctacggcagcaagagcaacatcctgagattcttcgccaagctggtgaccgacaagtgcgtggacctggacagaatgttcgtgatcagctactacctgggcgacgacaccatcagcgtgttcgagcccatcgagagaaacagcggcatcgccggcggcatgttcctgaagagaagcagagtgaagaagcccggccaggaggtgttcaagagcgagctgagcgagtacatcaaggccgaggagctgtacatcggcgtgaccgtgaacgtgaacggctacctgttcagactgctgaacgccgacgagtacaccctgaactacatggagcagaacaccgacaagtaccccttcagcaacctgaagctggccctgcagaagctgaagcaggaggagggcaagagcagagagctgaagcaggtgttcaaggccgccgacagcaagcacaccaacatggtggactacaacaccttcagagacatcctgatgagcctgaccgtgggcaacctggccgagcaggagttcgtgaccatcgccagacactacagagtgcccgagggcacctgcagcgacatggacttcctgatcgccctggcccacgagaagttcaagaagaacatgttcgagaacttcgacaccttcatctacagctgcgtgtacgaggacagagagaagaagaacgtgctgcccaccaaggacatcaagagactgtgcaagagcagcagactgcccctgagcgacgacctgctggagagcctgctgagcagattcgaggacagcgagaagcagatcgactacaagagcttcttcagcgccctgaactggagaaagaaccccgtgcccgagctgcagcccgccagctacctgaaggagagatgcgaggacgtgtggctgggcatgcccagccccatccccgccaagtacatcgactactggaccttcctgaaggacgccttcggcctggaggaggagtag

SEQ ID NO: 80145 - DNA, 2193 bp, synthetic construct
  misc_feature 1..2193: note = Description of Artificial Sequence: Synthetic coding sequence
  source 1..2193: mol_type = other DNA
tgaaacaacaccgccggcagaagaagatgcctgcccggccccctgttctgggaccccggcttcagcgacaccgagagacacggccccgccagcgccgccggccagcagctgcagccccagagagagaagggcgacggcagcgacgtgcccagctgggtggccttcgacaagcaggtgctgagcttcgacgcctacctggaggaggaggtgctggacaagagccagaccaactacagaatcagatactacaagatctacttctaccccgaggacgacaccatccaggtgaacgagcccgaggtgaagaacagcggcctgctgcagggcaccagcatcagaagacacagaatcaccctgcccccccccgacgaggaccagttctacaccgtgtaccacttcaacgtgggcaccgaggtggtgttctacggcagaaccttcaagatctacgactgcgacgccttcaccagaaacttcctgagaaagatcggcgtgaaggtgaacccccccgtgcagtgccccgaggacccctacatgaagatcagaagagaggtggtggagcacgtggagcccctgagaccctacgagagcctggacaccctgaagcagttcctgcagtaccacggcaagatcctgtgcttcttctgcctgtgggacgacagcgtgagcatgttcggcgacagaagagagctgatcctgcactacttcctgtgcgacgacaccatcgagatcaaggagctgctgccccacagcagcggcagagacgccctgaagatgttcctgagaagaagcaagctgcccaagaactgcccccccagagtgtaccagcccggccagatcaccgacagagccgtgctgaacagctacggcgacttcatcaagaaccaggccgacggctacctgttcgacagatacaagctgggcaaggtggaccaggagttctacaaggacagcgacctgagcctgggcgtgaccatcaacgtgtggggcagaaaggtgctgctgtacgactgcgacgagttcaccaagagctactacaagagcaagtacggcatcgagaacttcaccagcgtgagctgcaagccccccagccccccccccaagatcgagagaaagttccccccctacaacggcttcggcagcgaggaggacagcctgagaaactgcatcgacctgaagcccaccccccacagaagaaacttcaagaagttcatggagaaggacagctacggcagcaagagcaacatcctgagattcttcgccaagctggtgaccgacaagtgcgtggacctggacagaatgttcgtgatcagctactacctgggcgacgacaccatcagcgtgttcgagcccatcgagagaaacagcggcatcgccggcggcatgttcctgaagagaagcagagtgaagaagcccggccaggaggtgttcaagagcgagctgagcgagtacatcaaggccgaggagctgtacatcggcgtgaccgtgaacgtgaacggctacctgttcagactgctgaacgccgacgagtacaccctgaactacatggagcagaacaccgacaagtaccccttcagcaacctgaagctggccctgcagaagctgaagcaggaggagggcaagagcagagagctgaagcaggtgttcaaggccgccgacagcaagcacaccaacatggtggactacaacaccttcagagacatcctgatgagcctgaccgtgggcaacctggccgagcaggagttcgtgaccatcgccagacactacagagtgcccgagggcacctgcagcgacatggacttcctgatcgccctggcccacgagaagttcaagaagaacatgttcgagaacttcgacaccttcatctacagctgcgtgtacgaggacagagagaagaagaacgtgctgcccaccaaggacatcaagagactgtgcaagagcagcagactgcccctgagcgacgacctgctggagagcctgctgagcagattcgaggacagcgagaagcagatcgactacaagagcttcttcagcgccctgaactggagaaagaaccccgtgcccgagctgcagcccgccagctacctgaaggagagatgcgaggacgtgtggctgggcatgcccagccccatccccgccaagtacatcgactactggaccttcctgaaggacgccttcggcctggaggaggagtag

SEQ ID NO: 80146 - DNA, 720 bp, synthetic construct
  misc_feature 1..720: note = Description of Artificial Sequence: Synthetic coding sequence
  source 1..720: mol_type = other DNA
atggccagcgaggagctggcctgcaagctggagagaagactgagaagagaggaggccgaggagagcggcccccagctggcccccctgggcgcccccgcccccgagcccaagcccgagcccgagccccccgccagagcccccaccgccagcgccgacgccgagctgagcgcccagctgagcagaagactggacatcaacgagggcgccgccagacccagaagatgcagagtgttcaacccctacaccgagttccccgagttcagcagaagactgatcaaggacctggagagcatgttcaagctgtacgacgccggcagagacggcttcatcgacctgatggagctgaagctgatgatggagaagctgggcgccccccagacccacctgggcctgaagagcatgatcaaggaggtggacgaggacttcgacggcaagctgagcttcagagagttcctgctgatcttccacaaggccgccgccggcgagctgcaggaggacagcggcctgatggccctggccaagctgagcgagatcgacgtggccctggagggcgtgaagggcgccaagaacttcttcgaggccaaggtgcaggccctgagcagcgccagcaagttcgaggccgagctgaaggccgagcaggacgagagaaagagagaggaggaggagagaagactgagacaggccgccttccagaagctgaaggccaacttcaacacctag

SEQ ID NO: 80147 - DNA, 432 bp, synthetic construct
  misc_feature 1..432: note = Description of Artificial Sequence: Synthetic coding sequence
  source 1..432: mol_type = other DNA
atgggcgagctgcagtacgacgccggcagagacggcttcatcgacctgatggagctgaagctgatgatggagaagctgggcgccccccagacccacctgggcctgaagagcatgatcaaggaggtggacgaggacttcgacggcaagctgagcttcagagagttcctgctgatcttccacaaggccgccgccggcgagctgcaggaggacagcggcctgatggccctggccaagctgagcgagatcgacgtggccctggagggcgtgaagggcgccaagaacttcttcgaggccaaggtgcaggccctgagcagcgccagcaagttcgaggccgagctgaaggccgagcaggacgagagaaagagagaggaggaggagagaagactgagacaggccgccttccagaagctgaaggccaacttcaacacctag

SEQ ID NO: 80148 - DNA, 384 bp, synthetic construct
  misc_feature 1..384: note = Description of Artificial Sequence: Synthetic coding sequence
  source 1..384: mol_type = other DNA
atggagctgaagctgatgatggagaagctgggcgccccccagacccacctgggcctgaagagcatgatcaaggaggtggacgaggacttcgacggcaagctgagcttcagagagttcctgctgatcttccacaaggccgccgccggcgagctgcaggaggacagcggcctgatggccctggccaagctgagcgagatcgacgtggccctggagggcgtgaagggcgccaagaacttcttcgaggccaaggtgcaggccctgagcagcgccagcaagttcgaggccgagctgaaggccgagcaggacgagagaaagagagaggaggaggagagaagactgagacaggccgccttccagaagctgaaggccaacttcaacacctag

SEQ ID NO: 80149 - DNA, 384 bp, synthetic construct; identical to SEQ ID NO: 80148
  misc_feature 1..384: note = Description of Artificial Sequence: Synthetic coding sequence
  source 1..384: mol_type = other DNA

SEQ ID NO: 80150 - DNA, 429 bp, synthetic construct
  misc_feature 1..429: note = Description of Artificial Sequence: Synthetic coding sequence
  source 1..429: mol_type = other DNA
atgttcaagctgtacgacgccggcagagacggcttcatcgacctgatggagctgaagctgatgatggagaagctgggcgccccccagacccacctgggcctgaagagcatgatcaaggaggtggacgaggacttcgacggcaagctgagcttcagagagttcctgctgatcttccacaaggccgccgccggcgagctgcaggaggacagcggcctgatggccctggccaagctgagcgagatcgacgtggccctggagggcgtgaagggcgccaagaacttcttcgaggccaaggtgcaggccctgagcagcgccagcaagttcgaggccgagctgaaggccgagcaggacgagagaaagagagaggaggaggagagaagactgagacaggccgccttccagaagctgaaggccaacttcaacacctag

SEQ ID NO: 80151 - DNA, 2466 bp, synthetic construct
  misc_feature 1..2466: note = Description of Artificial Sequence: Synthetic coding sequence
  source 1..2466: mol_type = other DNA
atgcccaccagagtgtgctgctgctgcagcgccctgagacccagatacaagagactggtggacaacatcttccccgaggaccccaaggacggcctggtgaagaccgacatggagaagctgaccttctacgccgtgagcgcccccgagaagctggacagaatcggcagctacctggccgagagactgagcagagacgtggtgagacacagaagcggctacgtgctgatcgccatggaggccctggaccagctgctgatggcctgccacagccagagcatcaagcccttcgtggagagcttcctgcacatggtggccaagctgctggagagcggcgagcccaagctgcaggtgctgggcaccaacagcttcgtgaagttcgccaacatcgaggaggacacccccagctaccacagaagatacgacttcttcgtgagcagattcagcgccatgtgccacagctgccacagcgaccccgagatcagaaccgagatcagaatcgccggcatcagaggcatccagggcgtggtgagaaagaccgtgaacgacgagctgagagccaccatctgggagccccagcacatggacaagatcgtgcccagcctgctgttcaacatgcagaagatcgaggaggtggacagcagaatcggcccccccagcagccccagcgccaccgacaaggaggagaaccccgccgtgctggccgagaactgcttcagagagctgctgggcagagccaccttcggcaacatgaacaacgccgtgagacccgtgttcgcccacctggaccaccacaagctgtgggaccccaacgagttcgccgtgcactgcttcaagatcatcatgtacagcatccaggcccagtacagccaccacgtgatccaggagatcctgggccacctggacgccagaaagaaggacgcccccagagtgagagccggcatcatccaggtgctgctggaggccgtggccatcgccgccaagggcagcatcggccccaccgtgctggaggtgttcaacaccctgctgaagcacctgagactgagcgtggagttcgaggccaacgacctgcagggcggcagcgtgggcagcgtgaacctgaacaccagcagcaaggacaacgacgagaagatcgtgcagaacgccatcatccagaccatcggcttcttcggcagcaacctgcccgactaccagagaagcgagatcatgatgttcatcatgggcaaggtgcccgtgttcggcaccagcacccacaccctggacatcagccagctgggcgacctgggcaccagaagaatccagatcatgctgctgagaagcctgctgatggtgaccagcggctacaaggccaagaccatcgtgaccgccctgcccggcagcttcctggaccccctgctgagccccagcctgatggaggactacgagctgagacagctggtgctggaggtgatgcacaacctgatggacagacacgacaacagagccaagctgagaggcatcagaatcatccccgacgtggccgacctgaagatcaagagagagaagatctgcagacaggacaccagcttcatgaagaagaacggccagcagctgtacagacacatctacctgggctgcaaggaggaggacaacgtgcagaagaactacgagctgctgtacaccagcctggccctgatcaccatcgagctggccaacgaggaggtggtgatcgacctgatcagactggccatcgccctgcaggacagcgccatcatcaacgaggacaacctgcccatgttccacagatgcggcatcatggccctggtggccgcctacctgaacttcgtgagccagatgatcgccgtgcccgccttctgccagcacgtgagcaaggtgatcgagatcagaaccatggaggccccctacttcctgcccgagcacatcttcagagacaagtgcatgctgcccaagagcctggagaagcacgagaaggacctgtacttcctgaccaacaagatcgccgagagcctgggcggcagcggctacagcgtggagagactgagcgtgccctacgtgccccaggtgaccgacgaggacagactgagcagaagaaagagcatcgtggacaccgtgagcatccaggtggacatcctgagcaacaacgtgcccagcgacgacgtggtgagcaacaccgaggagatcaccttcgaggccctgaagaaggccatcgacaccagcggcatggaggagcaggagaaggagaagagaagactggtgatcgagaagttccagaaggcccccttcgaggagatcgccgcccagtgcgagagcaaggccaacctgctgcacgacagactggcccagatcctggagctgaccatcagacccccccccagccccagcggcaccctgaccatcaccagcggccacgcccagtaccagagcgtgcccgtgtacgagatgaagttccccgacctgtgcgtgtactag

SEQ ID NO: 80152 - DNA, 2466 bp, synthetic construct
  misc_feature 1..2466: note = Description of Artificial Sequence: Synthetic coding sequence
  source 1..2466: mol_type = other DNA
atgaagagcagagtgtgctgctgctgcagcgccctgagacccagatacaagagactggtggacaacatcttccccgaggaccccaaggacggcctggtgaagaccgacatggagaagctgaccttctacgccgtgagcgcccccgagaagctggacagaatcggcagctacctggccgagagactgagcagagacgtggtgagacacagaagcggctacgtgctgatcgccatggaggccctggaccagctgctgatggcctgccacagccagagcatcaagcccttcgtggagagcttcctgcacatggtggccaagctgctggagagcggcgagcccaagctgcaggtgctgggcaccaacagcttcgtgaagttcgccaacatcgaggaggacacccccagctaccacagaagatacgacttcttcgtgagcagattcagcgccatgtgccacagctgccacagcgaccccgagatcagaaccgagatcagaatcgccggcatcagaggcatccagggcgtggtgagaaagaccgtgaacgacgagctgagagccaccatctgggagccccagcacatggacaagatcgtgcccagcctgctgttcaacatgcagaagatcgaggaggtggacagcagaatcggcccccccagcagccccagcgccaccgacaaggaggagaaccccgccgtgctggccgagaactgcttcagagagctgctgggcagagccaccttcggcaacatgaacaacgccgtgagacccgtgttcgcccacctggaccaccacaagctgtgggaccccaacgagttcgccgtgcactgcttcaagatcatcatgtacagcatccaggcccagtacagccaccacgtgatccaggagatcctgggccacctggacgccagaaagaaggacgcccccagagtgagagccggcatcatccaggtgctgctggaggccgtggccatcgccgccaagggcagcatcggccccaccgtgctggaggtgttcaacaccctgctgaagcacctgagactgagcgtggagttcgaggccaacgacctgcagggcggcagcgtgggcagcgtgaacctgaacaccagcagcaaggacaacgacgagaagatcgtgcagaacgccatcatccagaccatcggcttcttcggcagcaacctgcccgactaccagagaagcgagatcatgatgttcatcatgggcaaggtgcccgtgttcggcaccagcacccacaccctggacatcagccagctgggcgacctgggcaccagaagaatccagatcatgctgctgagaagcctgctgatggtgaccagcggctacaaggccaagaccatcgtgaccgccctgcccggcagcttcctggaccccctgctgagccccagcctgatggaggactacgagctgagacagctggtgctggaggtgatgcacaacctgatggacagacacgacaacagagccaagctgagaggcatcagaatcatccccgacgtggccgacctgaagatcaagagagagaagatctgcagacaggacaccagcttcatgaagaagaacggccagcagctgtacagacacatctacctgggctgcaaggaggaggacaacgtgcagaagaactacgagctgctgtacaccagcctggccctgatcaccatcgagctggccaacgaggaggtggtgatcgacctgatcagactggccatcgccctgcaggacagcgccatcatcaacgaggacaacctgcccatgttccacagatgcggcatcatggccctggtggccgcctacctgaacttcgtgagccagatgatcgccgtgcccgccttctgccagcacgtgagcaaggtgatcgagatcagaaccatggaggccccctacttcctgcccgagcacatcttcagagacaagtgcatgctgcccaagagcctggagaagcacgagaaggacctgtacttcctgaccaacaagatcgccgagagcctgggcggcagcggctacagcgtggagagactgagcgtgccctacgtgccccaggtgaccgacgaggacagactgagcagaagaaagagcatcgtggacaccgtgagcatccaggtggacatcctgagcaacaacgtgcccagcgacgacgtggtgagcaacaccgaggagatcaccttcgaggccctgaagaaggccatcgacaccagcggcatggaggagcaggagaaggagaagagaagactggtgatcgagaagttccagaaggcccccttcgaggagatcgccgcccagtgcgagagcaaggccaacctgctgcacgacagactggcccagatcctggagctgaccatcagacccccccccagccccagcggcaccctgaccatcaccagcggccacgcccagtaccagagcgtgcccgtgtacgagatgaagttccccgacctgtgcgtgtactag

SEQ ID NO: 80153 - DNA, 2334 bp, synthetic construct
  misc_feature 1..2334: note = Description of Artificial Sequence: Synthetic coding sequence
  source 1..2334: mol_type = other DNA
atgcccaagggcgtgtgctgctgctgcagcgccctgagacccagatacaagagactggtggacaacatcttccccgaggaccccaaggacggcctggtgaagaccgacatggagaagctgaccttctacgccgtgagcgcccccgagaagctggacagaatcggcagctacctggccgagagactgagcagagacgtggtgagacacagaagcggctacgtgctgatcgccatggaggccctggaccagctgctgatggcctgccacagccagagcatcaagcccttcgtggagagcttcctgcacatggtggccaagctgctggagagcggcgagcccaagctgcaggtgctgggcaccaacagcttcgtgaagttcgccaacatcgaggaggacacccccagctaccacagaagatacgacttcttcgtgagcagattcagcgccatgtgccacagctgccacagcgaccccgagatcagaaccgagatcagaatcgccggcatcagaggcatccagggcgtggtgagaaagaccgtgaacgacgagctgagagccaccatctgggagccccagcacatggacaagatcgtgcccagcctgctgttcaacatgcagaagatcgaggaggtggacagcagaatcggcccccccagcagccccagcgccaccgacaaggaggagaaccccgccgtgctggccgagaactgcttcagagagctgctgggcagagccaccttcggcaacatgaacaacgccgtgagacccgtgttcgcccacctggaccaccacaagctgtgggaccccaacgagttcgccgtgcactgcttcaagatcatcatgtacagcatccaggcccagtacagccaccacgtgatccaggagatcctgggccacctggacgccagaaagaaggacgcccccagagtgagagccggcatcatccaggtgctgctggaggccgtggccatcgccgccaagggcagcatcggccccaccgtgctggaggtgttcaacaccctgctgaagcacctgagactgagcgtggagttcgaggccaacgacctgcagggcggcagcgtgggcagcgtgaacctgaacaccagcagcaaggacaacgacgagaagatcgtgcagaacgccatcatccagaccatcggcttcttcggcagcaacctgcccgactaccagagaagcgagatcatgatgttcatcatgggcaaggtgcccgtgttcggcaccagcacccacaccctggacatcagccagctgggcgacctgggcaccagaagaatccagatcatgctgctgagaagcctgctgatggtgaccagcggctacaaggccaagaccatcgtgaccgccctgcccggcagcttcctggaccccctgctgagccccagcctgatggaggactacgagctgagacagctggtgctggaggtgatgcacaacctgatggacagacacgacaacagagccaagctgagaggcatcagaatcatccccgacgtggccgacctgaagatcaagagagagaagatctgcagacaggacaccagcttcatgaagaagaacggccagcagctgtacagacacatctacctgggctgcaaggaggaggacaacgtgcagaagaactacgagctgctgtacaccagcctggccctgatcaccatcgagctggccaacgaggaggtggtgatcgacctgatcagactggccatcgccctgcaggacagcgccatcatcaacgaggacaacctgcccatgttccacagatgcggcatcatggccctggtggccgcctacctgaacttcgtgagccagatgatcgccgtgcccgccttctgccacaagatcgccgagagcctgggcggcagcggctacagcgtggagagactgagcgtgccctacgtgccccaggtgaccgacgaggacagactgagcagaagaaagagcatcgtggacaccgtgagcatccaggtggacatcctgagcaacaacgtgcccagcgacgacgtggtgagcaacaccgaggagatcaccttcgaggccctgaagaaggccatcgacaccagcggcatggaggagcaggagaaggagaagagaagactggtgatcgagaagttccagaaggcccccttcgaggagatcgccgcccagtgcgagagcaaggccaacctgctgcacgacagactggcccagatcctggagctgaccatcagacccccccccagccccagcggcaccctgaccatcaccagcggccacgcccagtaccagagcgtgcccgtgtacgagatgaagttccccgacctgtgcgtgtactag

SEQ ID NO: 80154 - DNA, 603 bp, synthetic construct
  misc_feature 1..603: note = Description of Artificial Sequence: Synthetic coding sequence
  source 1..603: mol_type = other DNA
atgctggccagactgctgaagttcgaggaggccccctacttcctgcccgagcacatcttcagagacaagtgcatgctgcccaagagcctggagaagcacgagaaggacctgtacttcctgaccaacaagatcgccgagagcctgggcggcagcggctacagcgtggagagactgagcgtgccctacgtgccccaggtgaccgacgaggacagactgagcagaagaaagagcatcgtggacaccgtgagcatccaggtggacatcctgagcaacaacgtgcccagcgacgacgtggtgagcaacaccgaggagatcaccttcgaggccctgaagaaggccatcgacaccagcggcatggaggagcaggagaaggagaagagaagactggtgatcgagaagttccagaaggcccccttcgaggagatcgccgcccagtgcgagagcaaggccaacctgctgcacgacagactggcccagatcctggagctgaccatcagacccccccccagccccagcggcaccctgaccatcaccagcggccacgcccagtaccagagcgtgcccgtgtacgagatgaagttccccgacctgtgcgtgtactag

SEQ ID NO: 80155 - DNA, 2358 bp, synthetic construct
  misc_feature 1..2358: note = Description of Artificial Sequence: Synthetic coding sequence
  source 1..2358: mol_type = other DNA
atggagaagctgaccttctacgccgtgagcgcccccgagaagctggacagaatcggcagctacctggccgagagactgagcagagacgtggtgagacacagaagcggctacgtgctgatcgccatggaggccctggaccagctgctgatggcctgccacagccagagcatcaagcccttcgtggagagcttcctgcacatggtggccaagctgctggagagcggcgagcccaagctgcaggtgctgggcaccaacagcttcgtgaagttcgccaacatcgaggaggacacccccagctaccacagaagatacgacttcttcgtgagcagattcagcgccatgtgccacagctgccacagcgaccccgagatcagaaccgagatcagaatcgccggcatcagaggcatccagggcgtggtgagaaagaccgtgaacgacgagctgagagccaccatctgggagccccagcacatggacaagatcgtgcccagcctgctgttcaacatgcagaagatcgaggaggtggacagcagaatcggcccccccagcagccccagcgccaccgacaaggaggagaaccccgccgtgctggccgagaactgcttcagagagctgctgggcagagccaccttcggcaacatgaacaacgccgtgagacccgtgttcgcccacctggaccaccacaagctgtgggaccccaacgagttcgccgtgcactgcttcaagatcatcatgtacagcatccaggcccagtacagccaccacgtgatccaggagatcctgggccacctggacgccagaaagaaggacgcccccagagtgagagccggcatcatccaggtgctgctggaggccgtggccatcgccgccaagggcagcatcggccccaccgtgctggaggtgttcaacaccctgctgaagcacctgagactgagcgtggagttcgaggccaacgacctgcagggcggcagcgtgggcagcgtgaacctgaacaccagcagcaaggacaacgacgagaagatcgtgcagaacgccatcatccagaccatcggcttcttcggcagcaacctgcccgactaccagagaagcgagatcatgatgttcatcatgggcaaggtgcccgtgttcggcaccagcacccacaccctggacatcagccagctgggcgacctgggcaccagaagaatccagatcatgctgctgagaagcctgctgatggtgaccagcggctacaaggccaagaccatcgtgaccgccctgcccggcagcttcctggaccccctgctgagccccagcctgatggaggactacgagctgagacagctggtgctggaggtgatgcacaacctgatggacagacacgacaacagagccaagctgagaggcatcagaatcatccccgacgtggccgacctgaagatcaagagagagaagatctgcagacaggacaccagcttcatgaagaagaacggccagcagctgtacagacacatctacctgggctgcaaggaggaggacaacgtgcagaagaactacgagctgctgtacaccagcctggccctgatcaccatcgagctggccaacgaggaggtggtgatcgacctgatcagactggccatcgccctgcaggacagcgccatcatcaacgaggacaacctgcccatgttccacagatgcggcatcatggccctggtggccgcctacctgaacttcgtgagccagatgatcgccgtgcccgccttctgccagcacgtgagcaaggtgatcgagatcagaaccatggaggccccctacttcctgcccgagcacatcttcagagacaagtgcatgctgcccaagagcctggagaagcacgagaaggacctgtacttcctgaccaacaagatcgccgagagcctgggcggcagcggctacagcgtggagagactgagcgtgccctacgtgccccaggtgaccgacgaggacagactgagcagaagaaagagcatcgtggacaccgtgagcatccaggtggacatcctgagcaacaacgtgcccagcgacgacgtggtgagcaacaccgaggagatcaccttcgaggccctgaagaaggccatcgacaccagcggcatggaggagcaggagaaggagaagagaagactggtgatcgagaagttccagaaggcccccttcgaggagatcgccgcccagtgcgagagcaaggccaacctgctgcacgacagactggcccagatcctggagctgaccatcagacccccccccagccccagcggcaccctgaccatcaccagcggccacgcccagtaccagagcgtgcccgtgtacgagatgaagttccccgacctgtgcgtgtactag

SEQ ID NO: 80156 - DNA, 1482 bp, synthetic construct
  misc_feature 1..1482: note = Description of Artificial Sequence: Synthetic coding sequence
  source 1..1482: mol_type = other DNA
atgctgaaggccctgttcctgaccatgctgaccctggccctggtgaagagccaggacaccgaggagaccatcacctacacccagtgcaccgacggctacgagtgggaccccgtgagacagcagtgcaaggacatcgacgagtgcgacatcgtgcccgacgcctgcaagggcggcatgaagtgcgtgaaccactacggcggctacctgtgcctgcccaagaccgcccagatcatcgtgaacaacgagcagccccagcaggagacccagcccgccgagggcaccagcggcgccaccaccggcgtggtggccgccagcagcatggccaccagcggcgtgctgcccggcggcggcttcgtggccagcgccgccgccgtggccggccccgagatgcagaccggcagaaacaacttcgtgatcagaagaaaccccgccgacccccagagaatccccagcaaccccagccacagaatccagtgcgccgccggctacgagcagagcgagcacaacgtgtgccaggacatcgacgagtgcaccgccggcacccacaactgcagagccgaccaggtgtgcatcaacctgagaggcagcttcgcctgccagtgcccccccggctaccagaagagaggcgagcagtgcgtggacatcgacgagtgcaccatccccccctactgccaccagagatgcgtgaacacccccggcagcttctactgccagtgcagccccggcttccagctggccgccaacaactacacctgcgtggacatcaacgagtgcgacgccagcaaccagtgcgcccagcagtgctacaacatcctgggcagcttcatctgccagtgcaaccagggctacgagctgagcagcgacagactgaactgcgaggacatcgacgagtgcagaaccagcagctacctgtgccagtaccagtgcgtgaacgagcccggcaagttcagctgcatgtgcccccagggctaccaggtggtgagaagcagaacctgccaggacatcaacgagtgcgagaccaccaacgagtgcagagaggacgagatgtgctggaactaccacggcggcttcagatgctaccccagaaacccctgccaggacccctacatcctgacccccgagaacagatgcgtgtgccccgtgagcaacgccatgtgcagagagctgccccagagcatcgtgtacaagtacatgagcatcagaagcgacagaagcgtgcccagcgacatcttccagatccaggccaccaccatctacgccaacaccatcaacaccttcagaatcaagagcggcaacgagaacggcgagttctacctgagacagaccagccccgtgagcgccatgctggtgctggtgaagagcctgagcggccccagagagcacatcgtggacctggagatgctgaccgtgagcagcatcggcaccttcagaaccagcagcgtgctgagactgaccatcatcgtgggccccttcagcttctag

SEQ ID NO: 80157 - DNA, 1482 bp, synthetic construct; identical to SEQ ID NO: 80156
  misc_feature 1..1482: note = Description of Artificial Sequence: Synthetic coding sequence
  source 1..1482: mol_type = other DNA

SEQ ID NO: 80158 - DNA, 1482 bp, synthetic construct; identical to SEQ ID NO: 80156
  misc_feature 1..1482: note = Description of Artificial Sequence: Synthetic coding sequence
  source 1..1482: mol_type = other DNA

SEQ ID NO: 80159 - DNA, 1050 bp, synthetic construct
  misc_feature 1..1050: note = Description of Artificial Sequence: Synthetic coding sequence
  source 1..1050: mol_type = other DNA
atggaggacaccagcgccttcagaaagcagcccagactgctgagcatcatgaacagcctgagcagcgagcacaacgtgtgccaggacatcgacgagtgcaccgccggcacccacaactgcagagccgaccaggtgtgcatcaacctgagaggcagcttcgcctgccagtgcccccccggctaccagaagagaggcgagcagtgcgtggacatcgacgagtgcaccatccccccctactgccaccagagatgcgtgaacacccccggcagcttctactgccagtgcagccccggcttccagctggccgccaacaactacacctgcgtggacatcaacgagtgcgacgccagcaaccagtgcgcccagcagtgctacaacatcctgggcagcttcatctgccagtgcaaccagggctacgagctgagcagcgacagactgaactgcgaggacatcgacgagtgcagaaccagcagctacctgtgccagtaccagtgcgtgaacgagcccggcaagttcagctgcatgtgcccccagggctaccaggtggtgagaagcagaacctgccaggacatcaacgagtgcgagaccaccaacgagtgcagagaggacgagatgtgctggaactaccacggcggcttcagatgctaccccagaaacccctgccaggacccctacatcctgacccccgagaacagatgcgtgtgccccgtgagcaacgccatgtgcagagagctgccccagagcatcgtgtacaagtacatgagcatcagaagcgacagaagcgtgcccagcgacatcttccagatccaggccaccaccatctacgccaacaccatcaacaccttcagaatcaagagcggcaacgagaacggcgagttctacctgagacagaccagccccgtgagcgccatgctggtgctggtgaagagcctgagcggccccagagagcacatcgtggacctggagatgctgaccgtgagcagcatcggcaccttcagaaccagcagcgtgctgagactgaccatcatcgtgggccccttcagcttctag

SEQ ID NO: 80160 - DNA, 159 bp, synthetic construct
  misc_feature 1..159: note = Description of Artificial Sequence: Synthetic coding sequence
  source 1..159: mol_type = other DNA
atgctgaaggccctgttcctgaccatgctgaccctggccctggtgaagagccaggacaccgaggagaccatcacctacacccagtgcaccgacggctacgagtgggaccccgtgagacagcagtgcaaggacatcgacgagtgcgacatcgtgccctag

SEQ ID NO: 80161 - DNA, 84 bp, synthetic construct
  misc_feature 1..84: note = Description of Artificial Sequence: Synthetic coding sequence
  source 1..84: mol_type = other DNA
atgctgaaggccctgttcctgaccatgctgaccctggccctggtgaagagccaggacaccgaggagaccatcacctacacctag

SEQ ID NO: 80162 - DNA, 1068 bp, synthetic construct
  misc_feature 1..1068: note = Description of Artificial Sequence: Synthetic coding sequence
  source 1..1068: mol_type = other DNA
atgaagtgcgtgaaccactacggcggctacctgtgcctgcccaagaccgcccagatcatcgtgaacaacgagcagccccagcaggagacccagcccgccgagggcaccagcggcgccaccaccggcgtggtggccgccagcagcatggccaccagcggcgtgctgcccggcggcggcttcgtggccagcgccgccgccgtggccggccccgagatgcagaccggcagaaacaacttcgtgatcagaagaaaccccgccgacccccagagaatccccagcaaccccagccacagaatccagtgcgccgccggctacgagcagagcgagcacaacgtgtgccaggacatcgacgagtgcaccgccggcacccacaactgcagagccgaccaggtgtgcatcaacctgagaggcagcttcgcctgccagtgcccccccggctaccagaagagaggcgagcagtgcgtggacatcgacgagtgcagaaccagcagctacctgtgccagtaccagtgcgtgaacgagcccggcaagttcagctgcatgtgcccccagggctaccaggtggtgagaagcagaacctgccaggacatcaacgagtgcgagaccaccaacgagtgcagagaggacgagatgtgctggaactaccacggcggcttcagatgctaccccagaaacccctgccaggacccctacatcctgacccccgagaacagatgcgtgtgccccgtgagcaacgccatgtgcagagagctgccccagagcatcgtgtacaagtacatgagcatcagaagcgacagaagcgtgcccagcgacatcttccagatccaggccaccaccatctacgccaacaccatcaacaccttcagaatcaagagcggcaacgagaacggcgagttctacctgagacagaccagccccgtgagcgccatgctggtgctggtgaagagcctgagcggccccagagagcacatcgtggacctggagatgctgaccgtgagcagcatcggcaccttcagaaccagcagcgtgctgagactgaccatcatcgtgggccccttcagcttctag

SEQ ID NO: 80163 - DNA, 264 bp, synthetic construct
  misc_feature 1..264: note = Description of Artificial Sequence: Synthetic coding sequence
  source 1..264: mol_type = other DNA
atgctgaaggccctgttcctgaccatgctgaccctggccctggtgaagagccaggacaccgaggagaccatcacctacacccagtgcaccgacggctacgagtgggaccccgtgagacagcagtgcaaggacatcgacgagtgcgacatcgtgcccgacgcctgcaagggcggcatgaagtgcgtgaaccactacggcggctacctgtgcctgcccaagaccgcccagatcatcgtgaacaacgagcagccccagcaggagtag

SEQ ID NO: 80164 - DNA, 519 bp, synthetic construct
  misc_feature 1..519: note = Description of Artificial Sequence: Synthetic coding sequence
  source 1..519: mol_type = other DNA
atgctgaaggccctgttcctgaccatgctgaccctggccctggtgaagagccaggacaccgaggagaccatcacctacacccagtgcaccgacggctacgagtgggaccccgtgagacagcagtgcaaggacatcgacgagtgcgacatcgtgcccgacgcctgcaagggcggcatgaagtgcgtgaaccactacggcggctacctgtgcctgcccaagaccgcccagatcatcgtgaacaacgagcagccccagcaggagacccagcccgccgagggcaccagcggcgccaccaccggcgtggtggccgccagcagcatggccaccagcggcgtgctgcccggcggcggcttcgtggccagcgccgccgccgtggccggccccgagatgcagaccggcagaaacaacttcgtgatcagaagaaaccccgccgacccccagagaatccccagcaaccccagccacagaatccagtgcgccgccggctacgagcagagcgagcacaacgtgtgccagtag

SEQ ID NO: 80165 - DNA, 360 bp, synthetic construct
  misc_feature 1..360: note = Description of Artificial Sequence: Synthetic coding sequence
  source 1..360: mol_type = other DNA
atgctgaaggccctgttcctgaccatgctgaccctggccctggtgaagagccaggacaccgaggagaccatcacctacacccagtgcaccgacggctacgagtgggaccccgtgagacagcagtgcaaggacatcgacgagtgcgacatcgtgcccgacgcctgcaagggcggcatgaagtgcgtgaaccactacggcggctacctgtgcctgcccaagaccgcccagatcatcgtgaacaacgagcagccccagcaggagacccagcccgccgagggcaccagcggcgccaccaccggcgtggtggccgccagcagcatggccaccagcggcgtgctgcccggcggcggcttcgtgtag

SEQ ID NO: 80166 - DNA, 321 bp, synthetic construct
  misc_feature 1..321: note = Description of Artificial Sequence: Synthetic coding sequence
  source 1..321: mol_type = other DNA
atgctgaaggccctgttcctgaccatgctgaccctggccctggtgaagagccaggacaccgaggagaccatcacctacacccagtgcaccgacggctacgagtgggaccccgtgagacagcagtgcaaggacatcgacgagtgcgacatcgtgcccgacgcctgcaagggcggcatgaagtgcgtgaaccactacggcggctacctgtgcctgcccaagaccgcccagatcatcgtgaacaacgagcagccccagcaggagacccagcccgccgagggcaccagcggcgccaccaccggcgtggtggccgccagcagctag

SEQ ID NO: 80167 - DNA, 189 bp, synthetic construct
  misc_feature 1..189: note = Description of Artificial Sequence: Synthetic coding sequence
  source 1..189: mol_type = other DNA
atgctgaaggccctgttcctgaccatgctgaccctggccctggtgaagagccaggacaccgaggagaccatcacctacacccagtgcaccgacggctacgagtgggaccccgtgagacagcagtgcaaggacatcgacgagtgcgacatcgtgcccgacgcctgcaagggcggcatgaagtgcgtgtag

SEQ ID NO: 80168 - DNA, 1332 bp, synthetic construct
  misc_feature 1..1332: note = Description of Artificial Sequence: Synthetic coding sequence
  source 1..1332: mol_type = other DNA
atgctgccctgcgccagctgcctgcccggcagcctgctgctgtgggccctgctgctgctgctgctgggcagcgccagcccccaggacagcgaggagcccgacagctacaccgagtgcaccgacggctacgagtgggaccccgacagccagcactgcagagacgtgaacgagtgcctgaccatccccgaggcctgcaagggcgagatgaagtgcatcaaccactacggcggctacctgtgcctgcccagaagcgccgccgtgatcaacgacctgcacggcgagggcccccccccccccgtgccccccgcccagcaccccaacccctgcccccccggctacgagcccgacgaccaggacagctgcgtggacgtggacgagtgcgcccaggccctgcacgactgcagacccagccaggactgccacaacctgcccggcagctaccagtgcacctgccccgacggctacagaaagatcggccccgagtgcgtggacatcgacgagtgcagatacagatactgccagcacagatgcgtgaacctgcccggcagcttcagatgccagtgcgagcccggcttccagctgggccccaacaacagaagctgcgtggacgtgaacgagtgcgacatgggcgccccctgcgagcagagatgcttcaacagctacggcaccttcctgtgcagatgccaccagggctacgagctgcacagagacggcttcagctgcagcgacatcgacgagtgcagctacagcagctacctgtgccagtacagatgcatcaacgagcccggcagattcagctgccactgcccccagggctaccagctgctggccaccagactgtgccaggacatcgacgagtgcgagagcggcgcccaccagtgcagcgaggcccagacctgcgtgaacttccacggcggctacagatgcgtggacaccaacagatgcgtggagccctacatccaggtgagcgagaacagatgcctgtgccccgccagcaaccccctgtgcagagagcagcccagcagcatcgtgcacagatacatgaccatcaccagcgagagaagcgtgcccgccgacgtgttccagatccaggccaccagcgtgtaccccggcgcctacaacgccttccagatcagagccggcaacagccagggcgacttctacatcagacagatcaacaacgtgagcgccatgctggtgctggccagacccgtgaccggccccagagagtacgtgctggacctggagatggtgaccatgaacagcctgatgagctacagagccagcagcgtgctgagactgaccgtgttcgtgggcgcctacaccttctag

SEQ ID NO: 80169 - DNA, 609 bp, synthetic construct
  misc_feature 1..609: note = Description of Artificial Sequence: Synthetic coding sequence
  source 1..609: mol_type = other DNA
atgctgccctgcgccagctgcctgcccggcagcctgctgctgtgggccctgctgctgctgctgctgggcagcgccagcccccaggacagcgaggagcccgacagctacaccgagtgcaccgacggctacgagtgggaccccgacagccagcactgcagagacgtgaacgagtgcctgaccatccccgaggcctgcaagggcgagatgaagtgcatcaaccactacggcggctacctgtgcctgcccagaagcgccgccgtgatcaacgacctgcacggcgagggcccccccccccccgtgccccccgcccagcaccccaacccctgcccccccggctacgagcccgacgaccaggacagctgcgtggacgtggacgagtgcgcccaggccctgcacgactgcagacccagccaggactgccacaacctgcccggcagctaccagtgcacctgccccgacggctacagaaagatcggccccgagtgcgtggacatcgacgagtgcagatacagatactgccagcacagatgcgtgaacctgcccggcagcttcagatgccagtgcgagcccggcttccagctgggccccaacaacagaagctgcgtgtag

SEQ ID NO: 80170 - DNA, 552 bp, synthetic construct
  misc_feature 1..552: note = Description of Artificial Sequence: Synthetic coding sequence
  source 1..552: mol_type = other DNA
atgctgccctgcgccagctgcctgcccggcagcctgctgctgtgggccctgctgctgctgctgctgggcagcgccagcccccaggacagcgaggagcccgacagctacaccgagtgcaccgacggctacgagtgggaccccgacagccagcactgcagagacgtgaacgagtgcctgaccatccccgaggcctgcaagggcgagatgaagtgcatcaaccactacggcggctacctgtgcctgcccagaagcgccgccgtgatcaacgacctgcacggcgagggcccccccccccccgtgccccccgcccagcaccccaacccctgcccccccggctacgagcccgacgaccaggacagctgcgtggacgtggacgagtgcgcccaggccctgcacgactgcagacccagccaggactgccacaacctgcccggcagctaccagtgcacctgccccgacggctacagaaagatcggccccgagtgcgtggacatcgacgagtgcagatacagatactgccagcacagatgcgtgaacctgcccggcagctag

SEQ ID NO: 80171 - DNA, 1332 bp, synthetic construct; identical to SEQ ID NO: 80168
  misc_feature 1..1332: note = Description of Artificial Sequence: Synthetic coding sequence
  source 1..1332: mol_type = other DNA

SEQ ID NO: 80172 - DNA, 2466 bp, synthetic construct
  misc_feature 1..2466: note = Description of Artificial Sequence: Synthetic coding sequence
  source 1..2466: mol_type = other DNA
atgagaggcttcaacctgctgctgttctggggctgctgcgtgatgcacagctgggagggccacatcagacccaccagaaagcccaacaccaagggcaacaactgcagagacagcaccctgtgccccgcctacgccacctgcaccaacaccgtggacagctactactgcgcctgcaagcagggcttcctgagcagcaacggccagaaccacttcaaggaccccggcgtgagatgcaaggacatcgacgagtgcagccagagcccccagccctgcggccccaacagcagctgcaagaacctgagcggcagatacaagtgcagctgcctggacggcttcagcagccccaccggcaacgactgggtgcccggcaagcccggcaacttcagctgcaccgacatcaacgagtgcctgaccagcagcgtgtgccccgagcacagcgactgcgtgaacagcatgggcagctacagctgcagctgccaggtgggcttcatcagcagaaacagcacctgcgaggacgtggacgagtgcgccgaccccagagcctgccccgagcacgccacctgcaacaacaccgtgggcaactacagctgcttctgcaaccccggcttcgagagcagcagcggccacctgagcttccagggcctgaaggccagctgcgaggacatcgacgagtgcaccgagatgtgccccatcaacagcacctgcaccaacacccccggcagctacttctgcacctgccaccccggcttcgcccccagcaacggccagctgaacttcaccgaccagggcgtggagtgcagagacatcgacgagtgcagacaggaccccagcacctgcggccccaacagcatctgcaccaacgccctgggcagctacagctgcggctgcatcgccggcttccaccccaaccccgagggcagccagaaggacggcaacttcagctgccagagagtgctgttcaagtgcaaggaggacgtgatccccgacaacaagcagatccagcagtgccaggagggcaccgccgtgaagcccgcctacgtgagcttctgcgcccagatcaacaacatcttcagcgtgctggacaaggtgtgcgagaacaagaccaccgtggtgagcctgaagaacaccaccgagagcttcgtgcccgtgctgaagcagatcagcacctggaccaagttcaccaaggaggagaccagcagcctggccaccgtgttcctggagagcgtggagagcatgaccctggccagcttctggaagcccagcgccaacatcacccccgccgtgagaaccgagtacctggacatcgagagcaaggtgatcaacaaggagtgcagcgaggagaacgtgaccctggacctggtggccaagggcgacaagatgaagatcggctgcagcaccatcgaggagagcgagagcaccgagaccaccggcgtggccttcgtgagcttcgtgggcatggagagcgtgctgaacgagagattcttcaaggaccaccaggcccccctgaccaccagcgagatcaagctgaagatgaacagcagagtggtgggcggcatcatgaccggcgagaagaaggacggcttcagcgaccccatcatctacaccctggagaacatccagcccaagcagaagttcgagagacccatctgcgtgagctggagcaccgacgtgaagggcggcagatggaccagcttcggctgcgtgatcctggaggccagcgagacctacaccatctgcagctgcaaccagatggccaacctggccgtgatcatggccagcggcgagctgaccatgggctgcgccatcatcgccggcttcctgcactacctgttcctggcctgcttcttctggatgctggtggaggccgtgatcctgttcctgatggtgagaaacctgaaggtggtgaactacttcagcagcagaaacatcaagatgctgcacatctgcgccttcggctacggcctgcccatgctggtggtggtgatcagcgccagcgtgcagccccagggctacggcatgcacaacagatgctggctgaacaccgagaccggcttcatctggagcttcctgggccccgtgtgcaccgtgatcgtgatcaacagcctgctgctgacctggaccctgtggatcctgagacagagactgagcagcgtgaacgccgaggtgagcaccctgaaggacaccagactgctgaccttcaaggccttcgcccagctgttcatcctgggctgcagctgggtgctgggcatcttccagatcggccccgtggccggcgtgatggcctacctgttcaccatcatcaacagcctgcagggcgccttcatcttcctgatccactgcctgctgaacggccaggtgagagaggagtacaagagatggatcaccggcaagaccaagcccagcagccagagccagaccagcagaatcctgctgagcagcatgcccagcgccagcaagaccggctag

SEQ ID NO: 80173 - DNA, 2661 bp, synthetic construct
  misc_feature 1..2661: note = Description of Artificial Sequence: Synthetic coding sequence
  source 1..2661: mol_type = other DNA
atgagaggcttcaacctgctgctgttctggggctgctgcgtgatgcacagctgggagggccacatcagacccaccagaaagcccaacaccaagggcaacaactgcagagacagcaccctgtgccccgcctacgccacctgcaccaacaccgtggacagctactactgcgcctgcaagcagggcttcctgagcagcaacggccagaaccacttcaaggaccccggcgtgagatgcaaggacatcgacgagtgcagccagagcccccagccctgcggccccaacagcagctgcaagaacctgagcggcagatacaagtgcagctgcctggacggcttcagcagccccaccggcaacgactgggtgcccggcaagcccggcaacttcagctgcaccgacatcaacgagtgcctgaccagcagcgtgtgccccgagcacagcgactgcgtgaacagcatgggcagctacagctgcagctgccaggtgggcttcatcagcagaaacagcacctgcgaggacgtggacgagtgcgccgaccccagagcctgccccgagcacgccacctgcaacaacaccgtgggcaactacagctgcttctgcaaccccggcttcgagagcagcagcggccacctgagcttccagggcctgaaggccagctgcgaggacatcgacgagtgcaccgagatgtgccccatcaacagcacctgcaccaacacccccggcagctacttctgcacctgccaccccggcttcgcccccagcaacggccagctgaacttcaccgaccagggcgtggagtgcagagacatcgacgagtgcagacaggaccccagcacctgcggccccaacagcatctgcaccaacgccctgggcagctacagctgcggctgcatcgccggcttccaccccaaccccgagggcagccagaaggacggcaacttcagctgccagagagtgctgttcaagtgcaaggaggacgtgatccccgacaacaagcagatccagcagtgccaggagggcaccgccgtgaagcccgcctacgtgagcttctgcgcccagatcaacaacatcttcagcgtgctggacaaggtgtgcgagaacaagaccaccgtggtgagcctgaagaacaccaccgagagcttcgtgcccgtgctgaagcagatcagcacctggaccaagttcaccaaggaggagaccagcagcctggccaccgtgttcctggagagcgtggagagcatgaccctggccagcttctggaagcccagcgccaacatcacccccgccgtgagaaccgagtacctggacatcgagagcaaggtgatcaacaaggagtgcagcgaggagaacgtgaccctggacctggtggccaagggcgacaagatgaagatcggctgcagcaccatcgaggagagcgagagcaccgagaccaccggcgtggccttcgtgagcttcgtgggcatggagagcgtgctgaacgagagattcttcaaggaccaccaggcccccctgaccaccagcgagatcaagctgaagatgaacagcagagtggtgggcggcatcatgaccggcgagaagaaggacggcttcagcgaccccatcatctacaccctggagaacatccagcccaagcagaagttcgagagacccatctgcgtgagctggagcaccgacgtgaagggcggcagatggaccagcttcggctgcgtgatcctggaggccagcgagacctacaccatctgcagctgcaaccagatggccaacctggccgtgatcatggccagcggcgagctgaccatggacttcagcctgtacatcatcagccacgtgggcatcatcatcagcctggtgtgcctggtgctggccatcgccaccttcctgctgtgcagaagcatcagaaaccacaacacctacctgcacctgcacctgtgcgtgtgcctgctgctggccaagaccctgttcctggccggcatccacaagaccgacaacaagatgggctgcgccatcatcgccggcttcctgcactacctgttcctggcctgcttcttctggatgctggtggaggccgtgatcctgttcctgatggtgagaaacctgaaggtggtgaactacttcagcagcagaaacatcaagatgctgcacatctgcgccttcggctacggcctgcccatgctggtggtggtgatcagcgccagcgtgcagccccagggctacggcatgcacaacagatgctggctgaacaccgagaccggcttcatctggagcttcctgggccccgtgtgcaccgtgatcgtgatcaacagcctgctgctgacctggaccctgtggatcctgagacagagactgagcagcgtgaacgccgaggtgagcaccctgaaggacaccagactgctgaccttcaaggccttcgcccagctgttcatcctgggctgcagctgggtgctgggcatcttccagatcggccccgtggccggcgtgatggcctacctgttcaccatcatcaacagcctgcagggcgccttcatcttcctgatccactgcctgctgaacggccaggtgagagaggagtacaagagatggatcaccggcaagaccaagcccagcagccagagccagaccagcagaatcctgctgagcagcatgcccagcgccagcaagaccggctag

SEQ ID NO: 80174 - DNA, 2604 bp, synthetic construct
  misc_feature 1..2604: note = Description of Artificial Sequence: Synthetic coding sequence
  source 1..2604: mol_type = other DNA
atgagaggcttcaacctgctgctgttctggggctgctgcgtgatgcacagctgggagggccacatcagacccaccagaaagcccaacaccaagggcaacaactgcagagacagcaccctgtgccccgcctacgccacctgcaccaacaccgtggacagctactactgcgcctgcaagcagggcttcctgagcagcaacggccagaaccacttcaaggaccccggcgtgagatgcaaggacatcaacgagtgcctgaccagcagcgtgtgccccgagcacagcgactgcgtgaacagcatgggcagctacagctgcagctgccaggtgggcttcatcagcagaaacagcacctgcgaggacgtggacgagtgcgccgaccccagagcctgccccgagcacgccacctgcaacaacaccgtgggcaactacagctgcttctgcaaccccggcttcgagagcagcagcggccacctgagcttccagggcctgaaggccagctgcgaggacatcgacgagtgcaccgagatgtgccccatcaacagcacctgcaccaacacccccggcagctacttctgcacctgccaccccggcttcgcccccagcaacggccagctgaacttcaccgaccagggcgtggagtgcagagacatcgacgagtgcagacaggaccccagcacctgcggccccaacagcatctgcaccaacgccctgggcagctacagctgcggctgcatcgccggcttccaccccaaccccgagggcagccagaaggacggcaacttcagctgccagagagtgctgttcaagtgcaaggaggacgtgatccccgacaacaagcagatccagcagtgccaggagggcaccgccgtgaagcccgcctacgtgagcttctgcgcccagatcaacaacatcttcagcgtgctggacaaggtgtgcgagaacaagaccaccgtggtgagcctgaagaacaccaccgagagcttcgtgcccgtgctgaagcagatcagcacctggaccaagttcaccaaggaggagaccagcagcctggccaccgtgttcctggagagcgtggagagcatgaccctggccagcttctggaagcccagcgccaacatcacccccgccgtgagaaccgagtacctggacatcgagagcaaggtgatcaacaaggagtgcagcgaggagaacgtgaccctggacctggtggccaagggcgacaagatgaagatcggctgcagcaccatcgaggagagcgagagcaccgagaccaccggcgtggccttcgtgagcttcgtgggcatggagagcgtgctgaacgagagattcttcaaggaccaccaggcccccctgaccaccagcgagatcaagctgaagatgaacagcagagtggtgggcggcatcatgaccggcgagaagaaggacggcttcagcgaccccatcatctacaccctggagaacatccagcccaagcagaagttcgagagacccatctgcgtgagctggagcaccgacgtgaagggcggcagatggaccagcttcggctgcgtgatcctggaggccagcgagacctacaccatctgcagctgcaaccagatggccaacctggccgtgatcatggccagcggcgagctgaccatggacttcagcctgtacatcatcagccacgtgggcatcatcatcagcctggtgtgcctggtgctggccatcgccaccttcctgctgtgcagaagcatcagaaaccacaacacctacctgcacctgcacctgtgcgtgtgcctgctgctggccaagaccctgttcctggccggcatccacaagaccgacaacaagatgggctgcgccatcatcgccggcttcctgcactacctgttcctggcctgcttcttctggatgctggtggaggccgtgatcctgttcctgatggtgagaaacctgaaggtggtgaactacttcagcagcagaaacatcaagatgctgcacatctgcgccttcggctacggcctgcccatgctggtggtggtgatcagcgccagcgtgcagccccagggctacggcatgcacaacagatgctggctgaacaccgagaccggcttcatctggagcttcctgggccccgtgtgcaccgtgatcgtggtgagcaagtactacaacagcctggccaagtgcgtgctgaaggaggagcagggcgacctgagagacctggagttccccggcacctgcgccgccgagagaatcaacagcctgctgctgacctggaccctgtggatcctgagacagagactgagcagcgtgaacgccgaggtgagcaccctgaaggacaccagactgctgaccttcaaggccttcgcccagctgttcatcctgggctgcagctgggtgctgggcatcttccagatcggccccgtggccggcgtgatggcctacctgttcaccatcatcaacagcctgcagggcgccttcatcttcctgatccactgcctgctgaacggccaggtgagagaggagtacaagagatggatcaccggcaagaccaagcccagcagccagagccagaccagcagaatcctgctgagcagcatgcccagcgccagcaagaccggctag

SEQ ID NO: 80175 - DNA, 2238 bp, synthetic construct
  misc_feature 1..2238: note = Description of Artificial Sequence: Synthetic coding sequence
  source 1..2238: mol_type = other DNA
atgagaggcttcaacctgctgctgttctggggctgctgcgtgatgcacagctgggagggccacatcagacccaccagaaagcccaacaccaagggcaacaactgcagagacagcaccctgtgccccgcctacgccacctgcaccaacaccgtggacagctactactgcgcctgcaagcagggcttcctgagcagcaacggccagaaccacttcaaggaccccggcgtgagatgcaaggacatcgacgagtgcaccgagatgtgccccatcaacagcacctgcaccaacacccccggcagctacttctgcacctgccaccccggcttcgcccccagcaacggccagctgaacttcaccgaccagggcgtggagtgcagagacatcgacgagtgcagacaggaccccagcacctgcggccccaacagcatctgcaccaacgccctgggcagctacagctgcggctgcatcgccggcttccaccccaaccccgagggcagccagaaggacggcaacttcagctgccagagagtgctgttcaagtgcaaggaggacgtgatccccgacaacaagcagatccagcagtgccaggagggcaccgccgtgaagcccgcctacgtgagcttctgcgcccagatcaacaacatcttcagcgtgctggacaaggtgtgcgagaacaagaccaccgtggtgagcctgaagaacaccaccgagagcttcgtgcccgtgctgaagcagatcagcacctggaccaagttcaccaaggaggagaccagcagcctggccaccgtgttcctggagagcgtggagagcatgaccctggccagcttctggaagcccagcgccaacatcacccccgccgtgagaaccgagtacctggacatcgagagcaaggtgatcaacaaggagtgcagcgaggagaacgtgaccctggacctggtggccaagggcgacaagatgaagatcggctgcagcaccatcgaggagagcgagagcaccgagaccaccggcgtggccttcgtgagcttcgtgggcatggagagcgtgctgaacgagagattcttcaaggaccaccaggcccccctgaccaccagcgagatcaagctgaagatgaacagcagagtggtgggcggcatcatgaccggcgagaagaaggacggcttcagcgaccccatcatctacaccctggagaacatccagcccaagcagaagttcgagagacccatctgcgtgagctggagcaccgacgtgaagggcggcagatggaccagcttcggctgcgtgatcctggaggccagcgagacctacaccatctgcagctgcaaccagatggccaacctggccgtgatcatggccagcggcgagctgaccatggacttcagcctgtacatcatcagccacgtgggcatcatcatcagcctggtgtgcctggtgctggccatcgccaccttcctgctgtgcagaagcatcagaaaccacaacacctacctgcacctgcacctgtgcgtgtgcctgctgctggccaagaccctgttcctggccggcatccacaagaccgacaacaagatgggctgcgccatcatcgccggcttcctgcactacctgttcctggcctgcttcttctggatgctggtggaggccgtgatcctgttcctgatggtgagaaacctgaaggtggtgaactacttcagcagcagaaacatcaagatgctgcacatctgcgccttcggctacggcctgcccatgctggtggtggtgatcagcgccagcgtgcagccccagggctacggcatgcacaacagatgctggctgaacaccgagaccggcttcatctggagcttcctgggccccgtgtgcaccgtgatcgtgatcaacagcctgctgctgacctggaccctgtggatcctgagacagagactgagcagcgtgaacgccgaggtgagcaccctgaaggacaccagactgctgaccttcaaggccttcgcccagctgttcatcctgggctgcagctgggtgctgggcatcttccagatcggccccgtggccggcgtgatggcctacctgttcaccatcatcaacagcctgcagggcgccttcatcttcctgatccactgcctgctgaacggccaggtgagagaggagtacaagagatggatcaccggcaagaccaagcccagcagccagagccagaccagcagaatcctgctgagcagcatgcccagcgccagcaagaccggctag

SEQ ID NO: 80176 - DNA, 2130 bp, synthetic construct
  misc_feature 1..2130: note = Description of Artificial Sequence: Synthetic coding sequence
  source 1..2130: mol_type = other DNA
atgagaggcttcaacctgctgctgttctggggctgctgcgtgatgcacagctgggagggccacatcagacccaccagaaagcccaacaccaagggcaacaactgcagagacagcaccctgtgccccgcctacgccacctgcaccaacaccgtggacagctactactgcgcctgcaagcagggcttcctgagcagcaacggccagaaccacttcaaggaccccggcgtgagatgcaaggacatcgacgagtgcagccagagcccccagccctgcggccccaacagcagctgcaagaacctgagcggcagatacaagtgcagctgcctggacggcttcagcagccccaccggcaacgactgggtgcccggcaagcccggcaacttcagctgcaccgacatcaacgagtgcctgaccagcagagtgctgttcaagtgcaaggaggacgtgatccccgacaacaagcagatccagcagtgccaggagggcaccgccgtgaagcccgcctacgtgagcttctgcgcccagatcaacaacatcttcagcgtgctggacaaggtgtgcgagaacaagaccaccgtggtgagcctgaagaacaccaccgagagcttcgtgcccgtgctgaagcagatcagcacctggaccaagttcaccaaggaggagaccagcagcctggccaccgtgttcctggagagcgtggagagcatgaccctggccagcttctggaagcccagcgccaacatcacccccgccgtgagaaccgagtacctggacatcgagagcaaggtgatcaacaaggagtgcagcgaggagaacgtgaccctggacctggtggccaagggcgacaagatgaagatcggctgcagcaccatcgaggagagcgagagcaccgagaccaccggcgtggccttcgtgagcttcgtgggcatggagagcgtgctgaacgagagattcttcaaggaccaccaggcccccctgaccaccagcgagatcaagctgaagatgaacagcagagtggtgggcggcatcatgaccggcgagaagaaggacggcttcagcgaccccatcatctacaccctggagaacatccagcccaagcagaagttcgagagacccatctgcgtgagctggagcaccgacgtgaagggcggcagatggaccagcttcggctgcgtgatcctggaggccagcgagacctacaccatctgcagctgcaaccagatggccaacctggccgtgatcatggccagcggcgagctgaccatggacttcagcctgtacatcatcagccacgtgggcatcatcatcagcctggtgtgcctggtgctggccatcgccaccttcctgctgtgcagaagcatcagaaaccacaacacctacctgcacctgcacctgtgcgtgtgcctgctgctggccaagaccctgttcctggccggcatccacaagaccgacaacaagatgggctgcgccatcatcgccggcttcctgcactacctgttcctggcctgcttcttctggatgctggtggaggccgtgatcctgttcctgatggtgagaaacctgaaggtggtgaactacttcagcagcagaaacatcaagatgctgcacatctgcgccttcggctacggcctgcccatgctggtggtggtgatcagcgccagcgtgcagccccagggctacggcatgcacaacagatgctggctgaacaccgagaccggcttcatctggagcttcctgggccccgtgtgcaccgtgatcgtgatcaacagcctgctgctgacctggaccctgtggatcctgagacagagactgagcagcgtgaacgccgaggtgagcaccctgaaggacaccagactgctgaccttcaaggccttcgcccagctgttcatcctgggctgcagctgggtgctgggcatcttccagatcggccccgtggccggcgtgatggcctacctgttcaccatcatcaacagcctgcagggcgccttcatcttcctgatccactgcctgctgaacggccaggtgagagaggagtacaagagatggatcaccggcaagaccaagcccagcagccagagccagaccagcagaatcctgctgagcagcatgcccagcgccagcaagaccggctag

SEQ ID NO: 80177 - DNA, 2466 bp, synthetic construct; identical to SEQ ID NO: 80172
  misc_feature 1..2466: note = Description of Artificial Sequence: Synthetic coding sequence
  source 1..2466: mol_type = other DNA

SEQ ID NO: 80178 - DNA, 1662 bp, synthetic construct
  misc_feature 1..1662: note = Description of Artificial Sequence: Synthetic coding sequence
  source 1..1662: mol_type = other DNA
atgcccctgccctggagcctggccctgcccctgctgctgagctgggtggccggcggcttcggcaacgccgccagcgccagacaccacggcctgctggccagcgccagacagcccggcgtgtgccactacggcaccaagctggcctgctgctacggctggagaagaaacagcaagggcgtgtgcgaggccacctgcgagcccggctgcaagttcggcgagtgcgtgggccccaacaagtgcagatgcttccccggctacaccggcaagacctgcagccaggacgtgaacgagtgcggcatgaagcccagaccctgccagcacagatgcgtgaacacccacggcagctacaagtgcttctgcctgagcggccacatgctgatgcccgacgccacctgcgtgaacagcagaacctgcgccatgatcaactgccagtacagctgcgaggacaccgaggagggcccccagtgcctgtgccccagcagcggcctgagactggcccccaacggcagagactgcctggacatcgacgagtgcgccagcggcaaggtgatctgcccctacaacagaagatgcgtgaacaccttcggcagctactactgcaagtgccacatcggcttcgagctgcagtacatcagcggcagatacgactgcatcgacatcaacgagtgcaccatggacagccacacctgcagccaccacgccaactgcttcaacacccagggcagcttcaagtgcaagtgcaagcagggctacaagggcaacggcctgagatgcagcgccatccccgagaacagcgtgaaggaggtgctgagagcccccggcaccatcaaggacagaatcaagaagctgctggcccacaagaacagcatgaagaagaaggccaagatcaagaacgtgacccccgagcccaccagaacccccacccccaaggtgaacctgcagcccttcaactacgaggagatcgtgagcagaggcggcaacagccacggcggcaagaagggcaacgaggagaagatgaaggagggcctggaggacgagaagagagaggagaaggccctgaagaacgacatcgaggagagaagcctgagaggcgacgtgttcttccccaaggtgaacgaggccggcgagttcggcctgatcctggtgcagagaaaggccctgaccagcaagctggagcacaaggacctgaacatcagcgtggactgcagcttcaaccacggcatctgcgactggaagcaggacagagaggacgacttcgactggaaccccgccgacagagacaacgccatcggcttctacatggccgtgcccgccctggccggccacaagaaggacatcggcagactgaagctgctgctgcccgacctgcagccccagagcaacttctgcctgctgttcgactacagactggccggcgacaaggtgggcaagctgagagtgttcgtgaagaacagcaacaacgccctggcctgggagaagaccaccagcgaggacgagaagtggaagaccggcaagatccagctgtaccagggcaccgacgccaccaagagcatcatcttcgaggccgagagaggcaagggcaagaccggcgagatcgccgtggacggcgtgctgctggtgagcggcctgtgccccgacagcctgctgagcgtggacgactag

SEQ ID NO: 80179 - DNA, 1665 bp, synthetic construct
  misc_feature 1..1665: note = Description of Artificial Sequence: Synthetic coding sequence
  source 1..1665: mol_type = other DNA
atgcccctgccctggagcctggccctgcccctgctgctgagctgggtggccggcggcttcggcaacgccgccagcgccagacaccacggcctgctggccagcgccagacagcccggcgtgtgccactacggcaccaagctggcctgctgctacggctggagaagaaacagcaagggcgtgtgcgaggccacctgcgagcccggctgcaagttcggcgagtgcgtgggccccaacaagtgcagatgcttccccggctacaccggcaagacctgcagccaggacgtgaacgagtgcggcatgaagcccagaccctgccagcacagatgcgtgaacacccacggcagctacaagtgcttctgcctgagcggccacatgctgatgcccgacgccacctgcgtgaacagcagaacctgcgccatgatcaactgccagtacagctgcgaggacaccgaggagggcccccagtgcctgtgccccagcagcggcctgagactggcccccaacggcagagactgcctggacatcgacgagtgcgccagcggcaaggtgatctgcccctacaacagaagatgcgtgaacaccttcggcagctactactgcaagtgccacatcggcttcgagctgcagtacatcagcggcagatacgactgcatcgacatcaacgagtgcaccatggacagccacacctgcagccaccacgccaactgcttcaacacccagggcagcttcaagtgcaagtgcaagcagggctacaagggcaacggcctgagatgcagcgccatccccgagaacagcgtgaaggaggtgctgagagcccccggcaccatcaaggacagaatcaagaagctgctggcccacaagaacagcatgaagaagaaggccaagatcaagaacgtgacccccgagcccaccagaacccccacccccaaggtgaacctgcagcccttcaactacgaggagatcgtgagcagaggcggcaacagccacggcggcaagaagggcaacgaggagaagatgaaggagggcctggaggacgagaagagagaggagaaggccctgaagaacgacatcgaggagagaagcctgagaggcgacgtgttcttccccaaggtgaacgaggccggcgagttcggcctgatcctggtgcagagaaaggccctgaccagcaagctggagcacaaggccgacctgaacatcagcgtggactgcagcttcaaccacggcatctgcgactggaagcaggacagagaggacgacttcgactggaaccccgccgacagagacaacgccatcggcttctacatggccgtgcccgccctggccggccacaagaaggacatcggcagactgaagctgctgctgcccgacctgcagccccagagcaacttctgcctgctgttcgactacagactggccggcgacaaggtgggcaagctgagagtgttcgtgaagaacagcaacaacgccctggcctgggagaagaccaccagcgaggacgagaagtggaagaccggcaagatccagctgtaccagggcaccgacgccaccaagagcatcatcttcgaggccgagagaggcaagggcaagaccggcgagatcgccgtggacggcgtgctgctggtgagcggcctgtgccccgacagcctgctgagcgtggacgactag

SEQ ID NO: 80180 - DNA, 822 bp, synthetic construct
  misc_feature 1..822: note = Description of Artificial Sequence: Synthetic coding sequence
  source 1..822: mol_type = other DNA
atgagaggcagccaggaggtgctgctgatgtggctgctggtgctggccgtgggcggcaccgagcacgcctacagacccggcagaagagtgtgcgccgtgagagcccacggcgaccccgtgagcgagagcttcgtgcagagagtgtaccagcccttcctgaccacctgcgacggccacagagcctgcagcacctacagaaccatctacagaaccgcctacagaagaagccccggcctggcccccgccagacccagatacgcctgctgccccggctggaagagaaccagcggcctgcccggcgcctgcggcgccgccatctgccagcccccctgcagaaacggcggcagctgcgtgcagcccggcagatgcagatgccccgccggctggagaggcgacacctgccagagcgacgtggacgagtgcagcgccagaagaggcggctgcccccagagatgcgtgaacaccgccggcagctactggtgccagtgctgggagggccacagcctgagcgccgacggcaccctgtgcgtgcccaagggcggcccccccagagtggcccccaaccccaccggcgtggacagcgccatgaaggaggaggtgcagagactgcagagcagagtggacctgctggaggagaagctgcagctggtgctggcccccctgcacagcctggccagccaggccctggagcacggcctgcccgaccccggcagcctgctggtgcacagcttccagcagctgggcagaatcgacagcctgagcgagcagatcagcttcctggaggagcagctgggcagctgcagctgcaagaaggacagctag

SEQ ID NO: 80181 - DNA, 822 bp, synthetic construct; identical to SEQ ID NO: 80180
  misc_feature 1..822: note = Description of Artificial Sequence: Synthetic coding sequence
  source 1..822: mol_type = other DNA

SEQ ID NO: 80182 - DNA, 822 bp, synthetic construct; identical to SEQ ID NO: 80180
  misc_feature 1..822: note = Description of Artificial Sequence: Synthetic coding sequence
  source 1..822: mol_type = other DNA

SEQ ID NO: 80183 - DNA, 822 bp, synthetic construct; identical to SEQ ID NO: 80180
  misc_feature 1..822: note = Description of Artificial Sequence: Synthetic coding sequence
  source 1..822: mol_type = other DNA

SEQ ID NO: 80184 - DNA, 882 bp, synthetic construct
  misc_feature 1..882: note = Description of Artificial Sequence: Synthetic coding sequence
  source 1..882: mol_type = other DNA
atgggcagcagagccgagctgtgcaccctgctgggcggcttcagcttcctgctgctgctgatccccggcgagggcgccaagggcggcagcctgagagagagccagggcgtgtgcagcaagcagaccctggtggtgcccctgcactacaacgagagctacagccagcccgtgtacaagccctacctgaccctgtgcgccggcagaagaatctgcagcacctacagaaccatgtacagagtgatgtggagagaggtgagaagagaggtgcagcagacccacgccgtgtgctgccagggctggaagaagagacaccccggcgccctgacctgcgaggccatctgcgccaagccctgcctgaacggcggcgtgtgcgtgagacccgaccagtgcgagtgcgcccccggctggggcggcaagcactgccacgtggacgtggacgagtgcagaaccagcatcaccctgtgcagccaccactgcttcaacaccgccggcagcttcacctgcggctgcccccacgacctggtgctgggcgtggacggcagaacctgcatggagggcagccccgagccccccaccagcgccagcatcctgagcgtggccgtgagagaggccgagaaggacgagagagccctgaagcaggagatccacgagctgagaggcagactggagagactggagcagtgggccggccaggccggcgcctgggtgagagccgtgctgcccgtgccccccgaggagctgcagcccgagcaggtggccgagctgtggggcagaggcgacagaatcgagagcctgagcgaccaggtgctgctgctggaggagagactgggcgcctgcagctgcgaggacaacagcctgggcctgggcgtgaaccacagatag

SEQ ID NO: 80185 - DNA, 882 bp, synthetic construct; identical to SEQ ID NO: 80184
  misc_feature 1..882: note = Description of Artificial Sequence: Synthetic coding sequence
  source 1..882: mol_type = other DNA

SEQ ID NO: 80186 - DNA, 882 bp, synthetic construct
  misc_feature 1..882: note = Description of Artificial Sequence: Synthetic coding sequence
  source 1..882: mol_type = other DNA
atgggcagcagagccgagctgtgcaccctgctgggcggcttcagcttcctgctgctgctgatccccggcgagggcgccaagggcggcagcctgagagagagccagggcgtgtgcagcaagcagaccctggtggtgcccctgcactacaacgagagctacagccagcccgtgtacaagccctacctgaccctgtgcgccggcagaagaatctgcagcacctacagaaccatgtacagagtgatgtggagagaggtgaagagagaggtgcagcagacccacgccgtgtgctgccagggctggaagaagagacaccccggcgccctgacctgcgaggccatctgcgccaagccctgcctgaacggcggcgtgtgcgtgagacccgaccagtgcgagtgcgcccccggctggggcggcaagcactgccacgtggacgtggacgagtgcagaaccagcatcaccctgtgcagccaccactgcttcaacaccgccggcagcttcacctgcggctgcccccacgacctggtgctgggcgtggacggcagaacctgcatggagggcagccccgagccccccaccagcgccagcatcctgagcgtggccgtgagagaggccgagaaggacgagagagccctgaagcaggagatccacgagctgagaggcagactggagagactggagcagtgggccggccaggccggcgcctgggtgagagccgtgctgcccgtgccccccgaggagctgcagcccgagcaggtggccgagctgtggggcagaggcgacagaatcgagagcctgagcgaccaggtgctgctgctggaggagagactgggcgcctgcagctgcgaggacaacagcctgggcctgggcgtgaaccacagatag

SEQ ID NO: 80187 - DNA, 777 bp, synthetic construct
  misc_feature 1..777: note = Description of Artificial Sequence: Synthetic coding sequence
  source 1..777: mol_type = other DNA
atgggcagcagagccgagctgtgcaccctgctgggcggcttcagcttcctgctgctgctgatccccggcgagggcgccaagggcggcagcctgagagagagccagggcgtgtgcagcaagcagaccctggtggtgcccctgcactacaacgagagctacagccagcccgtgtacaagccctacctgaccctgtgcgccggcagaagaatctgcagcacctacagaaccatgtacagagtgatgtggagagaggtgagaagagaggtgcagcagacccacgccgtgtgctgccagggctggaagaagagacaccccggcgccctgacctgcgaggccatctgcgccaagccctgcctgaacggcggcgtgtgcgtgagacccgaccagtgcgagtgcgcccccggctggggcggcaagcactgccacgtgggcagcttcacctgcggctgcccccacgacctggtgctgggcgtggacggcagaacctgcatggagggcagccccgagccccccaccagcgccagcatcctgagcgtggccgtgagagaggccgagaaggacgagagagccctgaagcaggagatccacgagctgagaggcagactggagagactggagcagtgggccggccaggccggcgcctgggtgagagccgtgctgcccgtgccccccgaggagctgcagcccgagcaggtggccgagctgtggggcagaggcgacagaatcgagagcctgagcgaccaggtgctgctgctggaggagagactgggcgcctag

SEQ ID NO: 80188 - DNA, 882 bp, synthetic construct; identical to SEQ ID NO: 80184
  misc_feature 1..882: note = Description of Artificial Sequence: Synthetic coding sequence
  source 1..882: mol_type = other DNA

SEQ ID NO: 80189 - DNA, 882 bp, synthetic construct; identical to SEQ ID NO: 80184
  misc_feature 1..882: note = Description of Artificial Sequence: Synthetic coding sequence
  source 1..882: mol_type = other DNA

SEQ ID NO: 80190 - DNA, 882 bp, synthetic construct; identical to SEQ ID NO: 80184
  misc_feature 1..882: note = Description of Artificial Sequence: Synthetic coding sequence
  source 1..882: mol_type = other DNA

SEQ ID NO: 80191 - DNA, 777 bp, synthetic construct; identical to SEQ ID NO: 80187
  misc_feature 1..777: note = Description of Artificial Sequence: Synthetic coding sequence
  source 1..777: mol_type = other DNA

SEQ ID NO: 80192 - DNA, 777 bp, synthetic construct; identical to SEQ ID NO: 80187
  misc_feature 1..777: note = Description of Artificial Sequence: Synthetic coding sequence
  source 1..777: mol_type = other DNA

SEQ ID NO: 80193 - DNA, 777 bp, synthetic construct
  misc_feature 1..777: note = Description of Artificial Sequence: Synthetic coding sequence
  source 1..777: mol_type = other DNA
atgggcagcagagccgagctgtgcaccctgctgggcggcttcagcttcctgctgctgctgatccccggcgagggcgccaagggcggcagcctgagagagagccagggcgtgtgcagcaagcagaccctggtggtgcccctgcactacaacgagagctacagccagcccgtgtacaagccctacctgaccctgtgcgccggcagaagaatctgcagcacctacagaaccatgtacagagtgatgtggagagaggtgaagagagaggtgcagcagacccacgccgtgtgctgccagggctggaagaagagacaccccggcgccctgacctgcgaggccatctgcgccaagccctgcctgaacggcggcgtgtgcgtgagacccgaccagtgcgagtgcgcccccggctggggcggcaagcactgccacgtgggcagcttcacctgcggctgcccccacgacctggtgctgggcgtggacggcagaacctgcatggagggcagccccgagccccccaccagcgccagcatcctgagcgtggccgtgagagaggccgagaaggacgagagagccctgaagcaggagatccacgagctgagaggcagactggagagactggagcagtgggccggccaggccggcgcctgggtgagagccgtgctgcccgtgccccccgaggagctgcagcccgagcaggtggccgagctgtggggcagaggcgacagaatcgagagcctgagcgaccaggtgctgctgctggaggagagactgggcgcctag

SEQ ID NO: 80194 - DNA, 882 bp, synthetic construct; identical to SEQ ID NO: 80184
  misc_feature 1..882: note = Description of Artificial Sequence: Synthetic coding sequence
  source 1..882: mol_type = other DNA

SEQ ID NO: 80195 - DNA, 882 bp, synthetic construct; identical to SEQ ID NO: 80184
  misc_feature 1..882: note = Description of Artificial Sequence: Synthetic coding sequence
  source 1..882: mol_type = other DNA

SEQ ID NO: 80196 - DNA, 882 bp, synthetic construct; identical to SEQ ID NO: 80184
  misc_feature 1..882: note = Description of Artificial Sequence: Synthetic coding sequence
  source 1..882: mol_type = other DNA

SEQ ID NO: 80197 - DNA, 882 bp, synthetic construct; identical to SEQ ID NO: 80186
  misc_feature 1..882: note = Description of Artificial Sequence: Synthetic coding sequence
  source 1..882: mol_type = other DNA

SEQ ID NO: 80198 - DNA, 882 bp, synthetic construct; identical to SEQ ID NO: 80184
  misc_feature 1..882: note = Description of Artificial Sequence: Synthetic coding sequence
  source 1..882: mol_type = other DNA

SEQ ID NO: 80199 - DNA, 882 bp, synthetic construct; identical to SEQ ID NO: 80184
  misc_feature 1..882: note = Description of Artificial Sequence: Synthetic coding sequence
  source 1..882: mol_type = other DNA

SEQ ID NO: 80200 - DNA, 882 bp, synthetic construct; identical to SEQ ID NO: 80184
  misc_feature 1..882: note = Description of Artificial Sequence: Synthetic coding sequence
  source 1..882: mol_type = other DNA

SEQ ID NO: 80201 - DNA, 777 bp, synthetic construct; identical to SEQ ID NO: 80187
  misc_feature 1..777: note = Description of Artificial Sequence: Synthetic coding sequence
  source 1..777: mol_type = other DNA

SEQ ID NO: 80202 - DNA, 882 bp, synthetic construct; identical to SEQ ID NO: 80184
  misc_feature 1..882: note = Description of Artificial Sequence: Synthetic coding sequence
  source 1..882: mol_type = other DNA

SEQ ID NO: 80203 - DNA, 1281 bp, synthetic construct
  misc_feature 1..1281: note = Description of Artificial Sequence: Synthetic coding sequence
  source 1..1281: mol_type = other DNA
atggccaacgacagcggcggccccggcggccccagccccagcgagagagacagacagtactgcgagctgtgcggcaagatggagaacctgctgagatgcagcagatgcagaagcagcttctactgctgcaaggagcaccagagacaggactggaagaagcacaagctggtgtgccagggcagcgagggcgccctgggccacggcgtgggcccccaccagcacagcggccccgccccccccgccgccgtgcccccccccagagccggcgccagagagcccagaaaggccgccgccagaagagacaacgccagcggcgacgccgccaagggcaaggtgaaggccaagccccccgccgaccccgccgccgccgccagcccctgcagagccgccgccggcggccagggcagcgccgtggccgccgaggccgagcccggcaaggaggagccccccgccagaagcagcctgttccaggagaaggccaacctgtacccccccagcaacacccccggcgacgccctgagccccggcggcggcctgagacccaacggccagaccaagcccctgcccgccctgaagctggccctggagtacatcgtgccctgcatgaacaagcacggcatctgcgtggtggacgacttcctgggcaaggagaccggccagcagatcggcgacgaggtgagagccctgcacgacaccggcaagttcaccgacggccagctggtgagccagaagagcgacagcagcaaggacatcagaggcgacaagatcacctggatcgagggcaaggagcccggctgcgagaccatcggcctgctgatgagcagcatggacgacctgatcagacactgcaacggcaagctgggcagctacaagatcaacggcagaaccaaggccatggtggcctgctaccccggcaacggcaccggctacgtgagacacgtggacaaccccaacggcgacggcagatgcgtgacctgcatctactacctgaacaaggactgggacgccaaggtgagcggcggcatcctgagaatcttccccgagggcaaggcccagttcgccgacatcgagcccaagttcgacagactgctgttcttctggagcgacagaagaaacccccacgaggtgcagcccgcctacgccaccagatacgccatcaccgtgtggtacttcgacgccgacgagagagccagagccaaggtgaagtacctgaccggcgagaagggcgtgagagtggagctgaacaagcccagcgacagcgtgggcaaggacgtgttctag

SEQ ID NO: 80204 - DNA, 216 bp, synthetic construct
  misc_feature 1..216: note = Description of Artificial Sequence: Synthetic coding sequence
  source 1..216: mol_type = other DNA
atgaacaagcacggcatctgcgtggtggacgacttcctgggcaaggagaccggccagcagatcggcgacgaggtgagagccctgcacgacaccggcaagttcaccgacggcagctggagcgccagaagagtgaccagacccagaaccagcgaggccatcagaagccccggcagcagagccagaagccccgccgccaagcccctgggctgcagctag

SEQ ID NO: 80205 - DNA, 1224 bp, synthetic construct
  misc_feature 1..1224: note = Description of Artificial Sequence: Synthetic coding sequence
  source 1..1224: mol_type = other DNA
atggacagcccctgccagccccagcccctgagccaggccctgccccagctgcccggcagcagcagcgagcccctggagcccgagcccggcagagccagaatgggcgtggagagctacctgccctgccccctgctgcccagctaccactgccccggcgtgcccagcgaggccagcgccggcagcggcacccccagagccaccgccaccagcaccaccgccagccccctgagagacggcttcggcggccaggacggcggcgagctgagacccctgcagagcgagggcgccgccgccctggtgaccaagggctgccagagactggccgcccagggcgccagacccgaggcccccaagagaaagtgggccgaggacggcggcgacgcccccagccccagcaagagaccctgggccagacaggagaaccaggaggccgagagagagggcggcatgagctgcagctgcagcagcggcagcggcgaggccagcgccggcctgatggaggaggccctgcccagcgcccccgagagactggccctggactacatcgtgccctgcatgagatactacggcatctgcgtgaaggacagcttcctgggcgccgccctgggcggcagagtgctggccgaggtggaggccctgaagagaggcggcagactgagagacggccagctggtgagccagagagccatcccccccagaagcatcagaggcgaccagatcgcctgggtggagggccacgagcccggctgcagaagcatcggcgccctgatggcccacgtggacgccgtgatcagacactgcgccggcagactgggcagctacgtgatcaacggcagaaccaaggccatggtggcctgctaccccggcaacggcctgggctacgtgagacacgtggacaacccccacggcgacggcagatgcatcacctgcatctactacctgaaccagaactgggacgtgaaggtgcacggcggcctgctgcagatcttccccgagggcagacccgtggtggccaacatcgagcccctgttcgacagactgctgatcttctggagcgacagaagaaacccccacgaggtgaagcccgcctacgccaccagatacgccatcaccgtgtggtacttcgacgccaaggagagagccgccgccaaggacaagtaccagctggccagcggccagaagggcgtgcaggtgcccgtgagccagccccccacccccacctag

SEQ ID NO: 80206 - DNA, 1224 bp, synthetic construct; identical to SEQ ID NO: 80205
  misc_feature 1..1224: note = Description of Artificial Sequence: Synthetic coding sequence
  source 1..1224: mol_type = other DNA

SEQ ID NO: 80207 - DNA, 720 bp, synthetic construct
  misc_feature 1..720: note = Description of Artificial Sequence: Synthetic coding sequence
  source 1..720: mol_type = other DNA
atgcccctgggccacatcatgagactggacctggagaagatcgccctggagtacatcgtgccctgcctgcacgaggtgggcttctgctacctggacaacttcctgggcgaggtggtgggcgactgcgtgctggagagagtgaagcagctgcactgcaccggcgccctgagagacggccagctggccggccccagagccggcgtgagcaagagacacctgagaggcgaccagatcacctggatcggcggcaacgaggagggctgcgaggccatcagcttcctgctgagcctgatcgacagactggtgctgtactgcggcagcagactgggcaagtactacgtgaaggagagaagcaaggccatggtggcctgctaccccggcaacggcaccggctacgtgagacacgtggacaaccccaacggcgacggcagatgcatcacctgcatctactacctgaacaagaactgggacgccaagctgcacggcggcatcctgagaatcttccccgagggcaagagcttcatcgccgacgtggagcccatcttcgacagactgctgttcttctggagcgacagaagaaacccccacgaggtgcagcccagctacgccaccagatacgccatgaccgtgtggtacttcgacgccgaggagagagccgaggccaagaagaagttcagaaacctgaccagaaagaccgagagcgccctgaccgaggactag

SEQ ID NO: 80208 - DNA, 720 bp, synthetic construct; identical to SEQ ID NO: 80207
  misc_feature 1..720: note = Description of Artificial Sequence: Synthetic coding sequence
  source 1..720: mol_type = other DNA

SEQ ID NO: 80209 - DNA, 1605 bp, synthetic construct
  misc_feature 1..1605: note = Description of Artificial Sequence: Synthetic coding sequence
  source 1..1605: mol_type = other DNA
atgttcagctgggtgagcaaggacgccagaagaaagaaggagcccgagctgttccagaccgtggccgagggcctgagacagctgtacgcccagaagctgctgcccctggaggagcactacagattccacgagttccacagccccgccctggaggacgccgacttcgacaacaagcccatggtgctgctggtgggccagtacagcaccggcaagaccaccttcatcagacacctgatcgagcaggacttccccggcatgagaatcggccccgagcccaccaccgacagcttcatcgccgtgatgcacggccccaccgagggcgtggtgcccggcaacgccctggtggtggaccccagaagacccttcagaaagctgaacgccttcggcaacgccttcctgaacagattcatgtgcgcccagctgcccaaccccgtgctggacagcatcagcatcatcgacacccccggcatcctgagcggcgagaagcagagaatcagcagaggctacgacttcgccgccgtgctggagtggttcgccgagagagtggacagaatcatcctgctgttcgacgcccacaagctggacatcagcgacgagttcagcgaggtgatcaaggccctgaagaaccacgaggacaagatcagagtggtgctgaacaaggccgaccagatcgagacccagcagctgatgagagtgtacggcgccctgatgtggagcctgggcaagatcatcaacacccccgaggtggtgagagtgtacatcggcagcttctggagccaccccctgctgatccccgacaacagaaagctgttcgaggccgaggagcaggacctgttcaaggacatccagagcctgcccagaaacgccgccctgagaaagctgaacgacctgatcaagagagccagactggccaaggtgcacgcctacatcatcagcagcctgaagaaggagatgcccaacgtgttcggcaaggagagcaagaagaaggagctggtgaacaacctgggcgagatctaccagaagatcgagagagagcaccagatcagccccggcgacttccccagcctgagaaagatgcaggagctgctgcagacccaggacttcagcaagttccaggccctgaagcccaagctgctggacaccgtggacgacatgctggccaacgacatcgccagactgatggtgatggtgagacaggaggagagcctgatgcccagccaggtggtgaagggcggcgccttcgacggcaccatgaacggccccttcggccacggctacggcgagggcgccggcgagggcatcgacgacgtggagtgggtggtgggcaaggacaagcccacctacgacgagatcttctacaccctgagccccgtgaacggcaagatcaccggcgccaacgccaagaaggagatggtgaagagcaagctgcccaacaccgtgctgggcaagatctggaagctggccgacgtggacaaggacggcctgctggacgacgaggagttcgccctggccaaccacctgatcaaggtgaagctggagggccacgagctgcccgccgacctgcccccccacctggtgccccccagcaagagaagacacgagtag

SEQ ID NO: 80210 - DNA, 1605 bp, synthetic construct; identical to SEQ ID NO: 80209
  misc_feature 1..1605: note = Description of Artificial Sequence: Synthetic coding sequence
  source 1..1605: mol_type = other DNA

SEQ ID NO: 80211 - DNA, 438 bp, synthetic construct
  misc_feature 1..438: note = Description of Artificial Sequence: Synthetic coding sequence
  source 1..438: mol_type = other DNA
atgttcagctgggtgagcaaggacgccagaagaaagaaggagcccgagctgttccagaccgtggccgagggcctgagacagctgtacgcccagaagctgctgcccctggaggagcactacagattccacgagttccacagccccgccctggaggacgccgacttcgacaacaagcccatggtgctgctggtgggccagtacagcaccggcaagaccaccttcatcagacacctgatcgagcaggacttccccggcatgagaatcggccccgagcccaccaccgacagcttcatcgccgtgatgcacggccccaccgagggcgtggtgcccggcaacgccctggtggtggaccccagaagacccttcagaaagctgaacgccttcggcaacgccttcctgaacagattcatgtgcgcccagctgcccaaccccgtgtag

SEQ ID NO: 80212 - DNA, 1296 bp, synthetic construct
  misc_feature 1..1296: note = Description of Artificial Sequence: Synthetic coding sequence
  source 1..1296: mol_type = other DNA
atggagcagcccggcaccgccgccagccccgtgagcggcagcatgttcagctgggtgagcaaggacgccagaagaaagaaggagcccgagctgttccagaccgtggccgagggcctgagacagctgtacgcccagaagctgctgcccctggaggagcactacagattccacgagttccacagccccgccctggaggacgccgacttcgacaacaagcccatggtgctgctggtgggccagtacagcaccggcaagaccaccttcatcagacacctgatcgagcaggacttccccggcatgagaatcggccccgagcccaccaccgacagcttcatcgccgtgatgcacggccccaccgagggcgtggtgcccggcaacgccctggtggtggaccccagaagacccttcagaaagctgaacgccttcggcaacgccttcctgaacagattcatgtgcgcccagctgcccaaccccgtgctggacagcatcagcatcatcgacacccccggcatcctgagcggcgagaagcagagaatcagcagaggctacgacttcgccgccgtgctggagtggttcgccgagagagtggacagaatcatcctgctgttcgacgcccacaagctggacatcagcgacgagttcagcgaggtgatcaaggccctgaagaaccacgaggacaagatcagagtggtgctgaacaaggccgaccagatcgagacccagcagctgatgagagtgtacggcgccctgatgtggagcctgggcaagatcatcaacacccccgaggtggtgagagtgtacatcggcagcttctggagccaccccctgctgatccccgacaacagaaagctgttcgaggccgaggagcaggacctgttcaaggacatccagagcctgcccagaaacgccgccctgagaaagctgaacgacctgatcaagagagccagactggccaaggtgcacgcctacatcatcagcagcctgaagaaggagatgcccaacgtgttcggcaaggagagcaagaagaaggagctggtgaacaacctgggcgagatctaccagaagatcgagagagagcaccagatcagccccggcgacttccccagcctgagaaagatgcaggagctgctgcagacccaggacttcagcaagttccaggccctgaagcccaagctgctggacgacgaggagttcgccctggccaaccacctgatcaaggtgaagctggagggccacgagctgcccgccgacctgcccccccacctggtgccccccagcaagagaagacacgagtag

SEQ ID NO: 80213 - DNA, 447 bp, synthetic construct
  misc_feature 1..447: note = Description of Artificial Sequence: Synthetic coding sequence
  source 1..447: mol_type = other DNA
atgttcagctgggtgagcaaggacgccagaagaaagaaggagcccgagctgttccagaccgtggccgagggcctgagacagctgtacgcccagaagctgctgcccctggaggagcactacagattccacgagttccacagccccgccctggaggacgccgacttcgacaacaagcccatggtgctgctggtgggccagtacagcaccggcaagaccaccttcatcagacacctgatcgagcaggacttccccggcatgagaatcggccccgagcccaccaccgacagcttcatcgccgtgatgcacggccccaccgagggcgtggtgcccggcaacgccctggtggtggaccccagaagacccttcagaaagctgaacgccttcggcaacgccttcctgaacagattcatgtgcgcccagctgcccaaccccgtgctggacagctag

SEQ ID NO: 80214 - DNA, 1533 bp, synthetic construct
  misc_feature 1..1533: note = Description of Artificial Sequence: Synthetic coding sequence
  source 1..1533: mol_type = other DNA
atgttcagctgggtgagcaaggacgccagaagaaagaaggagcactacagattccacgagttccacagccccgccctggaggacgccgacttcgacaacaagcccatggtgctgctggtgggccagtacagcaccggcaagaccaccttcatcagacacctgatcgagcaggacttccccggcatgagaatcggccccgagcccaccaccgacagcttcatcgccgtgatgcacggccccaccgagggcgtggtgcccggcaacgccctggtggtggaccccagaagacccttcagaaagctgaacgccttcggcaacgccttcctgaacagattcatgtgcgcccagctgcccaaccccgtgctggacagcatcagcatcatcgacacccccggcatcctgagcggcgagaagcagagaatcagcagaggctacgacttcgccgccgtgctggagtggttcgccgagagagtggacagaatcatcctgctgttcgacgcccacaagctggacatcagcgacgagttcagcgaggtgatcaaggccctgaagaaccacgaggacaagatcagagtggtgctgaacaaggccgaccagatcgagacccagcagctgatgagagtgtacggcgccctgatgtggagcctgggcaagatcatcaacacccccgaggtggtgagagtgtacatcggcagcttctggagccaccccctgctgatccccgacaacagaaagctgttcgaggccgaggagcaggacctgttcaaggacatccagagcctgcccagaaacgccgccctgagaaagctgaacgacctgatcaagagagccagactggccaaggtgcacgcctacatcatcagcagcctgaagaaggagatgcccaacgtgttcggcaaggagagcaagaagaaggagctggtgaacaacctgggcgagatctaccagaagatcgagagagagcaccagatcagccccggcgacttccccagcctgagaaagatgcaggagctgctgcagacccaggacttcagcaagttccaggccctgaagcccaagctgctggacaccgtggacgacatgctggccaacgacatcgccagactgatggtgatggtgagacaggaggagagcctgatgcccagccaggtggtgaagggcggcgccttcgacggcaccatgaacggccccttcggccacggctacggcgagggcgccggcgagggcatcgacgacgtggagtgggtggtgggcaaggacaagcccacctacgacgagatcttctacaccctgagccccgtgaacggcaagatcaccggcgccaacgccaagaaggagatggtgaagagcaagctgcccaacaccgtgctgggcaagatctggaagctggccgacgtggacaaggacggcctgctggacgacgaggagttcgccctggccaaccacctgatcaaggtgaagctggagggccacgagctgcccgccgacctgcccccccacctggtgccccccagcaagagaagacacgagtag

SEQ ID NO: 80215 - DNA, 1632 bp, synthetic construct
  misc_feature 1..1632: note = Description of Artificial Sequence: Synthetic coding sequence
  source 1..1632: mol_type = other DNA
atgttcagctggctgaagagaggcggcgccagaggccagcagcccgaggccatcagaaccgtgaccagcgccctgaaggagctgtacagaaccaagctgctgcccctggaggagcactacagattcggcgccttccacagccccgccctggaggacgccgacttcgacggcaagcccatggtgctggtggccggccagtacagcaccggcaagaccagcttcatccagtacctgctggagcaggaggtgcccggcagcagagtgggccccgagcccaccaccgactgcttcgtggccgtgatgcacggcgacaccgagggcaccgtgcccggcaacgccctggtggtggaccccgacaagcccttcagaaagctgaaccccttcggcaacaccttcctgaacagattcatgtgcgcccagctgcccaaccaggtgctggagagcatcagcatcatcgacacccccggcatcctgagcggcgccaagcagagagtgagcagaggctacgacttccccgccgtgctgagatggttcgccgagagagtggacctgatcatcctgctgttcgacgcccacaagctggagatcagcgacgagttcagcgaggccatcggcgccctgagaggccacgaggacaagatcagagtggtgctgaacaaggccgacatggtggagacccagcagctgatgagagtgtacggcgccctgatgtgggccctgggcaaggtggtgggcacccccgaggtgctgagagtgtacatcggcagcttctggagccagcccctgctggtgcccgacaacagaagactgttcgagctggaggagcaggacctgttcagagacatccagggcctgcccagacacgccgccctgagaaagctgaacgacctggtgaagagagccagactggtgagagtgcacgcctacatcatcagctacctgaagaaggagatgcccagcgtgttcggcaaggagaacaagaagaagcagctgatcctgaagctgcccgtgatcttcgccaagatccagctggagcaccacatcagccccggcgacttccccgactgccagaagatgcaggagctgctgatggcccacgacttcaccaagttccacagcctgaagcccaagctgctggaggccctggacgagatgctgacccacgacatcgccaagctgatgcccctgctgagacaggaggagctggagagcaccgaggtgggcgtgcagggcggcgccttcgagggcacccacatgggccccttcgtggagagaggccccgacgaggccatggaggacggcgaggagggcagcgacgacgaggccgagtgggtggtgaccaaggacaagagcaagtacgacgagatcttctacaacctggcccccgccgacggcaagctgagcggcagcaaggccaagacctggatggtgggcaccaagctgcccaacagcgtgctgggcagaatctggaagctgagcgacgtggacagagacggcatgctggacgacgaggagttcgccctggccagccacctgatcgaggccaagctggagggccacggcctgcccgccaacctgcccagaagactggtgccccccagcaagagaagacacaagggcagcgccgagtag

SEQ ID NO: 80216 - DNA, 516 bp, synthetic construct
  misc_feature 1..516: note = Description of Artificial Sequence: Synthetic coding sequence
  source 1..516: mol_type = other DNA
atgcccagcgtgttcggcaaggagaacaagaagaagcagctgatcctgaagctgcccgtgatcttcgccaagatccagctggagcaccacatcagccccggcgacttccccgactgccagaagatgcaggagctgctgatggcccacgacttcaccaagttccacagcctgaagcccaagctgctggaggccctggacgagatgctgacccacgacatcgccaagctgatgcccctgctgagacaggaggagctggagagcaccgaggtgggcgtgcagggcggcgccttcgagggcacccacatgggccccttcgtggagagaggccccgacgaggccatggaggaccagggccaggtgcagatcagaagagacctgctgcagcccggcgcctgcagaagacaggccgagagactgcagggccaggacctggacggcggcgaccaggccccccagctgagcgccggcgcccacctggaggcccagagatgcggccccagaagacacgccggctag

SEQ ID NO: 80217 - DNA, 1224 bp, synthetic construct
  misc_feature 1..1224: note = Description of Artificial Sequence: Synthetic coding sequence
  source 1..1224: mol_type = other DNA
atgtgcgcccagctgcccaaccaggtgctggagagcatcagcatcatcgacacccccggcatcctgagcggcgccaagcagagagtgagcagaggctacgacttccccgccgtgctgagatggttcgccgagagagtggacctgatcatcctgctgttcgacgcccacaagctggagatcagcgacgagttcagcgaggccatcggcgccctgagaggccacgaggacaagatcagagtggtgctgaacaaggccgacatggtggagacccagcagctgatgagagtgtacggcgccctgatgtgggccctgggcaaggtggtgggcacccccgaggtgctgagagtgtacatcggcagcttctggagccagcccctgctggtgcccgacaacagaagactgttcgagctggaggagcaggacctgttcagagacatccagggcctgcccagacacgccgccctgagaaagctgaacgacctggtgaagagagccagactggtgagagtgcacgcctacatcatcagctacctgaagaaggagatgcccagcgtgttcggcaaggagaacaagaagaagcagctgatcctgaagctgcccgtgatcttcgccaagatccagctggagcaccacatcagccccggcgacttccccgactgccagaagatgcaggagctgctgatggcccacgacttcaccaagttccacagcctgaagcccaagctgctggaggccctggacgagatgctgacccacgacatcgccaagctgatgcccctgctgagacaggaggagctggagagcaccgaggtgggcgtgcagggcggcgccttcgagggcacccacatgggccccttcgtggagagaggccccgacgaggccatggaggacggcgaggagggcagcgacgacgaggccgagtgggtggtgaccaaggacaagagcaagtacgacgagatcttctacaacctggcccccgccgacggcaagctgagcggcagcaaggccaagacctggatggtgggcaccaagctgcccaacagcgtgctgggcagaatctggaagctgagcgacgtggacagagacggcatgctggacgacgaggagttcgccctggccagccacctgatcgaggccaagctggagggccacggcctgcccgccaacctgcccagaagactggtgccccccagcaagagaagacacaagggcagcgccgagtag

SEQ ID NO: 80218 - DNA, 1242 bp, synthetic construct
  misc_feature 1..1242: note = Description of Artificial Sequence: Synthetic coding sequence
  source 1..1242: mol_type = other DNA
atgttcagctggctgaagagaggcggcgccagaggccagcagcccgaggccatcagaaccgtgaccagcgccctgaaggagctgtacagaaccaagctgctgcccctggaggagcactacagattcggcgccttccacagccccgccctggaggacgccgacttcgacggcaagcccatggtgctggtggccggccagtacagcaccggcaagaccagcttcatccagtacctgctggagcaggaggtgcccggcagcagagtgggccccgagcccaccaccgactgcttcgtggccgtgatgcacggcgacaccgagggcaccgtgcccggcaacgccctggtggtggaccccgacaagcccttcagaaagctgaaccccttcggcaacaccttcctgaacagattcatgtgcgcccagctgcccaaccaggtgctggagagcatcagcatcatcgacacccccggcatcctgagcggcgccaagcagagagtgagcagaggctacgacttccccgccgtgctgagatggttcgccgagagagtggacctgatcatcctgctgttcgacgcccacaagctggagatcagcgacgagttcagcgaggccatcggcgccctgagaggccacgaggacaagatcagagtggtgctgaacaaggccgacatggtggagacccagcagctgatgagagtgtacggcgccctgatgtgggccctgggcaaggtggtgggcacccccgaggtgctgagagtgtacatcggcagcttctggagccagcccctgctggtgcccgacaacagaagactgttcgagctggaggagcaggacctgttcagagacatccagggcctgcccagacacgccgccctgagaaagctgaacgacctggtgaagagagccagactggtgagagtgcacgcctacatcatcagctacctgaagaaggagatgcccagcgtgttcggcaaggagaacaagaagaagcagctgatcctgaagctgcccgtgatcttcgccaagatccagctggagcaccacatcagccccggcgacttccccgactgccagaagatgcaggagctgctgatggcccacgacttcaccaagttccacagcctgaagcccaagctgctggaggccctggacgagatgctgacccacgacatcgccaagctgatgcccctgctgagacaggaggagctggagagcagccccgtggccgagatgaccagcagatag

SEQ ID NO: 80219 - DNA, 1602 bp, synthetic construct
  misc_feature 1..1602: note = Description of Artificial Sequence: Synthetic coding sequence
  source 1..1602: mol_type = other DNA
atgttcagctggctgaagagaggcggcgccagaggccagcagcccgaggccatcagaaccgtgaccagcgccctgaaggagctgtacagaaccaagctgctgcccctggaggagcactacagattcggcgccttccacagccccgccctggaggacgccgacttcgacggcaagcccatggtgctggtggccggccagtacagcaccggcaagaccagcttcatccagtacctgctggagcaggaggtgcccggcagcagagtggccgtgatgcacggcgacaccgagggcaccgtgcccggcaacgccctggtggtggaccccgacaagcccttcagaaagctgaaccccttcggcaacaccttcctgaacagattcatgtgcgcccagctgcccaaccaggtgctggagagcatcagcatcatcgacacccccggcatcctgagcggcgccaagcagagagtgagcagaggctacgacttccccgccgtgctgagatggttcgccgagagagtggacctgatcatcctgctgttcgacgcccacaagctggagatcagcgacgagttcagcgaggccatcggcgccctgagaggccacgaggacaagatcagagtggtgctgaacaaggccgacatggtggagacccagcagctgatgagagtgtacggcgccctgatgtgggccctgggcaaggtggtgggcacccccgaggtgctgagagtgtacatcggcagcttctggagccagcccctgctggtgcccgacaacagaagactgttcgagctggaggagcaggacctgttcagagacatccagggcctgcccagacacgccgccctgagaaagctgaacgacctggtgaagagagccagactggtgagagtgcacgcctacatcatcagctacctgaagaaggagatgcccagcgtgttcggcaaggagaacaagaagaagcagctgatcctgaagctgcccgtgatcttcgccaagatccagctggagcaccacatcagccccggcgacttccccgactgccagaagatgcaggagctgctgatggcccacgacttcaccaagttccacagcctgaagcccaagctgctggaggccctggacgagatgctgacccacgacatcgccaagctgatgcccctgctgagacaggaggagctggagagcaccgaggtgggcgtgcagggcggcgccttcgagggcacccacatgggccccttcgtggagagaggccccgacgaggccatggaggacggcgaggagggcagcgacgacgaggccgagtgggtggtgaccaaggacaagagcaagtacgacgagatcttctacaacctggcccccgccgacggcaagctgagcggcagcaaggccaagacctggatggtgggcaccaagctgcccaacagcgtgctgggcagaatctggaagctgagcgacgtggacagagacggcatgctggacgacgaggagttcgccctggccagccacctgatcgaggccaagctggagggccacggcctgcccgccaacctgcccagaagactggtgccccccagcaagagaagacacaagggcagcgccgagtag

SEQ ID NO: 80220 - DNA, 681 bp, synthetic construct
  misc_feature 1..681: note = Description of Artificial Sequence: Synthetic coding sequence
  source 1..681: mol_type = other DNA
atgcccagcgtgttcggcaaggagaacaagaagaagcagctgatcctgaagctgcccgtgatcttcgccaagatccagctggagcaccacatcagccccggcgacttccccgactgccagaagatgcaggagctgctgatggcccacgacttcaccaagttccacagcctgaagcccaagctgctggaggccctggacgagatgctgacccacgacatcgccaagctgatgcccctgctgagacaggaggagctggagagcaccgaggtgggcgtgcagggcggcgccttcgagggcacccacatgggccccttcgtggagagaggccccgacgaggccatggaggacggcgaggagggcagcgacgacgaggccgagtgggtggtgaccaaggacaagagcaagtacgacgagatcttctacaacctggcccccgccgacggcaagctgagcggcagcaaggccaagacctggatggtgggcaccaagctgcccaacagcgtgctgggcagaatctggaagctgagcgacgtggacagagacggcatgctggacgacgaggagttcgccctggccagccacctgatcgaggccaagctggagggccacggcctgcccgccaacctgcccagaagactggtgccccccagcaagagaagacacaagggcagcgccgagtag

SEQ ID NO: 80221 - DNA, 1608 bp, synthetic construct
  misc_feature 1..1608: note = Description of Artificial Sequence: Synthetic coding sequence
  source 1..1608: mol_type = other DNA
atgttcagctggctgggcaccgacgacagaagaagaaaggaccccgaggtgttccagaccgtgagcgagggcctgaagaagctgtacaagagcaagctgctgcccctggaggagcactacagattccacgagttccacagccccgccctggaggacgccgacttcgacaacaagcccatggtgctgctggtgggccagtacagcaccggcaagaccaccttcatcagatacctgctggagcaggacttccccggcatgagaatcggccccgagcccaccaccgacagcttcatcgccgtgatgcagggcgacatggagggcatcatccccggcaacgccctggtggtggaccccaagaagcccttcagaaagctgaacgccttcggcaacgccttcctgaacagattcgtgtgcgcccagctgcccaaccccgtgctggagagcatcagcgtgatcgacacccccggcatcctgagcggcgagaagcagagaatcagcagaggctacgacttcgccgccgtgctggagtggttcgccgagagagtggacagaatcatcctgctgttcgacgcccacaagctggacatcagcgacgagttcagcgaggtgatcaaggccctgaagaaccacgaggacaagatgagagtggtgctgaacaaggccgaccagatcgagacccagcagctgatgagagtgtacggcgccctgatgtggagcctgggcaagatcgtgaacacccccgaggtgatcagagtgtacatcggcagcttctggagccaccccctgctgatccccgacaacagaaagctgttcgaggccgaggagcaggacctgttcagagacatccagagcctgcccagaaacgccgccctgagaaagctgaacgacctgatcaagagagccagactggccaaggtgcacgcctacatcatcagcagcctgaagaaggagatgcccagcgtgttcggcaaggacaacaagaagaaggagctggtgaacaacctggccgagatctacggcagaatcgagagagagcaccagatcagccccggcgacttccccaacctgaagagaatgcaggaccagctgcaggcccaggacttcagcaagttccagcccctgaagagcaagctgctggaggtggtggacgacatgctggcccacgacatcgcccagctgatggtgctggtgagacaggaggagagccagagacccatccagatggtgaagggcggcgccttcgagggcaccctgcacggccccttcggccacggctacggcgagggcgccggcgagggcatcgacgacgccgagtgggtggtggccagagacaagcccatgtacgacgagatcttctacaccctgagccccgtggacggcaagatcaccggcgccaacgccaagaaggagatggtgagaagcaagctgcccaacagcgtgctgggcaagatctggaagctggccgacatcgacaaggacggcatgctggacgacgacgagttcgccctggccaaccacctgatcaaggtgaagctggagggccacgagctgcccaacgagctgcccgcccacctgctgccccccagcaagagaaaggtggccgagtag

SEQ ID NO: 80222 - DNA, 528 bp, synthetic construct
  misc_feature 1..528: note = Description of Artificial Sequence: Synthetic coding sequence
  source 1..528: mol_type = other DNA
atgttcagctggctgggcaccgacgacagaagaagaaaggaccccgaggtgttccagaccgtgagcgagggcctgaagaagctgtacaagagcaagctgctgcccctggaggagcactacagattccacgagttccacagccccgccctggaggacgccgacttcgacaacaagcccatggtgctgctggtgggccagtacagcaccggcaagaccaccttcatcagatacctgctggagcaggacttccccggcatgagaatcggccccgagcccaccaccgacagcttcatcgccgtgatgcagggcgacatggagggcatcatccccggcaacgccctggtggtggaccccaagaagcccttcagaaagctgaacgccttcggcaacgccttcctgaacagattcgtgtgcgcccagctgcccaaccccgtgctggagagcatcagcgtgatcgacacccccggcatcctgagcggcgagaagcagagaatcagcagaggccccgccgccggccccggcctgtag

SEQ ID NO: 80223 - DNA, 4086 bp, synthetic construct
  misc_feature 1..4086: note = Description of Artificial Sequence: Synthetic coding sequence
  source 1..4086: mol_type = other DNA
atgggcgccgccggcagacaggacttcctgttcaaggccatgctgaccatcagctggctgaccctgacctgcttccccggcgccaccagcaccgtggccgccggctgccccgaccagagccccgagctgcagccctggaaccccggccacgaccaggaccaccacgtgcacatcggccagggcaagaccctgctgctgaccagcagcgccaccgtgtacagcatccacatcagcgagggcggcaagctggtgatcaaggaccacgacgagcccatcgtgctgagaaccagacacatcctgatcgacaacggcggcgagctgcacgccggcagcgccctgtgccccttccagggcaacttcaccatcatcctgtacggcagagccgacgagggcatccagcccgacccctactacggcctgaagtacatcggcgtgggcaagggcggcgccctggagctgcacggccagaagaagctgagctggaccttcctgaacaagaccctgcaccccggcggcatggccgagggcggctacttcttcgagagaagctggggccacagaggcgtgatcgtgcacgtgatcgaccccaagagcggcaccgtgatccacagcgacagattcgacacctacagaagcaagaaggagagcgagagactggtgcagtacctgaacgccgtgcccgacggcagaatcctgagcgtggccgtgaacgacgagggcagcagaaacctggacgacatggccagaaaggccatgaccaagctgggcagcaagcacttcctgcacctgggcttcagacacccctggagcttcctgaccgtgaagggcaaccccagcagcagcgtggaggaccacatcgagtaccacggccacagaggcagcgccgccgccagagtgttcaagctgttccagaccgagcacggcgagtacttcaacgtgagcctgagcagcgagtgggtgcaggacgtggagtggaccgagtggttcgaccacgacaaggtgagccagaccaagggcggcgagaagatcagcgacctgtggaaggcccaccccggcaagatctgcaacagacccatcgacatccaggccaccaccatggacggcgtgaacctgagcaccgaggtggtgtacaagaagggccaggactacagattcgcctgctacgacagaggcagagcctgcagaagctacagagtgagattcctgtgcggcaagcccgtgagacccaagctgaccgtgaccatcgacaccaacgtgaacagcaccatcctgaacctggaggacaacgtgcagagctggaagcccggcgacaccctggtgatcgccagcaccgactacagcatgtaccaggccgaggagttccaggtgctgccctgcagaagctgcgcccccaaccaggtgaaggtggccggcaagcccatgtacctgcacatcggcgaggagatcgacggcgtggacatgagagccgaggtgggcctgctgagcagaaacatcatcgtgatgggcgagatggaggacaagtgctacccctacagaaaccacatctgcaacttcttcgacttcgacaccttcggcggccacatcaagttcgccctgggcttcaaggccgcccacctggagggcaccgagctgaagcacatgggccagcagctggtgggccagtaccccatccacttccacctggccggcgacgtggacgagagaggcggctacgacccccccacctacatcagagacctgagcatccaccacaccttcagcagatgcgtgaccgtgcacggcagcaacggcctgctgatcaaggacgtggtgggctacaacagcctgggccactgcttcttcaccgaggacggccccgaggagagaaacaccttcgaccactgcctgggcctgctggtgaagagcggcaccctgctgcccagcgacagagacagcaagatgtgcaagatgatcaccgaggacagctaccccggctacatccccaagcccagacaggactgcaacgccgtgagcaccttctggatggccaaccccaacaacaacctgatcaactgcgccgccgccggcagcgaggagaccggcttctggttcatcttccaccacgtgcccaccggccccagcgtgggcatgtacagccccggctacagcgagcacatccccctgggcaagttctacaacaacagagcccacagcaactacagagccggcatgatcatcgacaacggcgtgaagaccaccgaggccagcgccaaggacaagagacccttcctgagcatcatcagcgccagatacagcccccaccaggacgccgaccccctgaagcccagagagcccgccatcatcagacacttcatcgcctacaagaaccaggaccacggcgcctggctgagaggcggcgacgtgtggctggacagctgcagattcgccgacaacggcatcggcctgaccctggccagcggcggcaccttcccctacgacgacggcagcaagcaggagatcaagaacagcctgttcgtgggcgagagcggcaacgtgggcaccgagatgatggacaacagaatctggggccccggcggcctggaccacagcggcagaaccctgcccatcggccagaacttccccatcagaggcatccagctgtacgacggccccatcaacatccagaactgcaccttcagaaagttcgtggccctggagggcagacacaccagcgccctggccttcagactgaacaacgcctggcagagctgcccccacaacaacgtgaccggcatcgccttcgaggacgtgcccatcaccagcagagtgttcttcggcgagcccggcccctggttcaaccagctggacatggacggcgacaagaccagcgtgttccacgacgtggacggcagcgtgagcgagtaccccggcagctacctgaccaagaacgacaactggctggtgagacaccccgactgcatcaacgtgcccgactggagaggcgccatctgcagcggctgctacgcccagatgtacatccaggcctacaagaccagcaacctgagaatgaagatcatcaagaacgacttccccagccaccccctgtacctggagggcgccctgaccagaagcacccactaccagcagtaccagcccgtggtgaccctgcagaagggctacaccatccactgggaccagaccgcccccgccgagctggccatctggctgatcaacttcaacaagggcgactggatcagagtgggcctgtgctaccccagaggcaccaccttcagcatcctgagcgacgtgcacaacagactgctgaagcagaccagcaagaccggcgtgttcgtgagaaccctgcagatggacaaggtggagcagagctaccccggcagaagccactactactgggacgaggacagcggcctgctgttcctgaagctgaaggcccagaacgagagagagaagttcgccttctgcagcatgaagggctgcgagagaatcaagatcaaggccctgatccccaagaacgccggcgtgagcgactgcaccgccaccgcctaccccaagttcaccgagagagccgtggtggacgtgcccatgcccaagaagctgttcggcagccagctgaagaccaaggaccacttcctggaggtgaagatggagagcagcaagcagcacttcttccacctgtggaacgacttcgcctacatcgaggtggacggcaagaagtaccccagcagcgaggacggcatccaggtggtggtgatcgacggcaaccagggcagagtggtgagccacaccagcttcagaaacagcatcctgcagggcatcccctggcagctgttcaactacgtggccaccatccccgacaacagcatcgtgctgatggccagcaagggcagatacgtgagcagaggcccctggaccagagtgctggagaagctgggcgccgacagaggcctgaagctgaaggagcagatggccttcgtgggcttcaagggcagcttcagacccatctgggtgaccctggacaccgaggaccacaaggccaagatcttccaggtggtgcccatccccgtggtgaagaagaagaagctgtag

SEQ ID NO: 80224 - DNA, 1092 bp, synthetic construct
  misc_feature 1..1092: note = Description of Artificial Sequence: Synthetic coding sequence
  source 1..1092: mol_type = other DNA
atgagcatggacgtgaccttcctgggcaccggcgccgcctaccccagccccaccagaggcgccagcgccgtggtgctgagatgcgagggcgagtgctggctgttcgactgcggcgagggcacccagacccagctgatgaagagccagctgaaggccggcagaatcaccaagatcttcatcacccacctgcacggcgaccacttcttcggcctgcccggcctgctgtgcaccatcagcctgcagagcggcagcatggtgagcaagcagcccatcgagatctacggccccgtgggcctgagagacttcatctggagaaccatggagctgagccacaccgagctggtgttccactacgtggtgcacgagctggtgcccaccgccgaccagtgccccgccgaggagctgaaggagttcgcccacgtgaacagagccgacagcccccccaaggaggagcagggcagaaccatcctgctggacagcgaggagaacagctacctgctgttcgacgacgagcagttcgtggtgaaggccttcagactgttccacagaatccccagcttcggcttcagcgtggtggagaagaagagacccggcaagctgaacgcccagaagctgaaggacctgggcgtgccccccggccccgcctacggcaagctgaagaacggcatcagcgtggtgctggagaacggcgtgaccatcagcccccaggacgtgctgaagaagcccatcgtgggcagaaagatctgcatcctgggcgactgcagcggcgtggtgggcgacggcggcgtgaagctgtgcttcgaggccgacctgctgatccacgaggccaccctggacgacgcccagatggacaaggccaaggagcacggccacagcaccccccagatggccgccaccttcgccaagctgtgcagagccaagagactggtgctgacccacttcagccagagatacaagcccgtggccctggccagagagggcgagaccgacggcatcgccgagctgaagaagcaggccgagagcgtgctggacctgcaggaggtgaccctggccgaggacttcatggtgatcagcatccccatcaagaagtag

SEQ ID NO: 80225 - DNA, 2481 bp, synthetic construct
  misc_feature 1..2481: note = Description of Artificial Sequence: Synthetic coding sequence
  source 1..2481: mol_type = other DNA
atgtgggccctgtgcagcctgctgagaagcgccgccggcagaaccatgagccagggcagaaccatcagccaggcccccgccagaagagagagacccagaaaggaccccctgagacacctgagaaccagagagaagagaggccccagcggctgcagcggcggccccaacaccgtgtacctgcaggtggtggccgccggcagcagagacagcggcgccgccctgtacgtgttcagcgagttcaacagatacctgttcaactgcggcgagggcgtgcagagactgatgcaggagcacaagctgaaggtggccagactggacaacatcttcctgaccagaatgcactggagcaacgtgggcggcctgagcggcatgatcctgaccctgaaggagaccggcctgcccaagtgcgtgctgagcggccccccccagctggagaagtacctggaggccatcaagatcttcagcggccccctgaagggcatcgagctggccgtgagaccccacagcgcccccgagtacgaggacgagaccatgaccgtgtaccagatccccatccacagcgagcagagaagaggcaagcaccagccctggcagagccccgagagacccctgagcagactgagccccgagagaagcagcgacagcgagagcaacgagaacgagccccacctgccccacggcgtgagccagagaagaggcgtgagagacagcagcctggtggtggccttcatctgcaagctgcacctgaagagaggcaacttcctggtgctgaaggccaaggagatgggcctgcccgtgggcaccgccgccatcgcccccatcatcgccgccgtgaaggacggcaagagcatcacccacgagggcagagagatcctggccgaggagctgtgcaccccccccgaccccggcgccgccttcgtggtggtggagtgccccgacgagagcttcatccagcccatctgcgagaacgccaccttccagagataccagggcaaggccgacgcccccgtggccctggtggtgcacatggcccccgccagcgtgctggtggacagcagataccagcagtggatggagagattcggccccgacacccagcacctggtgctgaacgagaactgcgccagcgtgcacaacctgagaagccacaagatccagacccagctgaacctgatccaccccgacatcttccccctgctgaccagcttcagatgcaagaaggagggccccaccctgagcgtgcccatggtgcagggcgagtgcctgctgaagtaccagctgagacccagaagagagtggcagagagacgccatcatcacctgcaaccccgaggagttcatcgtggaggccctgcagctgcccaacttccagcagagcgtgcaggagtacagaagaagcgcccaggacggccccgcccccgccgagaagagaagccagtaccccgagatcatcttcctgggcaccggcagcgccatccccatgaagatcagaaacgtgagcgccaccctggtgaacatcagccccgacaccagcctgctgctggactgcggcgagggcaccttcggccagctgtgcagacactacggcgaccaggtggacagagtgctgggcaccctggccgccgtgttcgtgagccacctgcacgccgaccaccacaccggcctgcccagcatcctgctgcagagagagagagccctggccagcctgggcaagcccctgcaccccctgctggtggtggcccccaaccagctgaaggcctggctgcagcagtaccacaaccagtgccaggaggtgctgcaccacatcagcatgatccccgccaagtgcctgcaggagggcgccgagatcagcagccccgccgtggagagactgatcagcagcctgctgagaacctgcgacctggaggagttccagacctgcctggtgagacactgcaagcacgccttcggctgcgccctggtgcacaccagcggctggaaggtggtgtacagcggcgacaccatgccctgcgaggccctggtgagaatgggcaaggacgccaccctgctgatccacgaggccaccctggaggacggcctggaggaggaggccgtggagaagacccacagcaccaccagccaggccatcagcgtgggcatgagaatgaacgccgagttcatcatgctgaaccacttcagccagagatacgccaaggtgcccctgttcagccccaacttcagcgagaaggtgggcgtggccttcgaccacatgaaggtgtgcttcggcgacttccccaccatgcccaagctgatcccccccctgaaggccctgttcgccggcgacatcgaggagatggaggagagaagagagaagagagagctgagacaggtgagagccgccctgctgagcagagagctggccggcggcctggaggacggcgagccccagcagaagagagcccacaccgaggagccccaggccaagaaggtgagagcccagtag

SEQ ID NO: 80226 - DNA, 2424 bp, synthetic construct
  misc_feature 1..2424: note = Description of Artificial Sequence: Synthetic coding sequence
  source 1..2424: mol_type = other DNA
atgtgggccctgtgcagcctgctgagaagcgccgccggcagaaccatgagccagggcagaaccatcagccaggcccccgccagaagagagagacccagaaaggaccccctgagacacctgagaaccagagagaagagaggccccagcggctgcagcggcggccccaacaccgtgtacctgcaggtggtggccgccggcagcagagacagcggcgtgcagagactgatgcaggagcacaagctgaaggtggccagactggacaacatcttcctgaccagaatgcactggagcaacgtgggcggcctgagcggcatgatcctgaccctgaaggagaccggcctgcccaagtgcgtgctgagcggccccccccagctggagaagtacctggaggccatcaagatcttcagcggccccctgaagggcatcgagctggccgtgagaccccacagcgcccccgagtacgaggacgagaccatgaccgtgtaccagatccccatccacagcgagcagagaagaggcaagcaccagccctggcagagccccgagagacccctgagcagactgagccccgagagaagcagcgacagcgagagcaacgagaacgagccccacctgccccacggcgtgagccagagaagaggcgtgagagacagcagcctggtggtggccttcatctgcaagctgcacctgaagagaggcaacttcctggtgctgaaggccaaggagatgggcctgcccgtgggcaccgccgccatcgcccccatcatcgccgccgtgaaggacggcaagagcatcacccacgagggcagagagatcctggccgaggagctgtgcaccccccccgaccccggcgccgccttcgtggtggtggagtgccccgacgagagcttcatccagcccatctgcgagaacgccaccttccagagataccagggcaaggccgacgcccccgtggccctggtggtgcacatggcccccgccagcgtgctggtggacagcagataccagcagtggatggagagattcggccccgacacccagcacctggtgctgaacgagaactgcgccagcgtgcacaacctgagaagccacaagatccagacccagctgaacctgatccaccccgacatcttccccctgctgaccagcttcagatgcaagaaggagggccccaccctgagcgtgcccatggtgcagggcgagtgcctgctgaagtaccagctgagacccagaagagagtggcagagagacgccatcatcacctgcaaccccgaggagttcatcgtggaggccctgcagctgcccaacttccagcagagcgtgcaggagtacagaagaagcgcccaggacggccccgcccccgccgagaagagaagccagtaccccgagatcatcttcctgggcaccggcagcgccatccccatgaagatcagaaacgtgagcgccaccctggtgaacatcagccccgacaccagcctgctgctggactgcggcgagggcaccttcggccagctgtgcagacactacggcgaccaggtggacagagtgctgggcaccctggccgccgtgttcgtgagccacctgcacgccgaccaccacaccggcctgcccagcatcctgctgcagagagagagagccctggccagcctgggcaagcccctgcaccccctgctggtggtggcccccaaccagctgaaggcctggctgcagcagtaccacaaccagtgccaggaggtgctgcaccacatcagcatgatccccgccaagtgcctgcaggagggcgccgagatcagcagccccgccgtggagagactgatcagcagcctgctgagaacctgcgacctggaggagttccagacctgcctggtgagacactgcaagcacgccttcggctgcgccctggtgcacaccagcggctggaaggtggtgtacagcggcgacaccatgccctgcgaggccctggtgagaatgggcaaggacgccaccctgctgatccacgaggccaccctggaggacggcctggaggaggaggccgtggagaagacccacagcaccaccagccaggccatcagcgtgggcatgagaatgaacgccgagttcatcatgctgaaccacttcagccagagatacgccaaggtgcccctgttcagccccaacttcagcgagaaggtgggcgtggccttcgaccacatgaaggtgtgcttcggcgacttccccaccatgcccaagctgatcccccccctgaaggccctgttcgccggcgacatcgaggagatggaggagagaagagagaagagagagctgagacaggtgagagccgccctgctgagcagagagctggccggcggcctggaggacggcgagccccagcagaagagagcccacaccgaggagccccaggccaagaaggtgagagcccagtag

SEQ ID NO: 80227 - DNA, 2361 bp, synthetic construct
  misc_feature 1..2361: note = Description of Artificial Sequence: Synthetic coding sequence
  source 1..2361: mol_type = other DNA
atgtgggccctgtgcagcctgctgagaagcgccgccggcagaaccatgagccagggcagaaccatcagccaggcccccgccagaagagagagacccagaaaggaccccctgagacacctgagaaccagagagaagagaggccccagcggctgcagcggcggccccaacaccgtgtacctgcaggtggtggccgccggcagcagagacagcggcgccgccctgtacgtgttcagcgagttcaacagatacctgttcaactgcggcgagggcgtgcagagactgatgcaggagcacaagctgaaggtggccagactggacaacatcttcctgaccagaatgcactggagcaacgtgggcggcctgagcggcatgatcctgaccctgaaggagaccggcctgcccaagtgcgtgctgagcggccccccccagctggagaagtacctggaggccatcaagatcttcagcggccccctgaagggcatcgagctggccgtgagaccccacagcgcccccgagtacgaggacgagaccatgaccgtgtaccagatccccatccacagcgtgagccagagaagaggcgtgagagacagcagcctggtggtggccttcatctgcaagctgcacctgaagagaggcaacttcctggtgctgaaggccaaggagatgggcctgcccgtgggcaccgccgccatcgcccccatcatcgccgccgtgaaggacggcaagagcatcacccacgagggcagagagatcctggccgaggagctgtgcaccccccccgaccccggcgccgccttcgtggtggtggagtgccccgacgagagcttcatccagcccatctgcgagaacgccaccttccagagataccagggcaaggccgacgcccccgtggccctggtggtgcacatggcccccgccagcgtgctggtggacagcagataccagcagtggatggagagattcggccccgacacccagcacctggtgctgaacgagaactgcgccagcgtgcacaacctgagaagccacaagatccagacccagctgaacctgatccaccccgacatcttccccctgctgaccagcttcagatgcaagaaggagggccccaccctgagcgtgcccatggtgcagggcgagtgcctgctgaagtaccagctgagacccagaagagagtggcagagagacgccatcatcacctgcaaccccgaggagttcatcgtggaggccctgcagctgcccaacttccagcagagcgtgcaggagtacagaagaagcgcccaggacggccccgcccccgccgagaagagaagccagtaccccgagatcatcttcctgggcaccggcagcgccatccccatgaagatcagaaacgtgagcgccaccctggtgaacatcagccccgacaccagcctgctgctggactgcggcgagggcaccttcggccagctgtgcagacactacggcgaccaggtggacagagtgctgggcaccctggccgccgtgttcgtgagccacctgcacgccgaccaccacaccggcctgcccagcatcctgctgcagagagagagagccctggccagcctgggcaagcccctgcaccccctgctggtggtggcccccaaccagctgaaggcctggctgcagcagtaccacaaccagtgccaggaggtgctgcaccacatcagcatgatccccgccaagtgcctgcaggagggcgccgagatcagcagccccgccgtggagagactgatcagcagcctgctgagaacctgcgacctggaggagttccagacctgcctggtgagacactgcaagcacgccttcggctgcgccctggtgcacaccagcggctggaaggtggtgtacagcggcgacaccatgccctgcgaggccctggtgagaatgggcaaggacgccaccctgctgatccacgaggccaccctggaggacggcctggaggaggaggccgtggagaagacccacagcaccaccagccaggccatcagcgtgggcatgagaatgaacgccgagttcatcatgctgaaccacttcagccagagatacgccaaggtgcccctgttcagccccaacttcagcgagaaggtgggcgtggccttcgaccacatgaaggtgtgcttcggcgacttccccaccatgcccaagctgatcccccccctgaaggccctgttcgccggcgacatcgaggagatggaggagagaagagagaagagagagctgagacaggtgagagccgccctgctgagcagagagctggccggcggcctggaggacggcgagccccagcagaagagagcccacaccgaggagccccaggccaagaaggtgagagcccagtag

SEQ ID NO: 80228 - DNA, 861 bp, synthetic construct
  misc_feature 1..861: note = Description of Artificial Sequence: Synthetic coding sequence
  source 1..861: mol_type = other DNA
tgaccccacggcgtgagccagagaagaggcgtgagagacagcagcctggtggtggccttcatctgcaagctgcacctgaagagaggcaacttcctggtgctgaaggccaaggagatgggcctgcccgtgggcaccgccgccatcgcccccatcatcgccgccgtgaaggacggcaagagcatcacccacgagggcagagaggtgctgcagatcctggccgaggagctgtgcaccccccccgaccccggcgccgccttcgtggtggtggagtgccccgacgagagcttcatccagcccatctgcgagaacgccaccttccagagataccagggcaaggccgacgcccccgtggccctggtggtgcacatggcccccgccagcgtgctggtggacagcagataccagcagtggatggagagattcggccccgacacccagcacctggtgctgaacgagaactgcgccagcgtgcacaacctgagaagccacaagatccagacccagctgaacctgatccaccccgacatcttccccctgctgaccagcttcagatgcaagaaggagggccccaccctgagcgtgcccatggtgcagggcgagtgcctgctgaagtaccagctgagacccagaagagagtggcagagagacgccatcatcacctgcaaccccgaggagttcatcgtggaggccctgcagctgcccaacttccagcagagcgtgcaggagtacagaagaagcgcccaggacggccccgcccccgccgagaagagaagccagtaccccgagatcatcttcctgggcaccggcagcgccatccccatgaagatcagaaacgtgagcgccaccctggtgaacatctag

SEQ ID NO: 80229 - DNA, 837 bp, synthetic construct
  misc_feature 1..837: note = Description of Artificial Sequence: Synthetic coding sequence
  source 1..837: mol_type = other DNA
atcctggccgaggagctgtgcaccccccccgaccccggcgccgccttcgtggtggtggagtgccccgacgagagcttcatccagcccatctgcgagaacgccaccttccagagattcggccccgacacccagcacctggtgctgaacgagaactgcgccagcgtgcacaacctgagaagccacaagatccagacccagctgaacctgatccaccccgacatcttccccctgctgaccagcttcagatgcaagaaggagggccccaccctgagcgtgcccatggtgcagggcgagtgcctgctgaagtaccagctgagacccagaagagagtggcagagagacgccatcatcacctgcaaccccgaggagttcatcgtggaggccctgcagctgcccaacttccagcagagcgtgcaggagtacagaagaagcgcccaggacggccccgcccccgccgagaagagaagccagtaccccgagatcatcttcctgggcaccggcagcgccatccccatgaagatcagaaacgtgagcgccaccctggtgaacatcagccccgacaccagcctgctgctggactgcggcgagggcaccttcggccagctgtgcagacactacggcgaccaggtggacagagtgctgggcaccctggccgccgtgttcgtgagccacctgcacgccgaccaccacaccggcctgcccagcatcctgctgcagagagagagagccctggccagcctgggcaagcccctgcaccccctgctggtggtggcccccaaccagctgaaggcctggctgcagcagtaccacaaccagtgccaggaggtgctgcactag

SEQ ID NO: 80230 - DNA, 804 bp, synthetic construct
  misc_feature 1..804: note = Description of Artificial Sequence: Synthetic coding sequence
  source 1..804: mol_type = other DNA
atgaccctgggcagaagactggcctgcctgttcctggcctgcgtgctgcccgccctgctgctgggcggcaccgccctggccagcgagatcgtgggcggcagaagagccagaccccacgcctggcccttcatggtgagcctgcagctgagaggcggccacttctgcggcgccaccctgatcgcccccaacttcgtgatgagcgccgcccactgcgtggccaacgtgaacgtgagagccgtgagagtggtgctgggcgcccacaacctgagcagaagagagcccaccagacaggtgttcgccgtgcagagaatcttcgagaacggctacgaccccgtgaacctgctgaacgacatcgtgatcctgcagctgaacggcagcgccaccatcaacgccaacgtgcaggtggcccagctgcccgcccagggcagaagactgggcaacggcgtgcagtgcctggccatgggctggggcctgctgggcagaaacagaggcatcgccagcgtgctgcaggagctgaacgtgaccgtggtgaccagcctgtgcagaagaagcaacgtgtgcaccctggtgagaggcagacaggccggcgtgtgcttcggcgacagcggcagccccctggtgtgcaacggcctgatccacggcatcgccagcttcgtgagaggcggctgcgccagcggcctgtaccccgacgccttcgcccccgtggcccagttcgtgaactggatcgacagcatcatccagagaagcgaggacaacccctgcccccaccccagagaccccgaccccgccagcagaacccactag

SEQ ID NO: 80231 - DNA, 804 bp, synthetic construct; identical to SEQ ID NO: 80230
  misc_feature 1..804: note = Description of Artificial Sequence: Synthetic coding sequence
  source 1..804: mol_type = other DNA

SEQ ID NO: 80232 - DNA, 3051 bp, synthetic construct
  misc_feature 1..3051: note = Description of Artificial Sequence: Synthetic coding sequence
  source 1..3051: mol_type = other DNA
atggcccccagaaccctgtggagctgctacctgtgctgcctgctgaccgccgccgccggcgccgccagctacccccccagaggcttcagcctgtacaccggcagcagcggcgccctgagccccggcggcccccaggcccagatcgcccccagacccgccagcagacacagaaactggtgcgcctacgtggtgaccagaaccgtgagctgcgtgctggaggacggcgtggagacctacgtgaagtaccagccctgcgcctggggccagccccagtgcccccagagcatcatgtacagaagattcctgagacccagatacagagtggcctacaagaccgtgaccgacatggagtggagatgctgccagggctacggcggcgacgactgcgccgagagccccgcccccgccctgggccccgccagcagcacccccagacccctggcccagcccgccagacccaacctgagcggcagcagcgccggcagccccctgagcggcctgggcggcgagggccccggcgagagcgagaaggtgcagcagctggaggagcaggtgcagagcctgaccaaggagctgcagggcctgagaggcgtgctgcagggcctgagcggcagactggccgaggacgtgcagagagccgtggagaccgccttcaacggcagacagcagcccgccgacgccgccgccagacccggcgtgcacgagaccctgaacgagatccagcaccagctgcagctgctggacaccagagtgagcacccacgaccaggagctgggccacctgaacaaccaccacggcggcagcagcagcagcggcggcagcagagcccccgcccccgccagcgccccccccggccccagcgaggagctgctgagacagctggagcagagactgcaggagagctgcagcgtgtgcctggccggcctggacggcttcagaagacagcagcaggaggacagagagagactgagagccatggagaagctgctggccagcgtggaggagagacagagacacctggccggcctggccgtgggcagaagacccccccaggagtgctgcagccccgagctgggcagaagactggccgagctggagagaagactggacgtggtggccggcagcgtgaccgtgctgagcggcagaagaggcaccgagctgggcggcgccgccggccagggcggccacccccccggctacaccagcctggccagcagactgagcagactggaggacagattcaacagcaccctgggccccagcgaggagcaggaggagagctggcccggcgcccccggcggcctgagccactggctgcccgccgccagaggcagactggagcagctgggcggcctgctggccaacgtgagcggcgagctgggcggcagactggacctgctggaggagcaggtggccggcgccatgcaggcctgcggccagctgtgcagcggcgcccccggcgagcaggacagccaggtgagcgagatcctgagcgccctggagagaagagtgctggacagcgagggccagctgagactggtgggcagcggcctgcacaccgtggaggccgccggcgaggccagacaggccaccctggagggcctgcaggaggtggtgggcagactgcaggacagagtggacgcccaggacgagaccgccgccgagttcaccctgagactgaacctgaccgccgccagactgggccagctggagggcctgctgcaggcccacggcgacgagggctgcggcgcctgcggcggcgtgcaggaggagctgggcagactgagagacggcgtggagagatgcagctgccccctgctgccccccagaggccccggcgccggccccggcgtgggcggccccagcagaggccccctggacggcttcagcgtgttcggcggcagcagcggcagcgccctgcaggccctgcagggcgagctgagcgaggtgatcctgagcttcagcagcctgaacgacagcctgaacgagctgcagaccaccgtggagggccagggcgccgacctggccgacctgggcgccaccaaggacagaatcatcagcgagatcaacagactgcagcaggaggccaccgagcacgccaccgagagcgaggagagattcagaggcctggaggagggccaggcccaggccggccagtgccccagcctggagggcagactgggcagactggagggcgtgtgcgagagactggacaccgtggccggcggcctgcagggcctgagagagggcctgagcagacacgtggccggcctgtgggccggcctgagagagaccaacaccaccagccagatgcaggccgccctgctggagaagctggtgggcggccaggccggcctgggcagaagactgggcgccctgaacagcagcctgcagctgctggaggacagactgcaccagctgagcctgaaggacctgaccggccccgccggcgaggccggcccccccggcccccccggcctgcagggcccccccggccccgccggcccccccggcagccccggcaaggacggccaggagggccccatcggcccccccggcccccagggcgagcagggcgtggagggcgcccccgccgcccccgtgccccaggtggccttcagcgccgccctgagcctgcccagaagcgagcccggcaccgtgcccttcgacagagtgctgctgaacgacggcggctactacgaccccgagaccggcgtgttcaccgcccccctggccggcagatacctgctgagcgccgtgctgaccggccacagacacgagaaggtggaggccgtgctgagcagaagcaaccagggcgtggccagagtggacagcggcggctacgagcccgagggcctggagaacaagcccgtggccgagagccagcccagccccggcaccctgggcgtgttcagcctgatcctgcccctgcaggccggcgacaccgtgtgcgtggacctggtgatgggccagctggcccacagcgaggagcccctgaccatcttcagcggcgccctgctgtacggcgaccccgagctggagcacgcctag

SEQ ID NO: 80233 - DNA, 1044 bp, synthetic construct
  misc_feature 1..1044: note = Description of Artificial Sequence: Synthetic coding sequence
  source 1..1044: mol_type = other DNA
atggccgacctgggcgccaccaaggacagaatcatcagcgagatcaacagactgcagcaggaggccaccgagcacgccaccgagagcgaggagagattcagaggcctggaggagggccaggcccaggccggccagtgccccagcctggagggcagactgggcagactggagggcgtgtgcgagagactggacaccgtggccggcggcctgcagggcctgagagagggcctgagcagacacgtggccggcctgtgggccggcctgagagagaccaacaccaccagccagatgcaggccgccctgctggagaagctggtgggcggccaggccggcctgggcagaagactgggcgccctgaacagcagcctgcagctgctggaggacagactgcaccagctgagcctgaaggacctgaccggcgagggcaccaagggccccgccggcgaggccggcccccccggcccccccggcctgcagggcccccccggccccgccggcccccccggcagccccggcaaggacggccaggagggccccatcggcccccccggcccccagggcgagcagggcgtggagggcgcccccgccgcccccgtgccccaggtggccttcagcgccgccctgagcctgcccagaagcgagcccggcaccgtgcccttcgacagagtgctgctgaacgacggcggctactacgaccccgagaccggcgtgttcaccgcccccctggccggcagatacctgctgagcgccgtgctgaccggccacagacacgagaaggtggaggccgtgctgagcagaagcaaccagggcgtggccagagtggacagcggcggctacgagcccgagggcctggagaacaagcccgtggccgagagccagcccagccccggcaccctgggcgtgttcagcctgatcctgcccctgcaggccggcgacaccgtgtgcgtggacctggtgatgggccagctggcccacagcgaggagcccctgaccatcttcagcggcgccctgctgtacggcgaccccgagctggagcacgcctag

SEQ ID NO: 80234 - DNA, 1062 bp, synthetic construct
  misc_feature 1..1062: note = Description of Artificial Sequence: Synthetic coding sequence
  source 1..1062: mol_type = other DNA
atgggcagcggcggcagaagcgcccaggtgagcaccggccagagagcctggctgctgccctgcagattcctgaagaacaccatgagcaacggctacgaggaccacatggccgaggactgcagaggcgacatcggcagaaccaacctgatcgtgaactacctgccccagaacatgacccaggacgagctgagaagcctgttcagcagcatcggcgaggtggagagcgccaagctgatcagagacaaggtggccggccacagcctgggctacggcttcgtgaactacgtgaccgccaaggacgccgagagagccatcaacaccctgaacggcctgagactgcagagcaagaccatcaaggtgagctacgccagacccagcagcgaggtgatcaaggacgccaacctgtacatcagcggcctgcccagaaccatgacccagaaggacgtggaggacatgttcagcagattcggcagaatcatcaacagcagagtgctggtggaccagaccaccggcctgagcagaggcgtggccttcatcagattcgacaagagaagcgaggccgaggaggccatcaccagcttcaacggccacaagccccccggcagcagcgagcccatcaccgtgaagttcgccgccaaccccaaccagaacaagaacgtggccctgctgagccagctgtaccacagccccgccagaagattcggcggccccgtgcaccaccaggcccagagattcagattcagccccatgggcgtggaccacatgagcggcctgagcggcgtgaacgtgcccggcaacgccagcagcggctggtgcatcttcatctacaacctgggccaggacgccgacgagggcatcctgtggcagatgttcggccccttcggcgccgtgaccaacgtgaaggtgatcagagacttcaacaccaacaagtgcaagggcttcggcttcgtgaccatgaccaactacgaggaggccgccatggccatcgccagcctgaacggctacagactgggcgacaagatcctgcaggtgagcttcaagaccaacaagagccacaagtag

SEQ ID NO: 80235 - DNA, 981 bp, synthetic construct
  misc_feature 1..981: note = Description of Artificial Sequence: Synthetic coding sequence
  source 1..981: mol_type = other DNA
atgagcaacggctacgaggaccacatggccgaggactgcagaggcgacatcggcagaaccaacctgatcgtgaactacctgccccagaacatgacccaggacgagctgagaagcctgttcagcagcatcggcgaggtggagagcgccaagctgatcagagacaaggtggccggccacagcctgggctacggcttcgtgaactacgtgaccgccaaggacgccgagagagccatcaacaccctgaacggcctgagactgcagagcaagaccatcaaggtgagctacgccagacccagcagcgaggtgatcaaggacgccaacctgtacatcagcggcctgcccagaaccatgacccagaaggacgtggaggacatgttcagcagattcggcagaatcatcaacagcagagtgctggtggaccagaccaccggcctgagcagaggcgtggccttcatcagattcgacaagagaagcgaggccgaggaggccatcaccagcttcaacggccacaagccccccggcagcagcgagcccatcaccgtgaagttcgccgccaaccccaaccagaacaagaacgtggccctgctgagccagctgtaccacagccccgccagaagattcggcggccccgtgcaccaccaggcccagagattcagattcagccccatgggcgtggaccacatgagcggcctgagcggcgtgaacgtgcccggcaacgccagcagcggctggtgcatcttcatctacaacctgggccaggacgccgacgagggcatcctgtggcagatgttcggccccttcggcgccgtgaccaacgtgaaggtgatcagagacttcaacaccaacaagtgcaagggcttcggcttcgtgaccatgaccaactacgaggaggccgccatggccatcgccagcctgaacggctacagactgggcgacaagatcctgcaggtgagcttcaagaccaacaagagccacaagtag

SEQ ID NO: 80236 - DNA, 828 bp, synthetic construct
  misc_feature 1..828: note = Description of Artificial Sequence: Synthetic coding sequence
  source 1..828: mol_type = other DNA
atgagcagcctgcacaagagcagaatcgccgacttccaggacgtgctgaaggagcccagcatcgccctggagaagctgagagagctgagcttcagcggcatcccctgcgagggcggcctgagatgcctgtgctggaagatcctgctgaactacctgcccctggagagagccagctggaccagcatcctggccaagcagagagagctgtacgcccagttcctgagagagatgatcatccagcccggcatcgccaaggccaacatgggcgtgagcagagaggacgtgaccttcgaggaccaccccctgaaccccaaccccgacagcagatggaacacctacttcaaggacaacgaggtgctgctgcagatcgacaaggacgtgagaagactgtgccccgacatcagcttcttccagagagccaccgactacccctgcctgctgatcctggacccccagaacgagttcgagaccctgagaaagagagtggagcagaccaccctgaagagccagaccgtggccagaaacagaagcggcgtgaccaaccaggagcagaacatcaagccccagttcttcgccttcagatggctgaccctgctgctgagccaggagttcctgctgcccgacgtgatcagaatctgggacagcctgttcgccgacgacaacagattcgacttcctgctgctggtgtgctgcgccatgctgatgctgatcagagagcagctgctggagggcgacttcaccgtgaacatgagactgctgcaggactaccccatcaccgacgtgtgccagatcctgcagaaggccaaggagctgcaggacagcaagtag

SEQ ID NO: 80237 - DNA, 1164 bp, synthetic construct
  misc_feature 1..1164: note = Description of Artificial Sequence: Synthetic coding sequence
  source 1..1164: mol_type = other DNA
atggccgtgagactgtgcgacgtggccagcctgctgagaagcggcagctgggccgccgagccctggaccggcgtgatcgccgccatggagacccagctgagcaacggccccacctgcaacaacaccgccaacggccccaccaccatcaacaacaactgcagcagccccgtggacagcggcaacaccgaggacagcaagaccaacctgatcgtgaactacctgccccagaacatgacccaggaggagctgaagagcctgttcggcagcatcggcgagatcgagagctgcaagctggtgagagacaagatcaccggccagagcctgggctacggcttcgtgaactacatcgaccccaaggacgccgagaaggccatcaacaccctgaacggcctgagactgcagaccaagaccatcaaggtgagctacgccagacccagcagcgccagcatcagagacgccaacctgtacgtgagcggcctgcccaagaccatgacccagaaggagctggagcagctgttcagccagtacggcagaatcatcaccagcagaatcctggtggaccaggtgaccggcatcagcagaggcgtgggcttcatcagattcgacaagagaatcgaggccgaggaggccatcaagggcctgaacggccagaagccccccggcgccaccgagcccatcaccgtgaagttcgccaacaaccccagccagaagaccaaccaggccatcctgagccagctgtaccagagccccaacagaagataccccggccccctggcccagcaggcccagagattcagactggacaacctgctgaacatggcctacggcgtgaagagattcagccccatgaccatcgacggcatgaccagcctggccggcatcaacatccccggccaccccggcaccggctggtgcatcttcgtgtacaacctggcccccgacgccgacgagagcatcctgtggcagatgttcggccccttcggcgccgtgaccaacgtgaaggtgatcagagacttcaacaccaacaagtgcaagggcttcggcttcgtgaccatgaccaactacgacgaggccgccatggccatcgccagcctgaacggctacagactgggcgacagagtgctgcaggtgagcttcaagaccaacaagacccacaaggcctag

SEQ ID NO: 80238 - DNA, 1041 bp, synthetic construct
  misc_feature 1..1041: note = Description of Artificial Sequence: Synthetic coding sequence
  source 1..1041: mol_type = other DNA
atggagacccagctgagcaacggccccacctgcaacaacaccgccaacggccccaccaccatcaacaacaactgcagcagccccgtggacagcggcaacaccgaggacagcaagaccaacctgatcgtgaactacctgccccagaacatgacccaggaggagctgaagagcctgttcggcagcatcggcgagatcgagagctgcaagctggtgagagacaagatcaccggccagagcctgggctacggcttcgtgaactacatcgaccccaaggacgccgagaaggccatcaacaccctgaacggcctgagactgcagaccaagaccatcaaggtgagctacgccagacccagcagcgccagcatcagagacgccaacctgtacgtgagcggcctgcccaagaccatgacccagaaggagctggagcagctgttcagccagtacggcagaatcatcaccagcagaatcctggtggaccaggtgaccggcatcagcagaggcgtgggcttcatcagattcgacaagagaatcgaggccgaggaggccatcaagggcctgaacggccagaagccccccggcgccaccgagcccatcaccgtgaagttcgccaacaaccccagccagaagaccaaccaggccatcctgagccagctgtaccagagccccaacagaagataccccggccccctggcccagcaggcccagagattcagattcagccccatgaccatcgacggcatgaccagcctggccggcatcaacatccccggccaccccggcaccggctggtgcatcttcgtgtacaacctggcccccgacgccgacgagagcatcctgtggcagatgttcggccccttcggcgccgtgaccaacgtgaaggtgatcagagacttcaacaccaacaagtgcaagggcttcggcttcgtgaccatgaccaactacgacgaggccgccatggccatcgccagcctgaacggctacagactgggcgacagagtgctgcaggtgagcttcaagaccaacaagacccacaaggcctag

SEQ ID NO: 80239 - DNA, 1080 bp, synthetic construct
  misc_feature 1..1080: note = Description of Artificial Sequence: Synthetic coding sequence
  source 1..1080: mol_type = other DNA
atggagacccagctgagcaacggccccacctgcaacaacaccgccaacggccccaccaccatcaacaacaactgcagcagccccgtggacagcggcaacaccgaggacagcaagaccaacctgatcgtgaactacctgccccagaacatgacccaggaggagctgaagagcctgttcggcagcatcggcgagatcgagagctgcaagctggtgagagacaagatcaccggccagagcctgggctacggcttcgtgaactacatcgaccccaaggacgccgagaaggccatcaacaccctgaacggcctgagactgcagaccaagaccatcaaggtgagctacgccagacccagcagcgccagcatcagagacgccaacctgtacgtgagcggcctgcccaagaccatgacccagaaggagctggagcagctgttcagccagtacggcagaatcatcaccagcagaatcctggtggaccaggtgaccggcatcagcagaggcgtgggcttcatcagattcgacaagagaatcgaggccgaggaggccatcaagggcctgaacggccagaagccccccggcgccaccgagcccatcaccgtgaagttcgccaacaaccccagccagaagaccaaccaggccatcctgagccagctgtaccagagccccaacagaagataccccggccccctggcccagcaggcccagagattcagactggacaacctgctgaacatggcctacggcgtgaagagattcagccccatgaccatcgacggcatgaccagcctggccggcatcaacatccccggccaccccggcaccggctggtgcatcttcgtgtacaacctggcccccgacgccgacgagagcatcctgtggcagatgttcggccccttcggcgccgtgaccaacgtgaaggtgatcagagacttcaacaccaacaagtgcaagggcttcggcttcgtgaccatgaccaactacgacgaggccgccatggccatcgccagcctgaacggctacagactgggcgacagagtgctgcaggtgagcttcaagaccaacaagacccacaaggcctag

SEQ ID NO: 80240 - DNA, 1080 bp, synthetic construct; identical to SEQ ID NO: 80239
  misc_feature 1..1080: note = Description of Artificial Sequence: Synthetic coding sequence
  source 1..1080: mol_type = other DNA

SEQ ID NO: 80241 - DNA, 273 bp, synthetic construct
  misc_feature 1..273: note = Description of Artificial Sequence: Synthetic coding sequence
  source 1..273: mol_type = other DNA
atgacccagaaggagctggagcagctgttcagccagtacggcagaatcatcaccagcagaatcctggtggaccaggtgaccggcatcagcagaggcgtgggcttcatcagattcgacaagagaatcgaggccgaggaggccatcaagggcctgaacggccagaagccccccggcgccaccgagcccatcaccgtgaagttcgccaacaaccccagccagaagaccaaccaggccatcctgagccagctgtaccagagccccaacagaagatag

SEQ ID NO: 80242 - DNA, 570 bp, synthetic construct
  misc_feature 1..570: note = Description of Artificial Sequence: Synthetic coding sequence
  source 1..570: mol_type = other DNA
atggagacccagctgagcaacggccccacctgcaacaacaccgccaacggccccaccaccatcaacaacaactgcagcagccccgtggacagcggcaacaccgaggacagcaagaccaacctgatcgtgaactacctgccccagaacatgacccaggaggagctgaagagcctgttcggcagcatcggcgagatcgagagctgcaagctggtgagagacaagatcaccggccagagcctgggctacggcttcgtgaactacatcgaccccaaggacgccgagaaggccatcaacaccctgaacggcctgagactgcagaccaagaccatcaaggtgagctacgccagacccagcagcgccagcatcagagacgccaacctgtacgtgagcggcctgcccaagaccatgacccagaaggagctggagcagctgttcagccagtacggcagaatcatcaccagcagaatcctggtggaccaggtgaccggcatcagcagaggcgtgggcttcatcagattcgacaagagaatcgaggccgaggaggccatcaagggcctgaacggccagtag

SEQ ID NO: 80243 - DNA, 1080 bp, synthetic construct; identical to SEQ ID NO: 80239
  misc_feature 1..1080: note = Description of Artificial Sequence: Synthetic coding sequence
  source 1..1080: mol_type = other DNA

SEQ ID NO: 80244 - DNA, 1104 bp, synthetic construct
  misc_feature 1..1104: note = Description of Artificial Sequence: Synthetic coding sequence
  source 1..1104: mol_type = other DNA
atggtgacccagatcctgggcgccatggagagccaggtgggcggcggccccgccggccccgccctgcccaacggccccctgctgggcaccaacggcgccaccgacgacagcaagaccaacctgatcgtgaactacctgccccagaacatgacccaggacgagttcaagagcctgttcggcagcatcggcgacatcgagagctgcaagctggtgagagacaagatcaccggccagagcctgggctacggcttcgtgaactacagcgaccccaacgacgccgacaaggccatcaacaccctgaacggcctgaagctgcagaccaagaccatcaaggtgagctacgccagacccagcagcgccagcatcagagacgccaacctgtacgtgagcggcctgcccaagaccatgagccagaaggagatggagcagctgttcagccagtacggcagaatcatcaccagcagaatcctggtggaccaggtgaccggcgtgagcagaggcgtgggcttcatcagattcgacaagagaatcgaggccgaggaggccatcaagggcctgaacggccagaagcccctgggcgccgccgagcccatcaccgtgaagttcgccaacaaccccagccagaagaccggccaggccctgctgacccacctgtaccagagcagcgccagaagatacgccggccccctgcaccaccagacccagagattcagactggacaacctgctgaacatggcctacggcgtgaagagccccctgagcctgatcgccagattcagccccatcgccatcgacggcatgagcggcctggccggcgtgggcctgagcggcggcgccgccggcgccggctggtgcatcttcgtgtacaacctgagccccgaggccgacgagagcgtgctgtggcagctgttcggccccttcggcgccgtgaccaacgtgaaggtgatcagagacttcaccaccaacaagtgcaagggcttcggcttcgtgaccatgaccaactacgacgaggccgccatggccatcgccagcctgaacggctacagactgggcgagagagtgctgcaggtgagcttcaagaccagcaagcagcacaaggcctag

SEQ ID NO: 80245 - DNA, 1083 bp, synthetic construct
  misc_feature 1..1083: note = Description of Artificial Sequence: Synthetic coding sequence
  source 1..1083: mol_type = other DNA
atggtgacccagatcctgggcgccatggagagccaggtgggcggcggccccgccggccccgccctgcccaacggccccctgctgggcaccaacggcgccaccgacgacagcaagaccaacctgatcgtgaactacctgccccagaacatgacccaggacgagttcaagagcctgttcggcagcatcggcgacatcgagagctgcaagctggtgagagacaagatcaccggccagagcctgggctacggcttcgtgaactacagcgaccccaacgacgccgacaaggccatcaacaccctgaacggcctgaagctgcagaccaagaccatcaaggtgagctacgccagacccagcagcgccagcatcagagacgccaacctgtacgtgagcggcctgcccaagaccatgagccagaaggagatggagcagctgttcagccagtacggcagaatcatcaccagcagaatcctggtggaccaggtgaccggcgtgagcagaggcgtgggcttcatcagattcgacaagagaatcgaggccgaggaggccatcaagggcctgaacggccagaagcccctgggcgccgccgagcccatcaccgtgaagttcgccaacaaccccagccagaagaccggccaggccctgctgacccacctgtaccagagcagcgccagaagatacgccggccccctgcaccaccagacccagagattcagactggacaacctgctgaacatggcctacggcgtgaagagattcagccccatcgccatcgacggcatgagcggcctggccggcgtgggcctgagcggcggcgccgccggcgccggctggtgcatcttcgtgtacaacctgagccccgaggccgacgagagcgtgctgtggcagctgttcggccccttcggcgccgtgaccaacgtgaaggtgatcagagacttcaccaccaacaagtgcaagggcttcggcttcgtgaccatgaccaactacgacgaggccgccatggccatcgccagcctgaacggctacagactgggcgagagagtgctgcaggtgagcttcaagaccagcaagcagcacaaggcctag

SEQ ID NO: 80246 - DNA, 1152 bp, synthetic construct
  misc_feature 1..1152: note = Description of Artificial Sequence: Synthetic coding sequence
  source 1..1152: mol_type = other DNA
atgagactgctgctgctgagagagatcgtgatcaacgagagcagaaactgcagcttcatgatcatcagcaccatggagccccaggtgagcaacggccccaccagcaacaccagcaacggccccagcagcaacaacagaaactgccccagccccatgcagaccggcgccaccaccgacgacagcaagaccaacctgatcgtgaactacctgccccagaacatgacccaggaggagttcagaagcctgttcggcagcatcggcgagatcgagagctgcaagctggtgagagacaagatcaccggccagagcctgggctacggcttcgtgaactacatcgaccccaaggacgccgagaaggccatcaacaccctgaacggcctgagactgcagaccaagaccatcaaggtgagctacgccagacccagcagcgccagcatcagagacgccaacctgtacgtgagcggcctgcccaagaccatgacccagaaggagctggagcagctgttcagccagtacggcagaatcatcaccagcagaatcctggtggaccaggtgaccggcgtgagcagaggcgtgggcttcatcagattcgacaagagaatcgaggccgaggaggccatcaagggcctgaacggccagaagcccagcggcgccaccgagcccatcaccgtgaagttcgccaacaaccccagccagaagagcagccaggccctgctgagccagctgtaccagagccccaacagaagataccccggccccctgcaccaccaggcccagagattcagactggacaacctgctgaacatggcctacggcgtgaagagattcagccccatcaccatcgacggcatgaccagcctggtgggcatgaacatccccggccacaccggcaccggctggtgcatcttcgtgtacaacctgagccccgacagcgacgagagcgtgctgtggcagctgttcggccccttcggcgccgtgaacaacgtgaaggtgatcagagacttcaacaccaacaagtgcaagggcttcggcttcgtgaccatgaccaactacgacgaggccgccatggccatcgccagcctgaacggctacagactgggcgacagagtgctgcaggtgagcttcaagaccaacaaggcccacaagagctag

SEQ ID NO: 80247 - DNA, 1116 bp, synthetic construct
  misc_feature 1..1116: note = Description of Artificial Sequence: Synthetic coding sequence
  source 1..1116: mol_type = other DNA
atggagtggaacggcctgaagatgatcatcagcaccatggagccccaggtgagcaacggccccaccagcaacaccagcaacggccccagcagcaacaacagaaactgccccagccccatgcagaccggcgccaccaccgacgacagcaagaccaacctgatcgtgaactacctgccccagaacatgacccaggaggagttcagaagcctgttcggcagcatcggcgagatcgagagctgcaagctggtgagagacaagatcaccggccagagcctgggctacggcttcgtgaactacatcgaccccaaggacgccgagaaggccatcaacaccctgaacggcctgagactgcagaccaagaccatcaaggtgagctacgccagacccagcagcgccagcatcagagacgccaacctgtacgtgagcggcctgcccaagaccatgacccagaaggagctggagcagctgttcagccagtacggcagaatcatcaccagcagaatcctggtggaccaggtgaccggcgtgagcagaggcgtgggcttcatcagattcgacaagagaatcgaggccgaggaggccatcaagggcctgaacggccagaagcccagcggcgccaccgagcccatcaccgtgaagttcgccaacaaccccagccagaagagcagccaggccctgctgagccagctgtaccagagccccaacagaagataccccggccccctgcaccaccaggcccagagattcagactggacaacctgctgaacatggcctacggcgtgaagagattcagccccatcaccatcgacggcatgaccagcctggtgggcatgaacatccccggccacaccggcaccggctggtgcatcttcgtgtacaacctgagccccgacagcgacgagagcgtgctgtggcagctgttcggccccttcggcgccgtgaacaacgtgaaggtgatcagagacttcaacaccaacaagtgcaagggcttcggcttcgtgaccatgaccaactacgacgaggccgccatggccatcgccagcctgaacggctacagactgggcgacagagtgctgcaggtgagcttcaagaccaacaaggcccacaagagctag

SEQ ID NO: 80248 - DNA, 1158 bp, synthetic construct
  misc_feature 1..1158: note = Description of Artificial Sequence: Synthetic coding sequence
  source 1..1158: mol_type = other DNA
atggagtggaacggcctgaagatgatcatcagcaccatggagccccaggtgagcaacggccccaccagcaacaccagcaacggccccagcagcaacaacagaaactgccccagccccatgcagaccggcgccaccaccgacgacagcaagaccaacctgatcgtgaactacctgccccagaacatgacccaggaggagttcagaagcctgttcggcagcatcggcgagatcgagagctgcaagctggtgagagacaagatcaccggccagagcctgggctacggcttcgtgaactacatcgaccccaaggacgccgagaaggccatcaacaccctgaacggcctgagactgcagaccaagaccatcaaggtgagctacgccagacccagcagcgccagcatcagagacgccaacctgtacgtgagcggcctgcccaagaccatgacccagaaggagctggagcagctgttcagccagtacggcagaatcatcaccagcagaatcctggtggaccaggtgaccggcgtgagcagaggcgtgggcttcatcagattcgacaagagaatcgaggccgaggaggccatcaagggcctgaacggccagaagcccagcggcgccaccgagcccatcaccgtgaagttcgccaacaaccccagccagaagagcagccaggccctgctgagccagctgtaccagagccccaacagaagataccccggccccctgcaccaccaggcccagagattcagactggacaacctgctgaacatggcctacggcgtgaagagactgatgagcggccccgtgccccccagcgcctgcccccccagattcagccccatcaccatcgacggcatgaccagcctggtgggcatgaacatccccggccacaccggcaccggctggtgcatcttcgtgtacaacctgagccccgacagcgacgagagcgtgctgtggcagctgttcggccccttcggcgccgtgaacaacgtgaaggtgatcagagacttcaacaccaacaagtgcaagggcttcggcttcgtgaccatgaccaactacgacgaggccgccatggccatcgccagcctgaacggctacagactgggcgacagagtgctgcaggtgagcttcaagaccaacaaggcccacaagagctag

SEQ ID NO: 80249 - DNA, 1143 bp, synthetic construct
  misc_feature 1..1143: note = Description of Artificial Sequence: Synthetic coding sequence
  source 1..1143: mol_type = other DNA
atggtgatgatcatcagcaccatggagccccaggtgagcaacggccccaccagcaacaccagcaacggccccagcagcaacaacagaaactgccccagccccatgcagaccggcgccaccaccgacgacagcaagaccaacctgatcgtgaactacctgccccagaacatgacccaggaggagttcagaagcctgttcggcagcatcggcgagatcgagagctgcaagctggtgagagacaagatcaccggccagagcctgggctacggcttcgtgaactacatcgaccccaaggacgccgagaaggccatcaacaccctgaacggcctgagactgcagaccaagaccatcaaggtgagctacgccagacccagcagcgccagcatcagagacgccaacctgtacgtgagcggcctgcccaagaccatgacccagaaggagctggagcagctgttcagccagtacggcagaatcatcaccagcagaatcctggtggaccaggtgaccggcgtgagcagaggcgtgggcttcatcagattcgacaagagaatcgaggccgaggaggccatcaagggcctgaacggccagaagcccagcggcgccaccgagcccatcaccgtgaagttcgccaacaaccccagccagaagagcagccaggccctgctgagccagctgtaccagagccccaacagaagataccccggccccctgcaccaccaggcccagagattcagactggacaacctgctgaacatggcctacggcgtgaagagactgatgagcggccccgtgccccccagcgcctgcccccccagattcagccccatcaccatcgacggcatgaccagcctggtgggcatgaacatccccggccacaccggcaccggctggtgcatcttcgtgtacaacctgagccccgacagcgacgagagcgtgctgtggcagctgttcggccccttcggcgccgtgaacaacgtgaaggtgatcagagacttcaacaccaacaagtgcaagggcttcggcttcgtgaccatgaccaactacgacgaggccgccatggccatcgccagcctgaacggctacagactgggcgacagagtgctgcaggtgagcttcaagaccaacaaggcccacaagagctag

SEQ ID NO: 80250 - DNA, 1101 bp, synthetic construct
  misc_feature 1..1101: note = Description of Artificial Sequence: Synthetic coding sequence
  source 1..1101: mol_type = other DNA
atggtgatgatcatcagcaccatggagccccaggtgagcaacggccccaccagcaacaccagcaacggccccagcagcaacaacagaaactgccccagccccatgcagaccggcgccaccaccgacgacagcaagaccaacctgatcgtgaactacctgccccagaacatgacccaggaggagttcagaagcctgttcggcagcatcggcgagatcgagagctgcaagctggtgagagacaagatcaccggccagagcctgggctacggcttcgtgaactacatcgaccccaaggacgccgagaaggccatcaacaccctgaacggcctgagactgcagaccaagaccatcaaggtgagctacgccagacccagcagcgccagcatcagagacgccaacctgtacgtgagcggcctgcccaagaccatgacccagaaggagctggagcagctgttcagccagtacggcagaatcatcaccagcagaatcctggtggaccaggtgaccggcgtgagcagaggcgtgggcttcatcagattcgacaagagaatcgaggccgaggaggccatcaagggcctgaacggccagaagcccagcggcgccaccgagcccatcaccgtgaagttcgccaacaaccccagccagaagagcagccaggccctgctgagccagctgtaccagagccccaacagaagataccccggccccctgcaccaccaggcccagagattcagactggacaacctgctgaacatggcctacggcgtgaagagattcagccccatcaccatcgacggcatgaccagcctggtgggcatgaacatccccggccacaccggcaccggctggtgcatcttcgtgtacaacctgagccccgacagcgacgagagcgtgctgtggcagctgttcggccccttcggcgccgtgaacaacgtgaaggtgatcagagacttcaacaccaacaagtgcaagggcttcggcttcgtgaccatgaccaactacgacgaggccgccatggccatcgccagcctgaacggctacagactgggcgacagagtgctgcaggtgagcttcaagaccaacaaggcccacaagagctag

SEQ ID NO: 80251 - DNA, 1101 bp, synthetic construct
  misc_feature 1..1101: note = Description of Artificial Sequence: Synthetic coding sequence
  source 1..1101: mol_type = other DNA
atggagcagatcatcagcaccatggagccccaggtgagcaacggccccaccagcaacaccagcaacggccccagcagcaacaacagaaactgccccagccccatgcagaccggcgccaccaccgacgacagcaagaccaacctgatcgtgaactacctgccccagaacatgacccaggaggagttcagaagcctgttcggcagcatcggcgagatcgagagctgcaagctggtgagagacaagatcaccggccagagcctgggctacggcttcgtgaactacatcgaccccaaggacgccgagaaggccatcaacaccctgaacggcctgagactgcagaccaagaccatcaaggtgagctacgccagacccagcagcgccagcatcagagacgccaacctgtacgtgagcggcctgcccaagaccatgacccagaaggagctggagcagctgttcagccagtacggcagaatcatcaccagcagaatcctggtggaccaggtgaccggcgtgagcagaggcgtgggcttcatcagattcgacaagagaatcgaggccgaggaggccatcaagggcctgaacggccagaagcccagcggcgccaccgagcccatcaccgtgaagttcgccaacaaccccagccagaagagcagccaggccctgctgagccagctgtaccagagccccaacagaagataccccggccccctgcaccaccaggcccagagattcagactggacaacctgctgaacatggcctacggcgtgaagagattcagccccatcaccatcgacggcatgaccagcctggtgggcatgaacatccccggccacaccggcaccggctggtgcatcttcgtgtacaacctgagccccgacagcgacgagagcgtgctgtggcagctgttcggccccttcggcgccgtgaacaacgtgaaggtgatcagagacttcaacaccaacaagtgcaagggcttcggcttcgtgaccatgaccaactacgacgaggccgccatggccatcgccagcctgaacggctacagactgggcgacagagtgctgcaggtgagcttcaagaccaacaaggcccacaagagctag

SEQ ID NO: 80252 - DNA, 1110 bp, synthetic construct
  misc_feature 1..1110: note = Description of Artificial Sequence: Synthetic coding sequence
  source 1..1110: mol_type = other DNA
atgagactgaagaaccagatcatcagcaccatggagccccaggtgagcaacggccccaccagcaacaccagcaacggccccagcagcaacaacagaaactgccccagccccatgcagaccggcgccaccaccgacgacagcaagaccaacctgatcgtgaactacctgccccagaacatgacccaggaggagttcagaagcctgttcggcagcatcggcgagatcgagagctgcaagctggtgagagacaagatcaccggccagagcctgggctacggcttcgtgaactacatcgaccccaaggacgccgagaaggccatcaacaccctgaacggcctgagactgcagaccaagaccatcaaggtgagctacgccagacccagcagcgccagcatcagagacgccaacctgtacgtgagcggcctgcccaagaccatgacccagaaggagctggagcagctgttcagccagtacggcagaatcatcaccagcagaatcctggtggaccaggtgaccggcgtgagcagaggcgtgggcttcatcagattcgacaagagaatcgaggccgaggaggccatcaagggcctgaacggccagaagcccagcggcgccaccgagcccatcaccgtgaagttcgccaacaaccccagccagaagagcagccaggccctgctgagccagctgtaccagagccccaacagaagataccccggccccctgcaccaccaggcccagagattcagactggacaacctgctgaacatggcctacggcgtgaagagattcagccccatcaccatcgacggcatgaccagcctggtgggcatgaacatccccggccacaccggcaccggctggtgcatcttcgtgtacaacctgagccccgacagcgacgagagcgtgctgtggcagctgttcggccccttcggcgccgtgaacaacgtgaaggtgatcagagacttcaacaccaacaagtgcaagggcttcggcttcgtgaccatgaccaactacgacgaggccgccatggccatcgccagcctgaacggctacagactgggcgacagagtgctgcaggtgagcttcaagaccaacaaggcccacaagagctag

SEQ ID NO: 80253 - DNA, 855 bp, synthetic construct
  misc_feature 1..855: note = Description of Artificial Sequence: Synthetic coding sequence
  source 1..855: mol_type = other DNA
atgttcagagccgccgcccccggccagctgagaagagccgtggcccaggacctgtgcaaggtggccggcatcgccaaggtgctggtggcccagcacgacgtgtacaagggcctgctgcccgaggagctgacccccctgatcctggccacccagaagcagttcaactacacccacatctgcgccggcgccagcgccttcggcaagaacctgctgcccagagtggccgccaagctggaggtggcccccatcagcgacatcatcgccatcaagagccccgacaccttcgtgagaaccatctacgccggcaacgccctgtgcaccgtgaagtgcgacgagaaggtgaaggtgttcagcgtgagaggcaccagcttcgacgccgccgccaccagcggcggcagcgccagcagcgagaaggccagcagcaccagccccgtggagatcagcgagtggctggaccagaagctgaccaagagcgacagacccgagctgaccggcgccaaggtggtggtgagcggcggcagaggcctgaagagcggcgagaacttcaagctgctgtacgacctggccgaccagctgcacgccgccgtgggcgccagcagagccgccgtggacgccggcttcgtgcccaacgacatgcaggtgggccagaccggcaagatcgtggcccccgagctgtacatcgccgtgggcatcagcggcgccatccagcacctggccggcatgaaggacagcaagaccatcgtggccatcaacaaggaccccgaggcccccatcttccaggtggccgactacggcatcgtggccgacctgttcaaggtggtgcccgagatgaccgagatcctgaagaagaagtag

SEQ ID NO: 80254 - DNA, 1002 bp, synthetic construct
  misc_feature 1..1002: note = Description of Artificial Sequence: Synthetic coding sequence
  source 1..1002: mol_type = other DNA
atgttcagagccgccgcccccggccagctgagaagagccgccagcctgctgagattccagagcaccctggtgatcgccgagcacgccaacgacagcctggcccccatcaccctgaacaccatcaccgccgccaccagactgggcggcgaggtgagctgcctggtggccggcaccaagtgcgacaaggtggcccaggacctgtgcaaggtggccggcatcgccaaggtgctggtggcccagcacgacgtgtacaagggcctgctgcccgaggagctgacccccctgatcctggccacccagaagcagttcaactacacccacatctgcgccggcgccagcgccttcggcaagaacctgctgcccagagtggccgccaagctggaggtggcccccatcagcgacatcatcgccatcaagagccccgacaccttcgtgagaaccatctacgccggcaacgccctgtgcaccgtgaagtgcgacgagaaggtgaaggtgttcagcgtgagaggcaccagcttcgacgccgccgccaccagcggcggcagcgccagcagcgagaaggccagcagcaccagccccgtggagatcagcgagtggctggaccagaagctgaccaagagcgacagacccgagctgaccggcgccaaggtggtggtgagcggcggcagaggcctgaagagcggcgagaacttcaagctgctgtacgacctggccgaccagctgcacgccgccgtgggcgccagcagagccgccgtggacgccggcttcgtgcccaacgacatgcaggtgggccagaccggcaagatcgtggcccccgagctgtacatcgccgtgggcatcagcggcgccatccagcacctggccggcatgaaggacagcaagaccatcgtggccatcaacaaggaccccgaggcccccatcttccaggtggccgactacggcatcgtggccgacctgttcaaggtggtgcccgagatgaccgagatcctgaagaagaagtag

SEQ ID NO: 80255 - DNA, 768 bp, synthetic construct
  misc_feature 1..768: note = Description of Artificial Sequence: Synthetic coding sequence
  source 1..768: mol_type = other DNA
atggccgagctgagagtgctggtggccgtgaagagagtgatcgactacgccgtgaagatcagagtgaagcccgacagaaccggcgtggtgaccgacggcgtgaagcacagcatgaaccccttctgcgagatcgccgtggaggaggccgtgagactgaaggagaagaagctggtgaaggaggtgatcgccgtgagctgcggccccgcccagtgccaggagaccatcagaaccgccctggccatgggcgccgacagaggcatccacgtggaggtgccccccgccgaggccgagagactgggccccctgcaggtggccagagtgctggccaagctggccgagaaggagaaggtggacctggtgctgctgggcaagcaggccatcgacgacgactgcaaccagaccggccagatgaccgccggcttcctggactggccccagggcaccttcgccagccaggtgaccctggagggcgacaagctgaaggtggagagagagatcgacggcggcctggagaccctgagactgaagctgcccgccgtggtgaccgccgacctgagactgaacgagcccagatacgccaccctgcccaacatcatgaaggccaagaagaagaagatcgaggtgatcaagcccggcgacctgggcgtggacctgaccagcaagctgagcgtgatcagcgtggaggaccccccccagagaaccgccggcgtgaaggtggagaccaccgaggacctggtggccaagctgaaggagatcggcagaatctag

SEQ ID NO: 80256 - DNA, 1041 bp, synthetic construct
  misc_feature 1..1041: note = Description of Artificial Sequence: Synthetic coding sequence
  source 1..1041: mol_type = other DNA
atgtacctgagcctgtgggtgaccatcaacaccgtgaacctgagaaacaccctgagcggcctgagaggcgccgtgaccaccgtgggcatgatcaagagcgacgtgcccggcacccaggagtggctggacgagagaagaagacagggcgacctgcccctgcccaccaacagcaaccccgtgctgagcctggagctgtgcgaccccggccagggccccgcccccttccaggccgtggtggtgctgatccagcccggcagaggcctggccctgagacccccccccagctgcctgttcccccccgaccccacccccagcccccccgccggccagatcagagtgaagcccgacagaaccggcgtggtgaccgacggcgtgaagcacagcatgaaccccttctgcgagatcgccgtggaggaggccgtgagactgaaggagaagaagctggtgaaggaggtgatcgccgtgagctgcggccccgcccagtgccaggagaccatcagaaccgccctggccatgggcgccgacagaggcatccacgtggaggtgccccccgccgaggccgagagactgggccccctgcaggtggccagagtgctggccaagctggccgagaaggagaaggtggacctggtgctgctgggcaagcaggccatcgacgacgactgcaaccagaccggccagatgaccgccggcttcctggactggccccagggcaccttcgccagccaggtgaccctggagggcgacaagctgaaggtggagagagagatcgacggcggcctggagaccctgagactgaagctgcccgccgtggtgaccgccgacctgagactgaacgagcccagatacgccaccctgcccaacatcatgaaggccaagaagaagaagatcgaggtgatcaagcccggcgacctgggcgtggacctgaccagcaagctgagcgtgatcagcgtggaggaccccccccagagaaccgccggcgtgaaggtggagaccaccgaggacctggtggccaagctgaaggagatcggcagaatctag

SEQ ID NO: 80257 - DNA, 1713 bp, synthetic construct
  misc_feature 1..1713: note = Description of Artificial Sequence: Synthetic coding sequence
  source 1..1713: mol_type = other DNA
atgctggtgcccctggccaagctgagctgcctgggcgtgaacatggagagattcgccgaggaggccgacgtggtgatcgtgggcgccggccccgccggcctgagcgccgccgtgagactgaagcagctggccgtggcccacgagaaggacatcagagtgtgcctggtggagaaggccgcccagatcggcgcccacaccctgagcggcgcctgcctggaccccggcgccttcaaggagctgttccccgactggaaggagaagggcgcccccctgaacacccccgtgaccgaggacagattcggcatcctgaccgagaagtacagaatccccgtgcccatcctgcccggcctgcccatgaacaaccacggcaactacatcgtgagactgggccacctggtgagctggatgggcgagcaggccgaggccctgggcgtggaggtgtaccccggctacgccgccgccgaggtgctgttccacgacgacggcagcgtgaagggcatcgccaccaacgacgtgggcatccagaaggacggcgcccccaaggccaccttcgagagaggcctggagctgcacgccaaggtgaccatcttcgccgagggctgccacggccacctggccaagcagctgtacaagaagttcgacctgagagccaactgcgagccccagacctacggcatcggcctgaaggagctgtgggtgatcgacgagaagaactggaagcccggcagagtggaccacaccgtgggctggcccctggacagacacacctacggcggcagcttcctgtaccacctgaacgagggcgagcccctggtggccctgggcctggtggtgggcctggactaccagaacccctacctgagccccttcagagagttccagagatggaagcaccaccccagcatcagacccaccctggagggcggcaagagaatcgcctacggcgccagagccctgaacgagggcggcttccagagcatccccaagctgaccttccccggcggcctgctgatcggctgcagccccggcttcatgaacgtgcccaagatcaagggcacccacaccgccatgaagagcggcatcctggccgccgagagcatcttcaaccagctgaccagcgagaacctgcagagcaagaccatcggcctgcacgtgaccgagtacgaggacaacctgaagaacagctgggtgtggaaggagctgtacagcgtgagaaacatcagacccagctgccacggcgtgctgggcgtgtacggcggcatgatctacaccggcatcttctactggatcctgagaggcatggagccctggaccctgaagcacaagggcagcgacttcgagagactgaagcccgccaaggactgcacccccatcgagtaccccaagcccgacggccagatcagcttcgacctgctgagcagcgtggccctgagcggcaccaaccacgagcacgaccagcccgcccacctgaccctgagagacgacagcatccccgtgaacagaaacctgagcatctacgacggccccgagcagagattctgccccgccggcgtgtacgagttcgtgcccgtggagcagggcgacggcttcagactgcagatcaacgcccagaactgcgtgcactgcaagacctgcgacatcaaggaccccagccagaacatcaactgggtggtgcccgagggcggcggcggccccgcctacaacggcatgtag

SEQ ID NO: 80258 - DNA, 1854 bp, synthetic construct
  misc_feature 1..1854: note = Description of Artificial Sequence: Synthetic coding sequence
  source 1..1854: mol_type = other DNA
atgctggtgcccctggccaagctgagctgcctggcctaccagtgcttccacgccctgaagatcaagaagaactacctgcccctgtgcgccaccagatggagcagcaccagcaccgtgcccagaatcaccacccactacaccatctaccccagagacaaggacaagagatgggagggcgtgaacatggagagattcgccgaggaggccgacgtggtgatcgtgggcgccggccccgccggcctgagcgccgccgtgagactgaagcagctggccgtggcccacgagaaggacatcagagtgtgcctggtggagaaggccgcccagatcggcgcccacaccctgagcggcgcctgcctggaccccggcgccttcaaggagctgttccccgactggaaggagaagggcgcccccctgaacacccccgtgaccgaggacagattcggcatcctgaccgagaagtacagaatccccgtgcccatcctgcccggcctgcccatgaacaaccacggcaactacatcgtgagactgggccacctggtgagctggatgggcgagcaggccgaggccctgggcgtggaggtgtaccccggctacgccgccgccgaggtgctgttccacgacgacggcagcgtgaagggcatcgccaccaacgacgtgggcatccagaaggacggcgcccccaaggccaccttcgagagaggcctggagctgcacgccaaggtgaccatcttcgccgagggctgccacggccacctggccaagcagctgtacaagaagttcgacctgagagccaactgcgagccccagacctacggcatcggcctgaaggagctgtgggtgatcgacgagaagaactggaagcccggcagagtggaccacaccgtgggctggcccctggacagacacacctacggcggcagcttcctgtaccacctgaacgagggcgagcccctggtggccctgggcctggtggtgggcctggactaccagaacccctacctgagccccttcagagagttccagagatggaagcaccaccccagcatcagacccaccctggagggcggcaagagaatcgcctacggcgccagagccctgaacgagggcggcttccagagcatccccaagctgaccttccccggcggcctgctgatcggctgcagccccggcttcatgaacgtgcccaagatcaagggcacccacaccgccatgaagagcggcatcctggccgccgagagcatcttcaaccagctgaccagcgagaacctgcagagcaagaccatcggcctgcacgtgaccgagtacgaggacaacctgaagaacagctgggtgtggaaggagctgtacagcgtgagaaacatcagacccagctgccacggcgtgctgggcgtgtacggcggcatgatctacaccggcatcttctactggatcctgagaggcatggagccctggaccctgaagcacaagggcagcgacttcgagagactgaagcccgccaaggactgcacccccatcgagtaccccaagcccgacggccagatcagcttcgacctgctgagcagcgtggccctgagcggcaccaaccacgagcacgaccagcccgcccacctgaccctgagagacgacagcatccccgtgaacagaaacctgagcatctacgacggccccgagcagagattctgccccgccggcgtgtacgagttcgtgcccgtggagcagggcgacggcttcagactgcagatcaacgcccagaactgcgtgcactgcaagacctgcgacatcaaggaccccagccagaacatcaactgggtggtgcccgagggcggcggcggccccgcctacaacggcatgtag

SEQ ID NO: 80259 - DNA, 1287 bp, synthetic construct
  misc_feature 1..1287: note = Description of Artificial Sequence: Synthetic coding sequence
  source 1..1287: mol_type = other DNA
atggaccccagcgtgaccctgtggcagttcctgctgcagctgctgagagagcagggcaacggccacatcatcagctggaccagcagagacggcggcgagttcaagctggtggacgccgaggaggtggccagactgtggggcctgagaaagaacaagaccaacatgaactacgacaagctgagcagagccctgagatactactacgacaagaacatcatcagaaaggtgagcggccagaagttcgtgtacaagttcgtgagctaccccgaggtggccggctgcagcaccgaggactgccccccccagcccgaggtgagcgtgaccagcaccatgcccaacgtggcccccgccgccatccacgccgcccccggcgacaccgtgagcggcaagcccggcacccccaagggcgccggcatggccggccccggcggcctggccagaagcagcagaaacgagtacatgagaagcggcctgtacagcaccttcaccatccagagcctgcagccccagccccccccccaccccagacccgccgtggtgctgcccagcgccgcccccgccggcgccgccgccccccccagcggcagcagaagcaccagccccagccccctggaggcctgcctggaggccgaggaggccggcctgcccctgcaggtgatcctgaccccccccgaggcccccaacctgaagagcgaggagctgaacgtggagcccggcctgggcagagccctgccccccgaggtgaaggtggagggccccaaggaggagctggaggtggccggcgagagaggcttcgtgcccgagaccaccaaggccgagcccgaggtgcccccccaggagggcgtgcccgccagactgcccgccgtggtgatggacaccgccggccaggccggcggccacgccgccagcagccccgagatcagccagccccagaagggcagaaagcccagagacctggagctgcccctgagccccagcctgctgggcggccccggccccgagagaacccccggcagcggcagcggcagcggcctgcaggcccccggccccgccctgacccccagcctgctgcccacccacaccctgacccccgtgctgctgacccccagcagcctgccccccagcatccacttctggagcaccctgagccccatcgcccccagaagccccgccaagctgagcttccagttccccagcagcggcagcgcccaggtgcacatccccagcatcagcgtggacggcctgagcacccccgtggtgctgagccccggcccccagaagccctag

SEQ ID NO: 80260 - DNA, 1836 bp, synthetic construct
  misc_feature 1..1836: note = Description of Artificial Sequence: Synthetic coding sequence
  source 1..1836: mol_type = other DNA
atgcccgagatcgtggacacctgcagcctggccagccccgccagcgtgtgcagaaccaagcacctgcacctgagatgcagcgtggacttcaccagaagaaccctgaccggcaccgccgccctgaccgtgcagagccaggaggacaacctgagaagcctggtgctggacaccaaggacctgaccatcgagaaggtggtgatcaacggccaggaggtgaagtacgccctgggcgagagacagagctacaagggcagccccatggagatcagcctgcccatcgccctgagcaagaaccaggagatcgtgatcgagatcagcttcgagaccagccccaagagcagcgccctgcagtggctgacccccgagcagaccagcggcaaggagcacccctacctgttcagccagtgccaggccatccactgcagagccatcctgccctgccaggacacccccagcgtgaagctgacctacaccgccgaggtgagcgtgcccaaggagctggtggccctgatgagcgccatcagagacggcgagacccccgaccccgaggaccccagcagaaagatctacaagttcatccagaaggtgcccatcccctgctacctgatcgccctggtggtgggcgccctggagagcagacagatcggccccagaaccctggtgtggagcgagaaggagcaggtggagaagagcgcctacgagttcagcgagaccgagagcatgctgaagatcgccgaggacctgggcggcccctacgtgtggggccagtacgacctgctggtgctgccccccagcttcccctacggcggcatggagaacccctgcctgaccttcgtgacccccaccctgctggccggcgacaagagcctgagcaacgtgatcgcccacgagatcagccacagctggaccggcaacctggtgaccaacaagacctgggaccacttctggctgaacgagggccacaccgtgtacctggagagacacatctgcggcagactgttcggcgagaagttcagacacttcaacgccctgggcggctggggcgagctgcagaacagcgtgaagaccttcggcgagacccaccccttcaccaagctggtggtggacctgaccgacatcgaccccgacgtggcctacagcagcgtgccctacgagaagggcttcgccctgctgttctacctggagcagctgctgggcggccccgagatcttcctgggcttcctgaaggcctacgtggagaagttcagctacaagagcatcaccaccgacgactggaaggacttcctgtacagctacttcaaggacaaggtggacgtgctgaaccaggtggactggaacgcctggctgtacagccccggcctgccccccatcaagcccaactacgacatgaccctgaccaacgcctgcatcgccctgagccagagatggatcaccgccaaggaggacgacctgaacagcttcaacgccaccgacctgaaggacctgagcagccaccagctgaacgagttcctggcccagaccctgcagagagcccccctgcccctgggccacatcaagagaatgcaggaggtgtacaacttcaacgccatcaacaacagcgagatcagattcagatggctgagactgtgcatccagagcaagtgggaggacgccatccccctggccctgaagatggccaccgagcagggcagaatgaagttcaccagacccctgttcaaggacctggccgccttcgacaagagccacgaccaggccgtgagaacctaccaggagcacaaggccagcatgcaccccgtgaccgccatgctggtgggcaaggacctgaaggtggactag

SEQ ID NO: 80261 - DNA, 117 bp, synthetic construct
  misc_feature 1..117: note = Description of Artificial Sequence: Synthetic coding sequence
  source 1..117: mol_type = other DNA
atggagagcgccatcaccctgtggcagttcctgctgcagctgctgctggaccagaagcacgagcacctgatctgctggaccagcaacgacggcgagttcaagctgctgaaggcctag

SEQ ID NO: 80262 - DNA, 483 bp, synthetic construct
  misc_feature 1..483: note = Description of Artificial Sequence: Synthetic coding sequence
  source 1..483: mol_type = other DNA
atggagagcgccatcaccctgtggcagttcctgctgcagctgctgctggaccagaagcacgagcacctgatctgctggaccagcaacgacggcgagttcaagctgctgaaggccgaggaggtggccaagctgtggggcctgagaaagaacaagaccaacatgaactacgacaagctgagcagagccctgagatactactacgacaagaacatcatcaagaaggtgatcggccagaagttcgtgtacaagttcgtgagcttccccgagatcctgaagatggacccccacgccgtggagatcagcagagagagcctgctgctgcaggacagcgactgcaaggccagccccgagggcagagaggcccacaagcacggcctggccgccctgagaagcaccagcagaaacgagtacatccacagcggcctgtacagcagcttcaccatcaacagcctgcagaacccccccgacgccttcaaggcctag

SEQ ID NO: 80263 - DNA, 1218 bp, synthetic construct
  misc_feature 1..1218: note = Description of Artificial Sequence: Synthetic coding sequence
  source 1..1218: mol_type = other DNA
atggacagcgccatcaccctgtggcagttcctgctgcagctgctgcagaagccccagaacaagcacatgatctgctggaccagcaacgacggccagttcaagctgctgcaggccgaggaggtggccagactgtggggcatcagaaagaacaagcccaacatgaactacgacaagctgagcagagccctgagatactactacgtgaagaacatcatcaagaaggtgaacggccagaagttcgtgtacaagttcgtgagctaccccgagatcctgaacatggaccccatgaccgtgggcagaatcgagggcgactgcgagagcctgaacttcagcgaggtgagcagcagcagcaaggacgtggagaacggcggcaaggacaagcccccccagcccggcgccaagaccagcagcagaaacgactacatccacagcggcctgtacagcagcttcaccctgaacagcctgaacagcagcaacgtgaagctgttcaagctgatcaagaccgagaaccccgccgagaagctggccgagaagaagagcccccaggagcccacccccagcgtgatcaagttcgtgaccacccccagcaagaagccccccgtggagcccgtggccgccaccatcagcatcggccccagcatcagccccagcagcgaggagaccatccaggccctggagaccctggtgagccccaagctgcccagcctggaggcccccaccagcgccagcaacgtgatgaccgccttcgccaccaccccccccatcagcagcatcccccccctgcaggagccccccagaacccccagcccccccctgagcagccaccccgacatcgacaccgacatcgacagcgtggccagccagcccatggagctgcccgagaacctgagcctggagcccaaggaccaggacagcgtgctgctggagaaggacaaggtgaacaacagcagcagaagcaagaagcccaagggcctggagctggcccccaccctggtgatcaccagcagcgaccccagccccctgggcatcctgagccccagcctgcccaccgccagcctgacccccgccttcttcagccaggtggcctgcagcctgttcatggtgagccccctgctgagcttcatctgccccttcaagcagatccagaacctgtacacccaggtgtgcttcctgctgctgagattcgtgctggagagactgtgcgtgaccgtgatgtag

SEQ ID NO: 80264 - DNA, 1296 bp, synthetic construct
  misc_feature 1..1296: note = Description of Artificial Sequence: Synthetic coding sequence
  source 1..1296: mol_type = other DNA
atggacagcgccatcaccctgtggcagttcctgctgcagctgctgcagaagccccagaacaagcacatgatctgctggaccagcaacgacggccagttcaagctgctgcaggccgaggaggtggccagactgtggggcatcagaaagaacaagcccaacatgaactacgacaagctgagcagagccctgagatactactacgtgaagaacatcatcaagaaggtgaacggccagaagttcgtgtacaagttcgtgagctaccccgagatcctgaacatggaccccatgaccgtgggcagaatcgagggcgactgcgagagcctgaacttcagcgaggtgagcagcagcagcaaggacgtggagaacggcggcaaggacaagcccccccagcccggcgccaagaccagcagcagaaacgactacatccacagcggcctgtacagcagcttcaccctgaacagcctgaacagcagcaacgtgaagctgttcaagctgatcaagaccgagaaccccgccgagaagctggccgagaagaagagcccccaggagcccacccccagcgtgatcaagttcgtgaccacccccagcaagaagccccccgtggagcccgtggccgccaccatcagcatcggccccagcatcagccccagcagcgaggagaccatccaggccctggagaccctggtgagccccaagctgcccagcctggaggcccccaccagcgccagcaacgtgatgaccgccttcgccaccaccccccccatcagcagcatcccccccctgcaggagccccccagaacccccagcccccccctgagcagccaccccgacatcgacaccgacatcgacagcgtggccagccagcccatggagctgcccgagaacctgagcctggagcccaaggaccaggacagcgtgctgctggagaaggacaaggtgaacaacagcagcagaagcaagaagcccaagggcctggagctggcccccaccctggtgatcaccagcagcgaccccagccccctgggcatcctgagccccagcctgcccaccgccagcctgacccccgccttcttcagccagacccccatcatcctgacccccagccccctgctgagcagcatccacttctggagcaccctgagccccgtggcccccctgagccccgccagactgcagggcgccaacaccctgttccagttccccagcgtgctgaacagccacggccccttcaccctgagcggcctggacggccccagcacccccggccccttcagccccgacctgcagaagacctag

SEQ ID NO: 80265 - DNA, 1566 bp, synthetic construct
  misc_feature 1..1566: note = Description of Artificial Sequence: Synthetic coding sequence
  source 1..1566: mol_type = other DNA
agaccccaggaccccagaagaagatgcagagtgagaggcagaggcggcagaggcgccagaagcagaggcggcggcagatgcggcagactgagagcccccggcggcctgggcctggccgccgccgccttctacggcagcgccgccggcgtggccgccgccgccgcccccagcagcagcttccagagagaggaggaggccgagggcggcgaggcccacagagtgagaggcggcgacagaggcggcgcccccagagccgccagcctgatcgccatggacagcgccatcaccctgtggcagttcctgctgcagctgctgcagaagccccagaacaagcacatgatctgctggaccagcaacgacggccagttcaagctgctgcaggccgaggaggtggccagactgtggggcatcagaaagaacaagcccaacatgaactacgacaagctgagcagagccctgagatactactacgtgaagaacatcatcaagaaggtgaacggccagaagttcgtgtacaagttcgtgagctaccccgagatcctgaacatggaccccatgaccgtgggcagaatcgagggcgactgcgagagcctgaacttcagcgaggtgagcagcagcagcaaggacgtggagaacggcggcaaggacaagcccccccagcccggcgccaagaccagcagcagaaacgactacatccacagcggcctgtacagcagcttcaccctgaacagcctgaacagcagcaacgtgaagctgttcaagctgatcaagaccgagaaccccgccgagaagctggccgagaagaagagcccccaggagcccacccccagcgtgatcaagttcgtgaccacccccagcaagaagccccccgtggagcccgtggccgccaccatcagcatcggccccagcatcagccccagcagcgaggagaccatccaggccctggagaccctggtgagccccaagctgcccagcctggaggcccccaccagcgccagcaacgtgatgaccgccttcgccaccaccccccccatcagcagcatcccccccctgcaggagccccccagaacccccagcccccccctgagcagccaccccgacatcgacaccgacatcgacagcgtggccagccagcccatggagctgcccgagaacctgagcctggagcccaaggaccaggacagcgtgctgctggagaaggacaaggtgaacaacagcagcagaagcaagaagcccaagggcctggagctggcccccaccctggtgatcaccagcagcgaccccagccccctgggcatcctgagccccagcctgcccaccgccagcctgacccccgccttcttcagccagacccccatcatcctgacccccagccccctgctgagcagcatccacttctggagcaccctgagccccgtggcccccctgagccccgccagactgcagggcgccaacaccctgttccagttccccagcgtgctgaacagccacggccccttcaccctgagcggcctggacggccccagcacccccggccccttcagccccgacctgcagaagacctag

SEQ ID NO: 80266 - DNA, 807 bp, synthetic construct
  misc_feature 1..807: note = Description of Artificial Sequence: Synthetic coding sequence
  source 1..807: mol_type = other DNA
atgaacggcaccgccaaccccctgctggacagagaggagcactgcctgagactgggcgagagcttcgagaagagacccagagccagcttccacaccatcagatacgacttcaagcccgccagcatcgacaccagctgcgagggcgagctgcaggtgggcaagggcgacgaggtgaccatcaccctgccccacatccccggcagcaccccccccatgaccgtgttcaagggcaacaagagaccctaccagaaggactgcgtgctgatcatcaaccacgacaccggcgagtacgtgctggagaagctgagcagcagcatccaggtgaagaagaccagagccgagggcagcagcaagatccaggccagaatggagcagcagcccaccagacccccccagaccagccagcccccccccccccccccccccatgcccttcagagcccccaccaagccccccgtgggccccaagaccagccccctgaaggacaaccccagccccgagccccagctggacgacatcaagagagagctgagagccgaggtggacatcatcgagcagatgagcagcagcagcggcagcagcagcagcgacagcgagagcagcagcggcagcgacgacgacagcagcagcagcggcggcgaggacaacggccccgccagccccccccagcccagccaccagcagccctacaacagcagacccgccgtggccaacggcaccagcagaccccagggcagcaaccagctgatgaacaccctgagaaacgacctgcagctgagcgagagcggcagcgacagcgacgactag

SEQ ID NO: 80267 - DNA, 504 bp, synthetic construct
  misc_feature 1..504: note = Description of Artificial Sequence: Synthetic coding sequence
  source 1..504: mol_type = other DNA
atgaagagccagctgcactgccacatcagcctggccgagggcagcagcaagatccaggccagaatggagcagcagcccaccagacccccccagaccagccagcccccccccccccccccccccatgcccttcagagcccccaccaagccccccgtgggccccaagaccagccccctgaaggacaaccccagccccgagccccagctggacgacatcaagagagagctgagagccgaggtggacatcatcgagcagatgagcagcagcagcggcagcagcagcagcgacagcgagagcagcagcggcagcgacgacgacagcagcagcagcggcggcgaggacaacggccccgccagccccccccagcccagccaccagcagccctacaacagcagacccgccgtggccaacggcaccagcagaccccagggcagcaaccagctgatgaacaccctgagaaacgacctgcagctgagcgagagcggcagcgacagcgacgactag

SEQ ID NO: 80268 - DNA, 2979 bp, synthetic construct
  misc_feature 1..2979: note = Description of Artificial Sequence: Synthetic coding sequence
  source 1..2979: mol_type = other DNA
atggccagaggcggcgccgcctgcaagagcgacgccagactgctgctgggcagagacgccctgagacccgcccccgccctgctggcccccgccgtgctgctgggcgccgccctgggcctgggcctgggcctgtggctgggctgcagagccggcagacagagaaccagacaccagaaggacgacacccagaacctgctgaagaacctggagagcaacgcccagacccccagcgagaccggcagccccagcagaagaagaaagagagaggtgcagatgagcaaggacaaggaggccgtggacgagtgcgagccccccagcaacagcaacatcaccgccttcgccctgaaggccaaggtgatctaccccatcaaccagaagttcagacccctggccgacggcagcagcaaccccagcctgcacgagaacctgaagcaggccgtgctgccccaccagcccgtggaggccagccccagcagcagcctgggcagcctgagccagggcgagaaggacgactgcagcagcagcagcagcgtgcacagcgccaccagcgacgacagattcctgagcagaaccttcctgagagtgaacgccttccccgaggtgctggcctgcgagagcgtggacgtggacctgtgcatctacagcctgcacctgaaggacctgctgcacctggacaccgccctgagacaggagaagcacatgatgttcatccagatcttcaagatgtgcctgctggacctgctgcccaagaagaagagcgacgacgagctgtaccagaagatcctgagcaagcaggagaaggacctggaggagctggagaagggcctgcaggtgaagctgagcaacaccgagatgagcggcgccggcgacagcgagtacatcaccctggccgacgtggagaagaaggagagagagtacagcgagcagctgatcgacaacatggaggccttctggaagcagatggccaacatccagcacttcctggtggaccagttcaagtgcagcagcagcaaggccagacagctgatgatgaccctgaccgagagaatgatcgccgccgagggcctgctgtgcgacagccaggagctgcaggccctggacgccctggagagaaccatgggcagagcccacatggccaaggtgatcgagttcctgaagctgcaggtgcaggaggagaccagatgcagactggccgccatcagccacggcctggagctgctggccggcgagggcaagctgagcggcagacagaaggaggagctgctgacccagcagcacaaggccttctggcaggaggccgagagattcagcagagagttcgtgcagagaggcaaggacctggtgaccgccagcctggcccaccaggtggagggcaccgccaagctgaccctggcccaggaggaggagcagagaagcttcctggccgaggcccagcccaccgccgaccccgagaagttcctggaggccttccacgaggtgctggagagacagagactgatgcagtgcgacctggaggaggaggagaacgtgagagccaccgaggccgtggtggccctgtgccaggagctgtacttcagcaccgtggacaccttccagaagttcgtggacgccctgttcctgcagaccctgcccggcatgaccggcctgccccccgaggagtgcgactacctgagacaggaggtgcaggagaacgccgcctggcagctgggcaagagcaacagattcagaagacagcagtggaagctgttccaggagctgctggagcaggaccagcaggtgtggatggaggagtgcgccctgagcagcgtgctgcagacccacctgagagaggaccacgagggcaccatcagaggcgtgctgggcagactgggcggcctgaccgaggagagcaccagatgcgtgctgcagggccacgacctgctgctgagaagcgccctgagaagactggccctgagaggcaacgccctggccaccctgacccagatgagactgagcggcaagaagcacctgctgcaggagctgagagagcagagagccctggagcagggcagcagccagtgcctggacgagcaccagtggcagctgctgagagccctggaggccagagtgctggaggaggccagcagactggaggaggaggcccagcagaccagactgcagctgcagcagagactgctggccgaggcccaggaggtgggccagctgctgcagcagcacatggagtgcgccatcggccaggccctgctggtgcacgccagaaacgccgccaccaagagcagagccaaggacagagacgacttcaagagaaccctgatggaggccgccgtggagagcgtgtacgtgaccagcgccggcgtgagcagactggtgcaggcctactaccagcagatcggcagaatcatggaggaccacgaggagagaaagctgcagcacctgaagaccctgcagggcgagagaatggagaactacaagctgagaaagaagcaggagctgagcaaccccagcagcggcagcagaaccgccggcggcgcccacgagaccagccaggccgtgcaccagagaatgctgagccagcagaagagattcctggcccagttccccgtgcaccagcagatgagactgcacgcccagcagcagcaggccggcgtgatggacctgctggaggcccagctggagacccagctgcaggaggccgagcagaacttcatcagcgagctggccgccctggccagagtgcccctggccgagagcaagctgctgcccgccaagagaggcctgctggagaagcccctgagaaccaagagaaagaagcccctgccccaggagagaggcgacctgggcgtgcccaacaacgaggacctggccagcggcgaccagaccagcggcagcctgagcagcaagagactgagccagcaggagagcgaggccggcgacagcggcaacagcaagaagatgctgaagagaagaagcaacctgtag

SEQ ID NO: 80269 - DNA, 2979 bp, synthetic construct; identical to SEQ ID NO: 80268
  misc_feature 1..2979: note = Description of Artificial Sequence: Synthetic coding sequence
  source 1..2979: mol_type = other DNA

SEQ ID NO: 80270 - DNA, 3687 bp, synthetic construct
  misc_feature 1..3687: note = Description of Artificial Sequence: Synthetic coding sequence
  source 1..3687: mol_type = other DNA
atgatctggcccaaggtggagtgctgccacttcaagaccgccgtggaggcccccctgggcatgaagctggacaagaagatggaggtgttcatccccctgagcaccagcgccgccagcagcggcccctgggcccacagcctgttcgccttcatccccagctggcccaagaagaacctgttcaagagagagagccccatcacccacagactgtacggcgacatcagcagagaggtgcagggcaccagcgagaacggcgtgatcttccagaagtgcgccctggtgagcggcagcagcgaggcccagaccgccagaatctggctgctggtgaacaacaccaagaccaccagcagcgccaacctgagcgagctgctgctgctggacagcatcgccggcctgaccatctgggacagcgtgggcaacagaaccagcgagggcttccaggccttcagcaagaagttcctgcaggtgggcgacgccttcgccgtgagctacgccgccaccctgcaggccggcgacctgggcaacggcgagagcctgaagctgcccgcccagctgaccttccagagcagcagcagaaacagaacccagctgaaggtgctgttcagcatcaccgccgaggagaacgtgaccgtgctgccccaccacggcctgcacgccgccggcttcttcatcgccttcctgctgagcctggtgctgacctgggccgccctgttcctgatggtgagataccagtgcctgaagggcaacatgctgaccagacacagagtgtggcagtacgagagcaagctggagcccctgcccttcaccagcgccgacggcgtgaacgaggacctgagcctgaacgaccagatgatcgacatcctgagcagcgaggaccccggcagcatgctgcaggccctggaggagctggagatcgccaccctgaacagagccgacgccgacctggaggcctgcagaacccagatcagcaaggacatcatcgccctgctgctgaagaacctgaccagcagcggccacctgagcccccaggtggagagaaagatgagcgccgtgttcaagaagcagttcctgctgctggagaacgagatccaggaggagtacgacagaaagatggtggccctgaccgccgagtgcgacctggagaccagaaagaagatggagaaccagtaccagagagagatgatggccatggaggaggccgaggagctgctgaagagagccggcgagagaagcgccgtggagtgcagcaacctgctgagaaccctgcacggcctggagcaggagcacctgagaaagagcctggccctgcagcaggaggaggacttcgccaaggcccacagacagctggccgtgttccagagaaacgagctgcacagcatcttcttcacccagatcaagagcgccatcttcaagggcgagctgaagcccgaggccgccaagatgctgctgcagaactacagcaagatccaggagaacgtggaggagctgatggacttcttccaggccagcaagagataccacctgagcaagagattcggccacagagagtacctggtgcagaacctgcagagcagcgagaccagagtgcagggcctgctgagcaccgccgccgcccagctgacccacctgatccagaagcacgagagagccggctacctggacgaggaccagatggagatgctgctggagagagcccagaccgaggtgttcagcatcaagcagaagctggacaacgacctgaagcaggagaagaagaagctgcaccagaagctgatcaccaagagaagaagagagctgctgcagaagcacagagagcagagaagagagcaggccagcgtgggcgaggccttcagaaccgtggaggacgccggccagtacctgcaccagaagagaagcctgatggaggagcacggcgccaccctggaggagctgcaggagagactggaccaggccgccctggacgacctgagaaccctgaccctgagcctgttcgagaaggccaccgacgagctgagaagactgcagaacagcgccatgacccaggagctgctgaagagaggcgtgccctggctgttcctgcagcagatcctggaggagcacggcaaggagatggccgccagagccgagcagctggagggcgaggagagagacagagaccaggagggcgtgcagagcgtgagacagagactgaaggacgacgcccccgaggccgtgaccgaggagcaggccgagctgagaagatgggagcacctgatcttcatgaagctgtgcagcagcgtgttcagcctgagcgaggaggagctgctgagaatgagacaggaggtgcacggctgcttcgcccagatggacagaagcctggccctgcccaagatcagagccagagtgctgctgcagcagttccagaccgcctggagagaggccgagttcgtgaagctggaccaggccgtggccgcccccgagctgcagcagcagagcaaggtgagaaagagcagaagcaagagcaagagcaagggcgagctgctgaagaagtgcatcgaggacaagatccacctgtgcgaggagcaggccagcgaggacctggtggagaaggtgagaggcgagctgctgagagagagagtgcagagaatggaggcccaggagggcggcttcgcccagagcctggtggccctgcagttccagaaggccagcagagtgaccgagaccctgagcgcctacaccgccctgctgagcatccaggacctgctgctggaggagctgagcgccagcgagatgctgaccaagagcgcctgcacccagatcctggagagccacagcagagagctgcaggagctggagagaaagctggaggaccagctggtgcagcaggaggccgcccagcagcagcaggccctggccagctggcagcagtgggtggccgacggccccggcatcctgaacgagcccggcgaggtggacagcgagagacaggtgagcaccgtgctgcaccaggccctgagcaagagccagaccctgctggagcagcaccagcagtgcctgagagaggagcagcagaacagcgtggtgctggaggacctgctggagaacatggaggccgacaccttcgccaccctgtgcagccaggagctgagactggccagctacctggccagaatggccatggtgcccggcgccaccctgagaagactgctgagcgtggtgctgcccaccgccagccagccccagctgctggccctgctggacagcgccaccgagagacacgtggaccacgccgccgagagcgacggcggcgccgagcaggccgacgtgggcagaagaagaaagcaccagagctggtggcaggccctggacggcaagctgagaggcgacctgatcagcagaggcctggagaagatgctgtgggccagaaagagaaagcagagcatcctgaagaagacctgcctgcccctgagagagagaatgatcttcagcggcaagggcagctggccccacctgagcctggagcccatcggcgagctggcccccgtgcccatcgtgggcgccgagaccatcgacctgctgaacaccggcgagaagctgttcatcttcagaaaccccaaggagcccgagatcagcctgcacgtgccccccagaaagaagaagaacttcctgaacgccaagaaggccatgagagccctgggcatggactag

SEQ ID NO: 80271 - DNA, 3927 bp, synthetic construct
  misc_feature 1..3927: note = Description of Artificial Sequence: Synthetic coding sequence
  source 1..3927: mol_type = other DNA
atggaccccagcggcagcagaggcagacccacctgggtgctggccggcggcctgctggccgtggccctggccctgggcggcagaggctgcctgggcgccagcagcagacccagatggagacccctgggcgcccagccccccagagacccccaggtggcccccagaagcggccccggcctgagaatcccccccggcagaagcggcgccggccccgagagcagcacccaggacctgccctgcatgatctggcccaaggtggagtgctgccacttcaagaccgccgtggaggcccccctgggcatgaagctggacaagaagatggaggtgttcatccccctgagcaccagcgccgccagcagcggcccctgggcccacagcctgttcgccttcatccccagctggcccaagaagaacctgttcaagagagagagccccatcacccacagactgtacggcgacatcagcagagaggtgcagggcaccagcgagaacggcgtgatcttccagaagtgcgccctggtgagcggcagcagcgaggcccagaccgccagaatctggctgctggtgaacaacaccaagaccaccagcagcgccaacctgagcgagctgctgctgctggacagcatcgccggcctgaccatctgggacagcgtgggcaacagaaccagcgagggcttccaggccttcagcaagaagttcctgcaggtgggcgacgccttcgccgtgagctacgccgccaccctgcaggccggcgacctgggcaacggcgagagcctgaagctgcccgcccagctgaccttccagagcagcagcagaaacagaacccagctgaaggtgctgttcagcatcaccgccgaggagaacgtgaccgtgctgccccaccacggcctgcacgccgccggcttcttcatcgccttcctgctgagcctggtgctgacctgggccgccctgttcctgatggtgagataccagtgcctgaagggcaacatgctgaccagacacagagtgtggcagtacgagagcaagctggagcccctgcccttcaccagcgccgacggcgtgaacgaggacctgagcctgaacgaccagatgatcgacatcctgagcagcgaggaccccggcagcatgctgcaggccctggaggagctggagatcgccaccctgaacagagccgacgccgacctggaggcctgcagaacccagatcagcaaggacatcatcgccctgctgctgaagaacctgaccagcagcggccacctgagcccccaggtggagagaaagatgagcgccgtgttcaagaagcagttcctgctgctggagaacgagatccaggaggagtacgacagaaagatggtggccctgaccgccgagtgcgacctggagaccagaaagaagatggagaaccagtaccagagagagatgatggccatggaggaggccgaggagctgctgaagagagccggcgagagaagcgccgtggagtgcagcaacctgctgagaaccctgcacggcctggagcaggagcacctgagaaagagcctggccctgcagcaggaggaggacttcgccaaggcccacagacagctggccgtgttccagagaaacgagctgcacagcatcttcttcacccagatcaagagcgccatcttcaagggcgagctgaagcccgaggccgccaagatgctgctgcagaactacagcaagatccaggagaacgtggaggagctgatggacttcttccaggccagcaagagataccacctgagcaagagattcggccacagagagtacctggtgcagaacctgcagagcagcgagaccagagtgcagggcctgctgagcaccgccgccgcccagctgacccacctgatccagaagcacgagagagccggctacctggacgaggaccagatggagatgctgctggagagagcccagaccgaggtgttcagcatcaagcagaagctggacaacgacctgaagcaggagaagaagaagctgcaccagaagctgatcaccaagagaagaagagagctgctgcagaagcacagagagcagagaagagagcaggccagcgtgggcgaggccttcagaaccgtggaggacgccggccagtacctgcaccagaagagaagcctgatggaggagcacggcgccaccctggaggagctgcaggagagactggaccaggccgccctggacgacctgagaaccctgaccctgagcctgttcgagaaggccaccgacgagctgagaagactgcagaacagcgccatgacccaggagctgctgaagagaggcgtgccctggctgttcctgcagcagatcctggaggagcacggcaaggagatggccgccagagccgagcagctggagggcgaggagagagacagagaccaggagggcgtgcagagcgtgagacagagactgaaggacgacgcccccgaggccgtgaccgaggagcaggccgagctgagaagatgggagcacctgatcttcatgaagctgtgcagcagcgtgttcagcctgagcgaggaggagctgctgagaatgagacaggaggtgcacggctgcttcgcccagatggacagaagcctggccctgcccaagatcagagccagagtgctgctgcagcagttccagaccgcctggagagaggccgagttcgtgaagctggaccaggccgtggccgcccccgagctgcagcagcagagcaaggtgagaaagagcagaagcaagagcaagagcaagggcgagctgctgaagaagtgcatcgaggacaagatccacctgtgcgaggagcaggccagcgaggacctggtggagaaggtgagaggcgagctgctgagagagagagtgcagagaatggaggcccaggagggcggcttcgcccagagcctggtggccctgcagttccagaaggccagcagagtgaccgagaccctgagcgcctacaccgccctgctgagcatccaggacctgctgctggaggagctgagcgccagcgagatgctgaccaagagcgcctgcacccagatcctggagagccacagcagagagctgcaggagctggagagaaagctggaggaccagctggtgcagcaggaggccgcccagcagcagcaggccctggccagctggcagcagtgggtggccgacggccccggcatcctgaacgagcccggcgaggtggacagcgagagacaggtgagcaccgtgctgcaccaggccctgagcaagagccagaccctgctggagcagcaccagcagtgcctgagagaggagcagcagaacagcgtggtgctggaggacctgctggagaacatggaggccgacaccttcgccaccctgtgcagccaggagctgagactggccagctacctggccagaatggccatggtgcccggcgccaccctgagaagactgctgagcgtggtgctgcccaccgccagccagccccagctgctggccctgctggacagcgccaccgagagacacgtggaccacgccgccgagagcgacggcggcgccgagcaggccgacgtgggcagaagaagaaagcaccagagctggtggcaggccctggacggcaagctgagaggcgacctgatcagcagaggcctggagaagatgctgtgggccagaaagagaaagcagagcatcctgaagaagacctgcctgcccctgagagagagaatgatcttcagcggcaagggcagctggccccacctgagcctggagcccatcggcgagctggcccccgtgcccatcgtgggcgccgagaccatcgacctgctgaacaccggcgagaagctgttcatcttcagaaaccccaaggagcccgagatcagcctgcacgtgccccccagaaagaagaagaacttcctgaacgccaagaaggccatgagagccctgggcatggactag

SEQ ID NO: 80272 - DNA, 3741 bp, synthetic construct
  misc_feature 1..3741: note = Description of Artificial Sequence: Synthetic coding sequence
  source 1..3741: mol_type = other DNA
atggaccccagcggcagcagaggcagacccacctgggtgctggccggcggcctgctggccgtggccctggccctgggcggcagaggctgcctgggcgccagcagcagacccagatggagacccctgggcgcccagccccccagagacccccaggtggcccccagaagcggccccggcctgagaatcccccccggcagaagcggcgccggccccgagagcagcacccaggacctgccctgcatgatctggcccaaggtggagtgctgccacttcaagaccgccgtggaggcccccctgggcatgaagctggacaagaagatggaggtgttcatccccctgagcaccagcgccgccagcagcggcccctgggcccacagcctgttcgccttcatccccagctggcccaagaagaacctgttcaagagagagagccccatcacccacagactgtacggcgacatcagcagagaggtgcagggcaccagcgagaacggcgtgatcttccagaagtgcgccctggtgagcggcagcagcgaggcccagaccgccagaatctggctgctggtgaacaacaccaagaccaccagcagcgccaacctgagcgagctgctgctgctggacagcatcgccggcctgaccatctgggacagcgtgggcaacagaaccagcgagggcttccaggccttcagcaagaagttcctgcaggtgggcgacgccttcgccgtgagctacgccgccaccctgcaggccggcgacctgggcaacggcgagagcctgaagctgcccgcccagctgaccttccagagcagcagcagaaacagaacccagctgaaggtgctgttcagcatcaccgccgaggagaacgtgaccgtgctgccccaccacggcctgcacgccgccggcttcttcatcgccttcctgctgagcctggtgctgacctgggccgccctgttcctgatggtgagataccagtgcctgaagggcaacatgctgaccagacacagagtgtggcagtacgagagcaagctggagcccctgcccttcaccagcgccgacggcgtgaacgaggacctgagcctgaacgaccagatgatcgacatcctgagcagcgaggaccccggcagcatgctgcaggccctggaggagctggagatcgccaccctgaacagagccgacgccgacctggaggcctgcagaacccagatcagcaaggacatcatcgccctgctgctgaagaacctgaccagcagcggccacctgagcccccaggtggagagaaagatgagcgccgtgttcaagaagcagttcctgctgctggagaacgagatccaggaggagtacgacagaaagatggtggccctgaccgccgagtgcgacctggagaccagaaagaagatggagaaccagtaccagagagagatgatggccatggaggaggccgaggagctgctgaagagagccggcgagagaagcgccgtggagtgcagcaacctgctgagaaccctgcacggcctggagcaggagcacctgagaaagagcctggccctgcagcaggaggaggacttcgccaaggcccacagacagctggccgtgttccagagaaacgagctgcacagcatcttcttcacccagatcaagagcgccatcttcaagggcgagctgaagcccgaggccgccaagatgctgctgcagaactacagcaagatccaggagaacgtggaggagctgatggacttcttccaggccagcaagagataccacctgagcaagagattcggccacagagagtacctggtgcagaacctgcagagcagcgagaccagagtgcagggcctgctgagcaccgccgccgcccagctgacccacctgatccagaagcacgagagagccggctacctggacgaggaccagatggagatgctgctggagagagcccagaccgaggtgttcagcatcaagcagaagctggacaacgacctgaagcaggagaagaagaagctgcaccagaagctgatcaccaagagaagaagagagctgctgcagaagcacagagagcagagaagagagcaggccagcgtgggcgaggccttcagaaccgtggaggacgccggccagtacctgcaccagaagagaagcctgatggaggagcacggcgccaccctggaggagctgcaggagagactggaccaggccgccctggacgacctgagaaccctgaccctgagcctgttcgagaaggccaccgacgagctgagaagactgcagaacagcgccatgacccaggagctgctgaagagaggcgtgccctggctgttcctgcagcagatcctggaggagcacggcaaggagatggccgccagagccgagcagctggagggcgaggagagagacagagaccaggagggcgtgcagagcgtgagacagagactgaaggacgacgcccccgaggccgtgaccgaggagcaggccgagctgagaagatgggagcacctgatcttcatgaagctgtgcagcagcgtgttcagcctgagcgaggaggagctgctgagaatgagacaggaggtgcacggctgcttcgcccagatggacagaagcctggccctgcccaagatcagagccagagtgctgctgcagcagttccagaccgcctggagagaggccgagttcgtgaagctggaccaggccgtggccgcccccgagctgcagcagcagagcaaggtgagaaagagcagaagcaagagcaagagcaagggcgagctgctgaagaagtgcatcgaggacaagatccacctgtgcgaggagcaggccagcgaggacctggtggagaaggtgagaggcgagctgctgagagagagagtgcagagaatggaggcccaggagggcggcttcgcccagagcctggtggccctgcagttccagaaggccagcagagtgaccgagaccctgagcgcctacaccgccctgctgagcatccaggacctgctgctggaggagctgagcgccagcgagatgctgaccaagagcgcctgcacccagatcctggagagccacagcagagagctgcaggagctggagagaaagctggaggaccagctggtgcagcaggaggccgcccagcagcagcaggccctggccagctggcagcagtgggtggccgacggccccggcatcctgaacgagcccggcgaggtggacagcgagagacaggtgagcaccgtgctgcaccaggccctgagcaagagccagaccctgctggagcagcaccagcagtgcctgagagaggagcagcagaacagcgtggtgctggaggacctgctggagaacatggaggccgacaccttcgccaccctgtgcagccaggagctgagactggccagctacctggccagaatggccatggtgcccggcgccaccctgagaagactgctgagcgtggtgctgcccaccgccagccagccccagctgctggccctgctggacagcgccaccgagagacacgtggaccacgccgccgagagcgacggcggcgccgagcaggccgacgtgggcagaagaagaaagcaccagagctggtggcaggccctggacggcaagctgagaggcgacctgatcagcagaggcctggagaagatgctgtgggccagaaagagaaagcagagaagcggcaaccaggagagcttctggcagtacctggtgggcacccccgagatcggcctgatcgagtggatgagcgagaagtag

SEQ ID NO: 80273 - DNA, 882 bp, synthetic construct
  misc_feature 1..882: note = Description of Artificial Sequence: Synthetic coding sequence
  source 1..882: mol_type = other DNA
atgttcatcagcctgtgggagttcttctacggccacttcttcagattctggatgaagtggctgctgagacagatgaccggcaagtgcgagctgcagagaatcttcgacacctacgtgggcgcccagagaacccacagaatcgagaacagcctgacctacagcaagaacaaggtgctgcagaaggccacccacgtggtgcagagcgaggtggacaagtacgtggacgacatcatgaaggagaagaacatcaaccccgagaaggacgccagcttcaagatctgcatgaagatgtgcctgctgcagatcaccggctacaagcagctgtacctggacgtggagagcgtgagaaagagaccctacgacagcgacaacctgcagcacgaggagctgctgatgaagctgtggaacctgctgatgcccaccaagaagctgaacgccagaatcagcaagcagtgggccgagatcggcttccagggcgacgaccccaagaccgacttcagaggcatgggcatcctgggcctgatcaacctggtgtacttcagcgagaactacaccagcgaggcccaccagatcctgagcagaagcaaccaccccaagctgggctacagctacgccatcgtgggcatcaacctgaccgagatggcctacagcctgctgaagagcgaggccctgaagttccacctgtacaacctggtgcccggcatccccaccatggagcacttccaccagttctactgctacctggtgtacgagttcgacaagttctggttcgaggaggagcccgagagcatcatgtacttcaacctgtacagagagaagttccacgagaagatcaagggcctgctgctggactgcaacgtggccctgaccctgaaggtgtag

SEQ ID NO: 80274 - DNA, 507 bp, synthetic construct
  misc_feature 1..507: note = Description of Artificial Sequence: Synthetic coding sequence
  source 1..507: mol_type = other DNA
atgttcatcagcctgtgggagttcttctacggccacttcttcagattctggatgaagtggctgctgagacagatgaccggcaagtgcgagctgcagagaatcttcgacacctacgtgggcgcccagagaacccacagaatcgagaacagcctgacctacagcaagaacaaggtgctgcagaaggccacccacgtggtgcagagcgaggtggacaagtacgtggacgacatcatgaaggagaagaacatcaaccccgagaaggacgccagcttcaagatctgcatgaagatgtgcctgctgcagatcaccggctacaagcagctgtacctggacgtggagagcgtgagaaagagaccctacgacagcgacaacctgcagcacgaggagctgctgatgaagctgtggaacctgctgatgcccaccaagaagctgaacgccagaatcagcaagcagtgggccgagatcggcttccagggcgacgaccccaagaccgacttcagaggctag

SEQ ID NO: 80275 - DNA, 108 bp, synthetic construct
  misc_feature 1..108: note = Description of Artificial Sequence: Synthetic coding sequence
  source 1..108: mol_type = other DNA
atgttcatcagcctgtgggagttcttctacggccacttcttcagattctggatgaagtggctgctgagacagatgaccggcaagtgcgagctgcagagaatcttctag

SEQ ID NO: 80276 - DNA, 1866 bp, synthetic construct
  misc_feature 1..1866: note = Description of Artificial Sequence: Synthetic coding sequence
  source 1..1866: mol_type = other DNA
atggccgccctgaaggaggacagaagctacggcctgagctgcggcagagtgagcgacggcagcaaggtgagcgtgttccacgtgaagctgaccgacagcgccctgagagccttcgagagctacagagccagacaggacagcgtgagcctgagacccagcatcagattccagggcagccagggccacatcagcatcccccagcccgactgccccgccgaggccagaaccttcagcttctacctgagcaacatcggcagagacaacccccagggcagcttcgactgcatccagcagtacgtgagcagccacggcgaggtgcacctggactgcctgggcagcatccaggacaagatcaccgtgtgcgccaccgacgacagctaccagaaggccagacagagcatggcccaggccgaggaggagaccagaagcagaagcgccatcgtgatcaaggccggcggcagatacctgggcaagaaggtgcagttcagaaagcccgcccccggcgccaccgacgccgtgcccagcagaaagagagccacccccatcaacctggccagcgccatcagaaagagcggcgccagcgccgtgagcggcggcagcggcgtgagccagagacccttcagagacagagtgctgcacctgctggccctgagaccctacagaaaggccgagctgctgctgagactgcagaaggacggcctgacccaggccgacaaggacgccctggacggcctgctgcagcaggtggccaacatgagcgccaaggacggcacctgcaccctgcaggactgcatgtacaaggacgtgcagaaggactggcccggctacagcgagggcgaccagcagctgctgaagagagtgctggtgagaaagctgtgccagccccagagcaccggcagcctgctgggcgaccccgccgccagcagcccccccggcgagagaggcagaagcgccagccccccccagaagagactgcagccccccgacttcatcgaccccctggccaacaagaagcccagaatcagccacttcacccagagagcccagcccgccgtgaacggcaagctgggcgtgcccaacggcagagaggccctgctgcccacccccggcccccccgccagcaccgacaccctgagcagcagcacccacctgccccccagactggagccccccagagcccacgaccccctggccgacgtgagcaacgacctgggccacagcggcagagactgcgagcacggcgaggccgccgcccccgcccccaccgtgagactgggcctgcccctgctgaccgactgcgcccagcccagcagaccccacggcagccccagcagaagcaagcccaagaagaagagcaagaagcacaaggacaaggagagagccgccgaggacaagcccagagcccagctgcccgactgcgcccccgccacccacgccacccccggcgcccccgccgacacccccggcctgaacggcacctgcagcgtgagcagcgtgcccaccagcaccagcgagacccccgactacctgctgaagtacgccgccatcagcagcagcgagcagagacagagctacaagaacgacttcaacgccgagtacagcgagtacagagacctgcacgccagaatcgagagaatcaccagaagattcacccagctggacgcccagctgagacagctgagccagggcagcgaggagtacgagaccaccagaggccagatcctgcaggagtacagaaagatcaagaagaccaacaccaactacagccaggagaagcacagatgcgagtacctgcacagcaagctggcccacatcaagagactgatcgccgagtacgaccagagacagctgcaggcctggccctag

SEQ ID NO: 80277 - DNA, 90 bp, synthetic construct
  misc_feature 1..90: note = Description of Artificial Sequence: Synthetic coding sequence
  source 1..90: mol_type = other DNA
atccacagactggtggtggccttccaggacagcgtgagcctgagacccagcatcagattccagggcagccagggcgagatgagcctgtag

SEQ ID NO: 80278 - DNA, 1194 bp, synthetic construct
  misc_feature 1..1194: note = Description of Artificial Sequence: Synthetic coding sequence
  source 1..1194: mol_type = other DNA
atggaggagctgcaggagcccctgagaggccagctgagactgtgcttcacccaggccgccagaaccagcctgctgctgctgagactgaacgacgccgccctgagagccctgcaggagtgccagagacagcaggtgagacccgtgatcgccttccagggccacagaggctacctgagactgcccggccccggctggagctgcctgttcagcttcatcgtgagccagtgctgccaggagggcgccggcggcagcctggacctggtgtgccagagattcctgagaagcggccccaacagcctgcactgcctgggcagcctgagagagagactgatcatctgggccgccatggacagcatccccgcccccagcagcgtgcagggccacaacctgaccgaggacgccagacaccccgagagctggcagaacaccggcggctacagcgagggcgacgccgtgagccagccccagatggccctggaggaggtgagcgtgagcgaccccctggccagcaaccagggccagagcctgcccggcagcagcagagagcacatggcccagtgggaggtgagaagccagacccacgtgcccaacagagagcccgtgcaggccctgcccagcagcgccagcagaaagagactggacaagaagagaagcgtgcccgtggccaccgtggagctggaggagaagagattcagaaccctgcccctggtgcccagccccctgcagggcctgaccaaccaggacctgcaggagggcgaggactgggagcaggaggacgaggacatggaccccagactggagcacagcagcagcgtgcaggaggacagcgagagccccagccccgaggacatccccgactacctgctgcagtacagagccatccacagcgccgagcagcagcacgcctacgagcaggacttcgagaccgactacgccgagtacagaatcctgcacgccagagtgggcaccgccagccagagattcatcgagctgggcgccgagatcaagagagtgagaagaggcacccccgagtacaaggtgctggaggacaagatcatccaggagtacaagaagttcagaaagcagtaccccagctacagagaggagaagagaagatgcgagtacctgcaccagaagctgagccacatcaagggcctgatcctggagttcgaggagaagaacagaggcagctag

SEQ ID NO: 80279 - DNA, 2889 bp, synthetic construct
  misc_feature 1..2889: note = Description of Artificial Sequence: Synthetic coding sequence
  source 1..2889: mol_type = other DNA
atggacaccgacctgtacgacgagttcggcaactacatcggccccgagctggacagcgacgaggacgacgacgagctgggcagagagaccaaggacctggacgagatggacgacgacgacgacgacgacgacgtgggcgaccacgacgacgaccaccccggcatggaggtggtgctgcacgaggtgtacggccccgaggtggagaccatcgtgcaggaggaggacacccagcccctgaccgagcccatcatcaagcccgtgaagaccaagaagttcaccctgatggagcagaccctgcccgtgaccgtgtacgagatggacttcctggccgacctgatggacaacagcgagctgatcagaaacgtgaccctgtgcggccacctgcaccacggcaagacctgcttcgtggactgcctgatcgagcagacccaccccgagatcagaaagagatacgaccaggacctgtgctacaccgacatcctgttcaccgagcaggagagaggcgtgggcatcaagagcacccccgtgaccgtggtgctgcccgacaccaagggcaagagctacctgttcaacatcatggacacccccggccacgtgaacttcagcgacgaggtgaccgccggcctgagaatcagcgacggcgtggtgctgttcatcgacgccgccgagggcgtgatgctgaacaccgagagactgatcaagcacgccgtgcaggagagactggccgtgaccgtgtgcatcaacaagatcgacagactgatcctggagctgaagctgccccccaccgacgcctactacaagctgagacacatcgtggacgaggtgaacggcctgatcagcatgtacagcaccgacgagaacctgatcctgagccccctgctgggcaacgtgtgcttcagcagcagccagtacagcatctgcttcaccctgggcagcttcgccaagatctacgccgacaccttcggcgacatcaactaccaggagttcgccaagagactgtggggcgacatctacttcaaccccaagaccagaaagttcaccaagaaggcccccaccagcagcagccagagaagcttcgtggagttcatcctggagcccctgtacaagatcctggcccaggtggtgggcgacgtggacaccagcctgcccagaaccctggacgagctgggcatccacctgaccaaggaggagctgaagctgaacatcagacccctgctgagactggtgtgcaagaagttcttcggcgagttcaccggcttcgtggacatgtgcgtgcagcacatccccagccccaaggtgggcgccaagcccaagatcgagcacacctacaccggcggcgtggacagcgacctgggcgaggccatgagcgactgcgaccccgacggccccctgatgtgccacaccaccaagatgtacagcaccgacgacggcgtgcagttccacgccttcggcagagtgctgagcggcaccatccacgccggccagcccgtgaaggtgctgggcgagaactacaccctggaggacgaggaggacagccagatctgcaccgtgggcagactgtggatcagcgtggccagataccacatcgaggtgaacagagtgcccgccggcaactgggtgctgatcgagggcgtggaccagcccatcgtgaagaccgccaccatcaccgagcccagaggcaacgaggaggcccagatcttcagacccctgaagttcaacaccaccagcgtgatcaagatcgccgtggagcccgtgaaccccagcgagctgcccaagatgctggacggcctgagaaaggtgaacaagagctaccccagcctgaccaccaaggtggaggagagcggcgagcacgtgatcctgggcaccggcgagctgtacctggactgcgtgatgcacgacctgagaaagatgtacagcgagatcgacatcaaggtggccgaccccgtggtgaccttctgcgagaccgtggtggagaccagcagcctgaagtgcttcgccgagacccccaacaagaagaacaagatcaccatgatcgccgagcccctggagaagggcctggccgaggacatcgagaacgaggtggtgcagatcacctggaacagaaagaagctgggcgagttcttccagaccaagtacgactgggacctgctggccgccagaagcatctgggccttcggccccgacgccaccggccccaacatcctggtggacgacaccctgcccagcgaggtggacaaggccctgctgggcagcgtgaaggacagcatcgtgcagggcttccagtggggcaccagagagggccccctgtgcgacgagctgatcagaaacgtgaagttcaagatcctggacgccgtggtggcccaggagcccctgcacagaggcggcggccagatcatccccaccgccagaagagtggtgtacagcgccttcctgatggccacccccagactgatggagccctactacttcgtggaggtgcaggcccccgccgactgcgtgagcgccgtgtacaccgtgctggccagaagaagaggccacgtgacccaggacgcccccatccccggcagccccctgtacaccatcaaggccttcatccccgccatcgacagcttcggcttcgagaccgacctgagaacccacacccagggccaggccttcagcctgagcgtgttccaccactggcagatcgtgcccggcgaccccctggacaagagcatcgtgatcagacccctggagccccagcccgccccccacctggccagagagttcatgatcaagaccagaagaagaaagggcctgagcgaggacgtgagcatcagcaagttcttcgacgaccccatgctgctggagctggccaagcaggacgtggtgctgaactaccccatgtag

SEQ ID NO: 80280 - DNA, 2814 bp, synthetic construct
  misc_feature 1..2814: note = Description of Artificial Sequence: Synthetic coding sequence
  source 1..2814: mol_type = other DNA
atggacgacgacgacgacgacgacgacgtgggcgaccacgacgacgaccaccccggcatggaggtggtgctgcacgaggacaagaagtactaccccaccgccgaggaggtgtacggccccgaggtggagaccatcgtgcaggaggaggacacccagcccctgaccgagcccatcatcaagcccgtgaagaccaagaagttcaccctgatggagcagaccctgcccgtgaccgtgtacgagatggacttcctggccgacctgatggacaacagcgagctgatcagaaacgtgaccctgtgcggccacctgcaccacggcaagacctgcttcgtggactgcctgatcgagcagacccaccccgagatcagaaagagatacgaccaggacctgtgctacaccgacatcctgttcaccgagcaggagagaggcgtgggcatcaagagcacccccgtgaccgtggtgctgcccgacaccaagggcaagagctacctgttcaacatcatggacacccccggccacgtgaacttcagcgacgaggtgaccgccggcctgagaatcagcgacggcgtggtgctgttcatcgacgccgccgagggcgtgatgctgaacaccgagagactgatcaagcacgccgtgcaggagagactggccgtgaccgtgtgcatcaacaagatcgacagactgatcctggagctgaagctgccccccaccgacgcctactacaagctgagacacatcgtggacgaggtgaacggcctgatcagcatgtacagcaccgacgagaacctgatcctgagccccctgctgggcaacgtgtgcttcagcagcagccagtacagcatctgcttcaccctgggcagcttcgccaagatctacgccgacaccttcggcgacatcaactaccaggagttcgccaagagactgtggggcgacatctacttcaaccccaagaccagaaagttcaccaagaaggcccccaccagcagcagccagagaagcttcgtggagttcatcctggagcccctgtacaagatcctggcccaggtggtgggcgacgtggacaccagcctgcccagaaccctggacgagctgggcatccacctgaccaaggaggagctgaagctgaacatcagacccctgctgagactggtgtgcaagaagttcttcggcgagttcaccggcttcgtggacatgtgcgtgcagcacatccccagccccaaggtgggcgccaagcccaagatcgagcacacctacaccggcggcgtggacagcgacctgggcgaggccatgagcgactgcgaccccgacggccccctgatgtgccacaccaccaagatgtacagcaccgacgacggcgtgcagttccacgccttcggcagagtgctgagcggcaccatccacgccggccagcccgtgaaggtgctgggcgagaactacaccctggaggacgaggaggacagccagatctgcaccgtgggcagactgtggatcagcgtggccagataccacatcgaggtgaacagagtgcccgccggcaactgggtgctgatcgagggcgtggaccagcccatcgtgaagaccgccaccatcaccgagcccagaggcaacgaggaggcccagatcttcagacccctgaagttcaacaccaccagcgtgatcaagatcgccgtggagcccgtgaaccccagcgagctgcccaagatgctggacggcctgagaaaggtgaacaagagctaccccagcctgaccaccaaggtggaggagagcggcgagcacgtgatcctgggcaccggcgagctgtacctggactgcgtgatgcacgacctgagaaagatgtacagcgagatcgacatcaaggtggccgaccccgtggtgaccttctgcgagaccgtggtggagaccagcagcctgaagtgcttcgccgagacccccaacaagaagaacaagatcaccatgatcgccgagcccctggagaagggcctggccgaggacatcgagaacgaggtggtgcagatcacctggaacagaaagaagctgggcgagttcttccagaccaagtacgactgggacctgctggccgccagaagcatctgggccttcggccccgacgccaccggccccaacatcctggtggacgacaccctgcccagcgaggtggacaaggccctgctgggcagcgtgaaggacagcatcgtgcagggcttccagtggggcaccagagagggccccctgtgcgacgagctgatcagaaacgtgaagttcaagatcctggacgccgtggtggcccaggagcccctgcacagaggcggcggccagatcatccccaccgccagaagagtggtgtacagcgccttcctgatggccacccccagactgatggagccctactacttcgtggaggtgcaggcccccgccgactgcgtgagcgccgtgtacaccgtgctggccagaagaagaggccacgtgacccaggacgcccccatccccggcagccccctgtacaccatcaaggccttcatccccgccatcgacagcttcggcttcgagaccgacctgagaacccacacccagggccaggccttcagcctgagcgtgttccaccactggcagatcgtgcccggcgaccccctggacaagagcatcgtgatcagacccctggagccccagcccgccccccacctggccagagagttcatgatcaagaccagaagaagaaagggcctgagcgaggacgtgagcatcagcaagttcttcgacgaccccatgctgctggagctggccaagcaggacgtggtgctgaactaccccatgtag

SEQ ID NO: 80281 - DNA, 2919 bp, synthetic construct
  misc_feature 1..2919: note = Description of Artificial Sequence: Synthetic coding sequence
  source 1..2919: mol_type = other DNA
atggacaccgacctgtacgacgagttcggcaactacatcggccccgagctggacagcgacgaggacgacgacgagctgggcagagagaccaaggacctggacgagatggacgacgacgacgacgacgacgacgtgggcgaccacgacgacgaccaccccggcatggaggtggtgctgcacgaggacaagaagtactaccccaccgccgaggaggtgtacggccccgaggtggagaccatcgtgcaggaggaggacacccagcccctgaccgagcccatcatcaagcccgtgaagaccaagaagttcaccctgatggagcagaccctgcccgtgaccgtgtacgagatggacttcctggccgacctgatggacaacagcgagctgatcagaaacgtgaccctgtgcggccacctgcaccacggcaagacctgcttcgtggactgcctgatcgagcagacccaccccgagatcagaaagagatacgaccaggacctgtgctacaccgacatcctgttcaccgagcaggagagaggcgtgggcatcaagagcacccccgtgaccgtggtgctgcccgacaccaagggcaagagctacctgttcaacatcatggacacccccggccacgtgaacttcagcgacgaggtgaccgccggcctgagaatcagcgacggcgtggtgctgttcatcgacgccgccgagggcgtgatgctgaacaccgagagactgatcaagcacgccgtgcaggagagactggccgtgaccgtgtgcatcaacaagatcgacagactgatcctggagctgaagctgccccccaccgacgcctactacaagctgagacacatcgtggacgaggtgaacggcctgatcagcatgtacagcaccgacgagaacctgatcctgagccccctgctgggcaacgtgtgcttcagcagcagccagtacagcatctgcttcaccctgggcagcttcgccaagatctacgccgacaccttcggcgacatcaactaccaggagttcgccaagagactgtggggcgacatctacttcaaccccaagaccagaaagttcaccaagaaggcccccaccagcagcagccagagaagcttcgtggagttcatcctggagcccctgtacaagatcctggcccaggtggtgggcgacgtggacaccagcctgcccagaaccctggacgagctgggcatccacctgaccaaggaggagctgaagctgaacatcagacccctgctgagactggtgtgcaagaagttcttcggcgagttcaccggcttcgtggacatgtgcgtgcagcacatccccagccccaaggtgggcgccaagcccaagatcgagcacacctacaccggcggcgtggacagcgacctgggcgaggccatgagcgactgcgaccccgacggccccctgatgtgccacaccaccaagatgtacagcaccgacgacggcgtgcagttccacgccttcggcagagtgctgagcggcaccatccacgccggccagcccgtgaaggtgctgggcgagaactacaccctggaggacgaggaggacagccagatctgcaccgtgggcagactgtggatcagcgtggccagataccacatcgaggtgaacagagtgcccgccggcaactgggtgctgatcgagggcgtggaccagcccatcgtgaagaccgccaccatcaccgagcccagaggcaacgaggaggcccagatcttcagacccctgaagttcaacaccaccagcgtgatcaagatcgccgtggagcccgtgaaccccagcgagctgcccaagatgctggacggcctgagaaaggtgaacaagagctaccccagcctgaccaccaaggtggaggagagcggcgagcacgtgatcctgggcaccggcgagctgtacctggactgcgtgatgcacgacctgagaaagatgtacagcgagatcgacatcaaggtggccgaccccgtggtgaccttctgcgagaccgtggtggagaccagcagcctgaagtgcttcgccgagacccccaacaagaagaacaagatcaccatgatcgccgagcccctggagaagggcctggccgaggacatcgagaacgaggtggtgcagatcacctggaacagaaagaagctgggcgagttcttccagaccaagtacgactgggacctgctggccgccagaagcatctgggccttcggccccgacgccaccggccccaacatcctggtggacgacaccctgcccagcgaggtggacaaggccctgctgggcagcgtgaaggacagcatcgtgcagggcttccagtggggcaccagagagggccccctgtgcgacgagctgatcagaaacgtgaagttcaagatcctggacgccgtggtggcccaggagcccctgcacagaggcggcggccagatcatccccaccgccagaagagtggtgtacagcgccttcctgatggccacccccagactgatggagccctactacttcgtggaggtgcaggcccccgccgactgcgtgagcgccgtgtacaccgtgctggccagaagaagaggccacgtgacccaggacgcccccatccccggcagccccctgtacaccatcaaggccttcatccccgccatcgacagcttcggcttcgagaccgacctgagaacccacacccagggccaggccttcagcctgagcgtgttccaccactggcagatcgtgcccggcgaccccctggacaagagcatcgtgatcagacccctggagccccagcccgccccccacctggccagagagttcatgatcaagaccagaagaagaaagggcctgagcgaggacgtgagcatcagcaagttcttcgacgaccccatgctgctggagctggccaagcaggacgtggtgctgaactaccccatgtag

SEQ ID NO: 80282 - DNA, 1923 bp, synthetic construct
  misc_feature 1..1923: note = Description of Artificial Sequence: Synthetic coding sequence
  source 1..1923: mol_type = other DNA
atggccgccggcggcaccggcggcctgagagaggagcagagatacggcctgagctgcggcagactgggccaggacaacatcaccgtgctgcacgtgaagctgaccgagaccgccatcagagccctggagacctaccagagccacaagaacctgatccccttcagacccagcatccagttccagggcctgcacggcctggtgaagatccccaagaacgaccccctgaacgaggtgcacaacttcaacttctacctgagcaacgtgggcaaggacaacccccagggcagcttcgactgcatccagcagaccttcagcagcagcggcgccagccagctgaactgcctgggcttcatccaggacaagatcaccgtgtgcgccaccaacgacagctaccagatgaccagagagagaatgacccaggccgaggaggagagcagaaacagaagcaccaaggtgatcaagcccggcggcccctacgtgggcaagagagtgcagatcagaaaggccccccaggccgtgagcgacaccgtgcccgagagaaagagaagcacccccatgaaccccgccaacaccatcagaaagacccacagcagcagcaccatcagccagagaccctacagagacagagtgatccacctgctggccctgaaggcctacaagaagcccgagctgctggccagactgcagaaggacggcgtgaaccagaaggacaagaacagcctgggcgccatcctgcagcaggtggccaacctgaacagcaaggacctgagctacaccctgaaggactacgtgttcaaggagctgcagagagactggcccggctacagcgagatcgacagaagaagcctggagagcgtgctgagcagaaagctgaaccccagccagaacgccgccggcaccagcagaagcgagagccccgtgtgcagcagcagagacgccgtgagcagcccccagaagagactgctggacagcgagttcatcgaccccctgatgaacaagaaggccagaatcagccacctgaccaacagagtgccccccaccctgaacggccacctgaaccccaccagcgagaagagcgccgccggcctgcccctgccccccgccgccgccgccatccccacccccccccccctgcccagcacctacctgcccatcagccaccccccccagatcgtgaacagcaacagcaacagccccagcacccccgagggcagaggcacccaggacctgcccgtggacagcttcagccagaacgacagcatctacgaggaccagcaggacaagtacaccagcagaaccagcctggagaccctgccccccggcagcgtgctgctgaagtgccccaagcccatggaggagaaccacagcatgagccacaagaagagcaagaagaagagcaagaagcacaaggagaaggaccagatcaagaagcacgacatcgagaccatcgaggagaaggaggaggacctgaagagagaggaggagatcgccaagctgaacaacagcagccccaacagcagcggcggcgtgaaggaggactgcaccgccagcatggagcccagcgccatcgagctgcccgactacctgatcaagtacatcgccatcgtgagctacgagcagagacagaactacaaggacgacttcaacgccgagtacgacgagtacagagccctgcacgccagaatggagaccgtggccagaagattcatcaagctggacgcccagagaaagagactgagccccggcagcaaggagtaccagaacgtgcacgaggaggtgctgcaggagtaccagaagatcaagcagagcagccccaactaccacgaggagaagtacagatgcgagtacctgcacaacaagctggcccacatcaagagactgatcggcgagttcgaccagcagcaggccgagagctggagctag

SEQ ID NO: 80283 - DNA, 1173 bp, synthetic construct
  misc_feature 1..1173: note = Description of Artificial Sequence: Synthetic coding sequence
  source 1..1173: mol_type = other DNA
atggccgccggcggcaccggcggcctgagagaggagcagagatacggcctgagctgcggcagactgggccaggacaacatcaccgtgctgcacgtgaagctgaccgagaccgccatcagagccctggagacctaccagagccacaagaacctgatccccttcagacccagcatccagttccagggcctgcacggcctggtgaagatccccaagaacgaccccctgaacgaggtgcacaacttcaacttctacctgagcaacgtgggcaaggacaacccccagggcagcttcgactgcatccagcagaccttcagcagcagcggcgccagccagctgaactgcctgggcttcatccaggacaagatcaccgtgtgcgccaccaacgacagctaccagatgaccagagagagaatgacccagatcgtgaacagcaacagcaacagccccagcacccccgagggcagaggcacccaggacctgcccgtggacagcttcagccagaacgacagcatctacgaggaccagcaggacaagtacaccagcagaaccagcctggagaccctgccccccggcagcgtgctgctgaagtgccccaagcccatggaggagaaccacagcatgagccacaagaagagcaagaagaagagcaagaagcacaaggagaaggaccagatcaagaagcacgacatcgagaccatcgaggagaaggaggaggacctgaagagagaggaggagatcgccaagctgaacaacagcagccccaacagcagcggcggcgtgaaggaggactgcaccgccagcatggagcccagcgccatcgagctgcccgactacctgatcaagtacatcgccatcgtgagctacgagcagagacagaactacaaggacgacttcaacgccgagtacgacgagtacagagccctgcacgccagaatggagaccgtggccagaagattcatcaagctggacgcccagagaaagagactgagccccggcagcaaggagtaccagaacgtgcacgaggaggtgctgcaggagtaccagaagatcaagcagagcagccccaactaccacgaggagaagtacagatgcgagtacctgcacaacaagctggcccacatcaagagactgatcggcgagttcgaccagcagcaggccgagagctggagctag

SEQ ID NO: 80284 - DNA, 1644 bp, synthetic construct
  misc_feature 1..1644: note = Description of Artificial Sequence: Synthetic coding sequence
  source 1..1644: mol_type = other DNA
atgagacagaagagaaagggcgacctgagccccgccgagctgatgatgctgaccatcggcgacgtgatcaagcagctgatcgaggcccacgagcagggcaaggacatcgacctgaacaaggtgaagaccaagaccgccgccaagtacggcctgagcgcccagcccagactggtggacatcatcgccgccgtgcccccccagtacagaaaggtgctgatgcccaagctgaaggccaagcccatcagaaccgccagcggcatcgccgtggtggccgtgatgtgcaagccccacagatgcccccacatcagcttcaccggcaacatctgcgtgtactgccccggcggccccgacagcgacttcgagtacagcacccagagctacaccggctacgagcccaccagcatgagagccatcagagccagatacgaccccttcctgcagaccagacacagaatcgagcagctgaagcagctgggccacagcgtggacaaggtggagttcatcgtgatgggcggcaccttcatggccctgcccgaggagtacagagactacttcatcagaaacctgcacgacgccctgagcggccacaccagcaacaacatctacgaggccgtgaagtacagcgagagaagcctgaccaagtgcatcggcatcaccatcgagaccagacccgactactgcatgaagagacacctgagcgacatgctgacctacggctgcaccagactggagatcggcgtgcagagcgtgtacgaggacgtggccagagacaccaacagaggccacaccgtgaaggccgtgtgcgagagcttccacctggccaaggacagcggcttcaaggtggtggcccacatgatgcccgacctgcccaacgtgggcctggagagagacatcgagcagttcaccgagttcttcgagaaccccgccttcagacccgacggcctgaagctgtaccccaccctggtgatcagaggcaccggcctgtacgagctgtggaagagcggcagatacaagagctacagccccagcgacctggtggagctggtggccagaatcctggccctggtgcccccctggaccagagtgtacagagtgcagagagacatccccatgcccctggtgagcagcggcgtggagcacggcaacctgagagagctggccctggccagaatgaaggacctgggcatccagtgcagagacgtgagaaccagagaggtgggcatccaggagatccaccacaaggtgagaccctaccaggtggagctggtgagaagagactacgtggccaacggcggctgggagaccttcctgagctacgaggaccccgaccaggacatcctgatcggcctgctgagactgagaaagtgcagcgaggagaccttcagattcgagctgggcggcggcgtgagcatcgtgagagagctgcacgtgtacggcagcgtggtgcccgtgagcagcagagaccccaccaagttccagcaccagggcttcggcatgctgctgatggaggaggccgagagaatcgccagagaggagcacggcagcggcaagatcgccgtgatcagcggcgtgggcaccagaaactactacagaaagatcggctacagactgcagggcccctacatggtgaagatgctgaagtag

SEQ ID NO: 80285 - DNA, 1368 bp, synthetic construct
  misc_feature 1..1368: note = Description of Artificial Sequence: Synthetic coding sequence
  source 1..1368: mol_type = other DNA
atgtgcaagccccacagatgcccccacatcagcttcaccggcaacatctgcgtgtactgccccggcggccccgacagcgacttcgagtacagcacccagagctacaccggctacgagcccaccagcatgagagccatcagagccagatacgaccccttcctgcagaccagacacagaatcgagcagctgaagcagctgggccacagcgtggacaaggtggagttcatcgtgatgggcggcaccttcatggccctgcccgaggagtacagagactacttcatcagaaacctgcacgacgccctgagcggccacaccagcaacaacatctacgaggccgtgaagtacagcgagagaagcctgaccaagtgcatcggcatcaccatcgagaccagacccgactactgcatgaagagacacctgagcgacatgctgacctacggctgcaccagactggagatcggcgtgcagagcgtgtacgaggacgtggccagagacaccaacagaggccacaccgtgaaggccgtgtgcgagagcttccacctggccaaggacagcggcttcaaggtggtggcccacatgatgcccgacctgcccaacgtgggcctggagagagacatcgagcagttcaccgagttcttcgagaaccccgccttcagacccgacggcctgaagctgtaccccaccctggtgatcagaggcaccggcctgtacgagctgtggaagagcggcagatacaagagctacagccccagcgacctggtggagctggtggccagaatcctggccctggtgcccccctggaccagagtgtacagagtgcagagagacatccccatgcccctggtgagcagcggcgtggagcacggcaacctgagagagctggccctggccagaatgaaggacctgggcatccagtgcagagacgtgagaaccagagaggtgggcatccaggagatccaccacaaggtgagaccctaccaggtggagctggtgagaagagactacgtggccaacggcggctgggagaccttcctgagctacgaggaccccgaccaggacatcctgatcggcctgctgagactgagaaagtgcagcgaggagaccttcagattcgagctgggcggcggcgtgagcatcgtgagagagctgcacgtgtacggcagcgtggtgcccgtgagcagcagagaccccaccaagttccagcaccagggcttcggcatgctgctgatggaggaggccgagagaatcgccagagaggagcacggcagcggcaagatcgccgtgatcagcggcgtgggcaccagaaactactacagaaagatcggctacagactgcagggcccctacatggtgaagatgctgaagtag

SEQ ID NO: 80286 - DNA, 342 bp, synthetic construct
  misc_feature 1..342: note = Description of Artificial Sequence: Synthetic coding sequence
  source 1..342: mol_type = other DNA
atgatgctgaccatcggcgacgtgatcaagcagctgatcgaggcccacgagcagggcaaggacatcgacctgaacaaggtgaagaccaagaccgccgccaagtacggcctgagcgcccagcccagactggtggacatcatcgccgccgtgcccccccagtacagaaaggtgctgatgcccaagctgaaggccaagcccatcagaaccgccagcggcatcgccgtggtggccgtgatgtgcaagccccacagatgcccccacatcagcttcaccggcaacatctgcgtgtactgccccggcggccccgacagcgacttcgagtacagcacccagagctactag

SEQ ID NO: 80287 - DNA, 1602 bp, synthetic construct
  misc_feature 1..1602: note = Description of Artificial Sequence: Synthetic coding sequence
  source 1..1602: mol_type = other DNA
atgatgctgaccatcggcgacgtgatcaagcagctgatcgaggcccacgagcagggcaaggacatcgacctgaacaaggtgaagaccaagaccgccgccaagtacggcctgagcgcccagcccagactggtggacatcatcgccgccgtgcccccccagtacagaaaggtgctgatgcccaagctgaaggccaagcccatcagaaccgccagcggcatcgccgtggtggccgtgatgtgcaagccccacagatgcccccacatcagcttcaccggcaacatctgcgtgtactgccccggcggccccgacagcgacttcgagtacagcacccagagctacaccggctacgagcccaccagcatgagagccatcagagccagatacgaccccttcctgcagaccagacacagaatcgagcagctgaagcagctgggccacagcgtggacaaggtggagttcatcgtgatgggcggcaccttcatggccctgcccgaggagtacagagactacttcatcagaaacctgcacgacgccctgagcggccacaccagcaacaacatctacgaggccgtgaagtacagcgagagaagcctgaccaagtgcatcggcatcaccatcgagaccagacccgactactgcatgaagagacacctgagcgacatgctgacctacggctgcaccagactggagatcggcgtgcagagcgtgtacgaggacgtggccagagacaccaacagaggccacaccgtgaaggccgtgtgcgagagcttccacctggccaaggacagcggcttcaaggtggtggcccacatgatgcccgacctgcccaacgtgggcctggagagagacatcgagcagttcaccgagttcttcgagaaccccgccttcagacccgacggcctgaagctgtaccccaccctggtgatcagaggcaccggcctgtacgagctgtggaagagcggcagatacaagagctacagccccagcgacctggtggagctggtggccagaatcctggccctggtgcccccctggaccagagtgtacagagtgcagagagacatccccatgcccctggtgagcagcggcgtggagcacggcaacctgagagagctggccctggccagaatgaaggacctgggcatccagtgcagagacgtgagaaccagagaggtgggcatccaggagatccaccacaaggtgagaccctaccaggtggagctggtgagaagagactacgtggccaacggcggctgggagaccttcctgagctacgaggaccccgaccaggacatcctgatcggcctgctgagactgagaaagtgcagcgaggagaccttcagattcgagctgggcggcggcgtgagcatcgtgagagagctgcacgtgtacggcagcgtggtgcccgtgagcagcagagaccccaccaagttccagcaccagggcttcggcatgctgctgatggaggaggccgagagaatcgccagagaggagcacggcagcggcaagatcgccgtgatcagcggcgtgggcaccagaaactactacagaaagatcggctacagactgcagggcccctacatggtgaagatgctgaagtag

SEQ ID NO: 80288 - DNA, 576 bp, synthetic construct
  misc_feature 1..576: note = Description of Artificial Sequence: Synthetic coding sequence
  source 1..576: mol_type = other DNA
atgatgctgaccatcggcgacgtgatcaagcagctgatcgaggcccacgagcagggcaaggacatcgacctgaacaaggtgaagaccaagaccgccgccaagtacggcctgagcgcccagcccagactggtggacatcatcgccgccgtgcccccccagtacagaaaggtgctgatgcccaagctgaaggccaagcccatcagaaccgccagcggcatcgccgtggtggccgtgatgtgcaagccccacagatgcccccacatcagcttcaccggcaacatctgcgtgtactgccccggcggccccgacagcgacttcgagtacagcacccagagctacaccggctacgagcccaccagcatgagagccatcagagccagatacgaccccttcctgcagaccagacacagaatcgagcagctgaagcagctgggccacagcgtggacaaggtggagttcatcgtgatgggcggcaccttcatggccctgcccgaggagtacagagactacttcatcagaaacctgcacgacgccctgagcggccacaccagcaacaacatctacgaggccgtgtag

SEQ ID NO: 80289 - DNA, 1287 bp, synthetic construct
  misc_feature 1..1287: note = Description of Artificial Sequence: Synthetic coding sequence
  source 1..1287: mol_type = other DNA
atgagcacccaccagttctacagaaagtacatgtgccccaccagcatgagagccatcagagccagatacgaccccttcctgcagaccagacacagaatcgagcagctgaagcagctgggccacagcgtggacaaggtggagttcatcgtgatgggcggcaccttcatggccctgcccgaggagtacagagactacttcatcagaaacctgcacgacgccctgagcggccacaccagcaacaacatctacgaggccgtgaagtacagcgagagaagcctgaccaagtgcatcggcatcaccatcgagaccagacccgactactgcatgaagagacacctgagcgacatgctgacctacggctgcaccagactggagatcggcgtgcagagcgtgtacgaggacgtggccagagacaccaacagaggccacaccgtgaaggccgtgtgcgagagcttccacctggccaaggacagcggcttcaaggtggtggcccacatgatgcccgacctgcccaacgtgggcctggagagagacatcgagcagttcaccgagttcttcgagaaccccgccttcagacccgacggcctgaagctgtaccccaccctggtgatcagaggcaccggcctgtacgagctgtggaagagcggcagatacaagagctacagccccagcgacctggtggagctggtggccagaatcctggccctggtgcccccctggaccagagtgtacagagtgcagagagacatccccatgcccctggtgagcagcggcgtggagcacggcaacctgagagagctggccctggccagaatgaaggacctgggcatccagtgcagagacgtgagaaccagagaggtgggcatccaggagatccaccacaaggtgagaccctaccaggtggagctggtgagaagagactacgtggccaacggcggctgggagaccttcctgagctacgaggaccccgaccaggacatcctgatcggcctgctgagactgagaaagtgcagcgaggagaccttcagattcgagctgggcggcggcgtgagcatcgtgagagagctgcacgtgtacggcagcgtggtgcccgtgagcagcagagaccccaccaagttccagcaccagggcttcggcatgctgctgatggaggaggccgagagaatcgccagagaggagcacggcagcggcaagatcgccgtgatcagcggcgtgggcaccagaaactactacagaaagatcggctacagactgcagggcccctacatggtgaagatgctgaagtag

SEQ ID NO: 80290 - DNA, 1257 bp, synthetic construct
  misc_feature 1..1257: note = Description of Artificial Sequence: Synthetic coding sequence
  source 1..1257: mol_type = other DNA
atgtgccccaccagcatgagagccatcagagccagatacgaccccttcctgcagaccagacacagaatcgagcagctgaagcagctgggccacagcgtggacaaggtggagttcatcgtgatgggcggcaccttcatggccctgcccgaggagtacagagactacttcatcagaaacctgcacgacgccctgagcggccacaccagcaacaacatctacgaggccgtgaagtacagcgagagaagcctgaccaagtgcatcggcatcaccatcgagaccagacccgactactgcatgaagagacacctgagcgacatgctgacctacggctgcaccagactggagatcggcgtgcagagcgtgtacgaggacgtggccagagacaccaacagaggccacaccgtgaaggccgtgtgcgagagcttccacctggccaaggacagcggcttcaaggtggtggcccacatgatgcccgacctgcccaacgtgggcctggagagagacatcgagcagttcaccgagttcttcgagaaccccgccttcagacccgacggcctgaagctgtaccccaccctggtgatcagaggcaccggcctgtacgagctgtggaagagcggcagatacaagagctacagccccagcgacctggtggagctggtggccagaatcctggccctggtgcccccctggaccagagtgtacagagtgcagagagacatccccatgcccctggtgagcagcggcgtggagcacggcaacctgagagagctggccctggccagaatgaaggacctgggcatccagtgcagagacgtgagaaccagagaggtgggcatccaggagatccaccacaaggtgagaccctaccaggtggagctggtgagaagagactacgtggccaacggcggctgggagaccttcctgagctacgaggaccccgaccaggacatcctgatcggcctgctgagactgagaaagtgcagcgaggagaccttcagattcgagctgggcggcggcgtgagcatcgtgagagagctgcacgtgtacggcagcgtggtgcccgtgagcagcagagaccccaccaagttccagcaccagggcttcggcatgctgctgatggaggaggccgagagaatcgccagagaggagcacggcagcggcaagatcgccgtgatcagcggcgtgggcaccagaaactactacagaaagatcggctacagactgcagggcccctacatggtgaagatgctgaagtag

SEQ ID NO: 80291 - DNA, 1275 bp, synthetic construct
  misc_feature 1..1275: note = Description of Artificial Sequence: Synthetic coding sequence
  source 1..1275: mol_type = other DNA
atggccgccgtggccacctgcggcagcgtggccgccagcaccggcagcgccgtggccaccgccagcaagagcaacgtgaccagcttccagagaagaggccccagagccagcgtgaccaacgacagcggccccagactggtgagcatcgccggcaccagacccagcgtgagaaacggccagctgctggtgagcaccggcctgcccgccctggaccagctgctgggcggcggcctggccgtgggcaccgtgctgctgatcgaggaggacaagtacaacatctacagccccctgctgttcaagtacttcctggccgagggcatcgtgaacggccacaccctgctggtggccagcgccaaggaggaccccgccaacatcctgcaggagctgcccgcccccctgctggacgacaagtgcaagaaggagttcgacgaggacgtgtacaaccacaagacccccgagagcaacatcaagatgaagatcgcctggagataccagctgctgcccaagatggagatcggccccgtgagcagcagcagattcggccactactacgacgccagcaagagaatgccccaggagctgatcgaggccagcaactggcacggcttcttcctgcccgagaagatcagcagcaccctgaaggtggagccctgcagcctgacccccggctacaccaagctgctgcagttcatccagaacatcatctacgaggagggcttcgacggcagcaacccccagaagaagcagagaaacatcctgagaatcggcatccagaacctgggcagccccctgtggggcgacgacatctgctgcgccgagaacggcggcaacagccacagcctgaccaagttcctgtacgtgctgagaggcctgctgagaaccagcctgagcgcctgcatcatcaccatgcccacccacctgatccagaacaaggccatcatcgccagagtgaccaccctgagcgacgtggtggtgggcctggagagcttcatcggcagcgagagagagaccaaccccctgtacaaggactaccacggcctgatccacatcagacagatccccagactgaacaacctgatctgcgacgagagcgacgtgaaggacctggccttcaagctgaagagaaagctgttcaccatcgagagactgcacctgccccccgacctgagcgacaccgtgagcagaagcagcaagatggacctggccgagagcgccaagagactgggccccggctgcggcatgatggccggcggcaagaagcacctggacttctag

SEQ ID NO: 80292 - DNA, 1431 bp, synthetic construct
  misc_feature 1..1431: note = Description of Artificial Sequence: Synthetic coding sequence
  source 1..1431: mol_type = other DNA
atggccgccgtggccacctgcggcagcgtggccgccagcaccggcagcgccgtggccaccgccagcaagagcaacgtgaccagcttccagagaagaggccccagagccagcgtgaccaacgacagcggccccagactggtgagcatcgccggcaccagacccagcgtgagaaacggccagctgctggtgagcaccggcctgcccgccctggaccagctgctgggcggcggcctggccgtgggcaccgtgctgctgatcgaggaggacaagtacaacatctacagccccctgctgttcaagtacttcctggccgagggcatcgtgaacggccacaccctgctggtggccagcgccaaggaggaccccgccaacatcctgcaggagctgcccgcccccctgctggacgacaagtgcaagaaggagttcgacgaggacgtgtacaaccacaagacccccgagagcaacatcaagatgaagatcgcctggagataccagctgctgcccaagatggagcagatcggccccgtgagcagcagcagattcggccactactacgacgccagcaagagaatgccccaggagctgatcgaggccagcaactggcacggcttcttcctgcccgagaagatcagcagcaccctgaaggtggagccctgcagcctgacccccggctacaccaagctgctgcagttcatccagaacatcatctacgaggagggcttcgacggcagcaacccccagaagaagcagagaaacatcctgagaatcggcatccagaacctgggcagccccctgtggggcgacgacatctgctgcgccgagaacggcggcaacagccacagcctgaccaagttcctgtacgtgctgagaggcctgctgagaaccagcctgagcgcctgcatcatcaccatgcccacccacctgatccagaacaaggccatcatcgccagagtgaccaccctgagcgacgtggtggtgggcctggagagcttcatcggcagcgagagagagaccaaccccctgtacaaggactaccacggcctgatccacatcagacagatccccagactgaacaacctgatctgcgacgagagcgacgtgaaggacctggccttcaagctgaagagaaagctgttcaccatcgagtgggtgcaggacaactacctgagacaggagagaaacatctacccccccggcttcagctacctgctgaagcagaaggacagcgcctggggcgagggcagcctgcagcacagcaccttcctgatgagcttcctggccaaggccaccgccttcgccagcagactggtgagacacagcgagcccctgaagcagaacggcagcggcagaatcagacaggccgccggccccagactgtggcacgacggcagaagacaggaggcccccggcctgctgggcatccccccctag

SEQ ID NO: 80293 - DNA, 1608 bp, synthetic construct
  misc_feature 1..1608: note = Description of Artificial Sequence: Synthetic coding sequence
  source 1..1608: mol_type = other DNA
atggccgccgtggccacctgcggcagcgtggccgccagcaccggcagcgccgtggccaccgccagcaagagcaacgtgaccagcttccagagaagaggccccagagccagcgtgaccaacgacagcggccccagactggtgagcatcgccggcaccagacccagcgtgagaaacggccagctgctggtgagcaccggcctgcccgccctggaccagctgctgggcggcggcctggccgtgggcaccgtgctgctgatcgaggaggacaagtacaacatctacagccccctgctgttcaagtacttcctggccgagggcatcgtgaacggccacaccctgctggtggccagcgccaaggaggaccccgccaacatcctgcaggagctgcccgcccccctgctggacgacaagtgcaagaaggagttcgacgaggacgtgtacaaccacaagacccccgagagcaacatcaagatgaagatcgcctggagataccagctgctgcccaagatggagatcggccccgtgagcagcagcagattcggccactactacgacgccagcaagagaatgccccaggagctgatcgaggccagcaactggcacggcttcttcctgcccgagaagatcagcagcaccctgaaggtggagccctgcagcctgacccccggctacaccaagctgctgcagttcatccagaacatcatctacgaggagggcttcgacggcagcaacccccagaagaagcagagaaacatcctgagaatcggcatccagaacctgggcagccccctgtggggcgacgacatctgctgcgccgagaacggcggcaacagccacagcctgaccaagttcctgtacgtgctgagaggcctgctgagaaccagcctgagcgcctgcatcatcaccatgcccacccacctgatccagaacaaggccatcatcgccagagtgaccaccctgagcgacgtggtggtgggcctggagagcttcatcggcagcgagagagagaccaaccccctgtacaaggactaccacggcctgatccacatcagacagatccccagactgaacaacctgatctgcgacgagagcgacgtgaaggacctggccttcaagctgaagagaaagctgttcaccatcgaggccggcgtgcagtggcacgacctgggcagcagacagcccagactgctgggcagcagcaacagccccgccagcgccagcctggtggccggcatcaccggcgcccaccaccacacccagctgatcttcgtgttcctggtggagatgggcttccaccacgtgggccaggccggcctggagctgctgaccagcggcgacagcagcgccagcgccagccagagcgccggcatcaccggcatgagctacagagccagacccagagccctgtacttcaaggagaacaagagcaaggtgggcgccagacagctgctggagaccagagaggagcacctgagcagcagactgctgatcctgacccaggccgagagactgtgcatgggcagaagattcttcaccgccttccacatcttcaacgagctgccctgcaagggcgactgcatctgcctgcagacctgccagacccagtag

SEQ ID NO: 80294 - DNA, 840 bp, synthetic construct
  misc_feature 1..840: note = Description of Artificial Sequence: Synthetic coding sequence
  source 1..840: mol_type = other DNA
atggaggccgtggtgaacctgtaccaggaggtgatgaagcacgccgaccccagaatccagggctaccccctgatgggcagccccctgctgatgaccagcatcctgctgacctacgtgtacttcgtgctgagcctgggccccagaatcatggccaacagaaagcccttccagctgagaggcttcatgatcgtgtacaacttcagcctggtggccctgagcctgtacatcgtgtacgagttcctgatgagcggctggctgagcacctacacctggagatgcgaccccgtggactacagcaacagccccgaggccctgagaatggtgagagtggcctggctgttcctgttcagcaagttcatcgagctgatggacaccgtgatcttcatcctgagaaagaaggacggccaggtgaccttcctgcacgtgttccaccacagcgtgctgccctggagctggtggtggggcgtgaagatcgcccccggcggcatgggcagcttccacgccatgatcaacagcagcgtgcacgtgatcatgtacctgtactacggcctgagcgccttcggccccgtggcccagccctacctgtggtggaagaagcacatgaccgccatccagctgatccagttcgtgctggtgagcctgcacatcagccagtactacttcatgagcagctgcaactaccagtaccccgtgatcatccacctgatctggatgtacggcaccatcttcttcatgctgttcagcaacttctggtaccacagctacaccaagggcaagagactgcccagagccctgcagcagaacggcgcccccggcatcgccaaggtgaaggccaactag

SEQ ID NO: 80295 - DNA, 759 bp, synthetic construct
  misc_feature 1..759: note = Description of Artificial Sequence: Synthetic coding sequence
  source 1..759: mol_type = other DNA
atggaggccgtggtgaacctgtaccaggaggtgatgaagcacgccgaccccagaatccagggctaccccctgatgggcagccccctgctgatgaccagcatcctgctgacctacgtgtacttcgtgctgagcctgggccccagaatcatggccaacagaaagcccttccagctgagaggcttcatgatcgtgtacaacttcagcctggtggccctgagcctgtacatcgtgtacgagatggtgagagtggcctggctgttcctgttcagcaagttcatcgagctgatggacaccgtgatcttcatcctgagaaagaaggacggccaggtgaccttcctgcacgtgttccaccacagcgtgctgccctggagctggtggtggggcgtgaagatcgcccccggcggcatgggcagcttccacgccatgatcaacagcagcgtgcacgtgatcatgtacctgtactacggcctgagcgccttcggccccgtggcccagccctacctgtggtggaagaagcacatgaccgccatccagctgatccagttcgtgctggtgagcctgcacatcagccagtactacttcatgagcagctgcaactaccagtaccccgtgatcatccacctgatctggatgtacggcaccatcttcttcatgctgttcagcaacttctggtaccacagctacaccaagggcaagagactgcccagagccctgcagcagaacggcgcccccggcatcgccaaggtgaaggccaactag

SEQ ID NO: 80296 - DNA, 891 bp, synthetic construct
  misc_feature 1..891: note = Description of Artificial Sequence: Synthetic coding sequence
  source 1..891: mol_type = other DNA
atggagcacctgaaggccttcgacgacgagatcaacgccttcctggacaacatgttcggccccagagacagcagagtgagaggctggttcatgctggacagctacctgcccaccttcttcctgaccgtgatgtacctgctgagcatctggctgggcaacaagtacatgaagaacagacccgccctgagcctgagaggcatcctgaccctgtacaacctgggcatcaccctgctgagcgcctacatgctggccgagctgatcctgagcacctgggagggcggctacaacctgcagtgccaggacctgaccagcgccggcgaggccgacatcagagtggccaaggtgctgtggtggtactacttcagcaagagcgtggagttcctggacaccatcttcttcgtgctgagaaagaagaccagccagatcaccttcctgcacgtgtaccaccacgccagcatgttcaacatctggtggtgcgtgctgaactggatcccctgcggccagagcttcttcggccccaccctgaacagcttcatccacatcctgatgtacagctactacggcctgagcgtgttccccagcatgcacaagtacctgtggtggaagaagtacctgacccaggcccagctggtgcagttcgtgctgaccatcacccacaccatgagcgccgtggtgaagccctgcggcttccccttcggctgcctgatcttccagagcagctacatgctgaccctggtgatcctgttcctgaacttctacgtgcagacctacagaaagaagcccatgaagaaggacatgcaggagccccccgccggcaaggaggtgaagaacggcttcagcaaggcctacttcaccgccgccaacggcgtgatgaacaagaaggcccagtag

SEQ ID NO: 80297 - DNA, 813 bp, synthetic construct
  misc_feature 1..813: note = Description of Artificial Sequence: Synthetic coding sequence
  source 1..813: mol_type = other DNA
atggtgaccgccatgaacgtgagccacgaggtgaaccagctgttccagccctacaacttcgagctgagcaaggacatgagacccttcttcgaggagtactgggccaccagcttccccatcgccctgatctacctggtgctgatcgccgtgggccagaactacatgaaggagagaaagggcttcaacctgcagggccccctgatcctgtggagcttctgcctggccatcttcagcatcctgggcgccgtgagaatgtggggcatcatgggcaccgtgctgctgaccggcggcctgaagcagaccgtgtgcttcatcaacttcatcgacaacagcaccgtgaagttctggagctgggtgttcctgctgagcaaggtgatcgagctgggcgacaccgccttcatcatcctgagaaagagacccctgatcttcatccactggtaccaccacagcaccgtgctggtgtacaccagcttcggctacaagaacaaggtgcccgccggcggctggttcgtgaccatgaacttcggcgtgcacgccatcatgtacacctactacaccctgaaggccgccaacgtgaagccccccaagatgctgcccatgctgatcaccagcctgcagatcctgcagatgttcgtgggcgccatcgtgagcatcctgacctacatctggagacaggaccagggctgccacaccaccatggagcacctgttctggagcttcatcctgtacatgacctacttcatcctgttcgcccacttcttctgccagacctacatcagacccaaggtgaaggccaagaccaagagccagtag

SEQ ID NO: 80298 - DNA, 945 bp, synthetic construct
  misc_feature 1..945: note = Description of Artificial Sequence: Synthetic coding sequence
  source 1..945: mol_type = other DNA
atgggcctgctggacagcgagcccggcagcgtgctgaacgtggtgagcaccgccctgaacgacaccgtggagttctacagatggacctggagcatcgccgacaagagagtggagaactggcccctgatgcagagcccctggcccaccctgagcatcagcaccctgtacctgctgttcgtgtggctgggccccaagtggatgaaggacagagagcccttccagatgagactggtgctgatcatctacaacttcggcatggtgctgctgaacctgttcatcttcagagagctgttcatgggcagctacaacgccggctacagctacatctgccagagcgtggactacagcaacaacgtgcacgaggtgagaatcgccgccgccctgtggtggtacttcgtgagcaagggcgtggagtacctggacaccgtgttcttcatcctgagaaagaagaacaaccaggtgagcttcctgcacgtgtaccaccactgcaccatgttcaccctgtggtggatcggcatcaagtgggtggccggcggccaggccttcttcggcgcccagctgaacagcttcatccacgtgatcatgtacagctactacggcctgaccgccttcggcccctggatccagaagtacctgtggtggaagagatacctgaccatgctgcagctgatccagttccacgtgaccatcggccacaccgccctgagcctgtacaccgactgccccttccccaagtggatgcactgggccctgatcgcctacgccatcagcttcatcttcctgttcctgaacttctacatcagaacctacaaggagcccaagaagcccaaggccggcaagaccgccatgaacggcatcagcgccaacggcgtgagcaagagcgagaagcagctgatgatcgagaacggcaagaagcagaagaacggcaaggccaagggcgactag

SEQ ID NO: 80299 - DNA, 900 bp, synthetic construct
  misc_feature 1..900: note = Description of Artificial Sequence: Synthetic coding sequence
  source 1..900: mol_type = other DNA
atggagcacttcgacgccagcctgagcacctacttcaaggccctgctgggccccagagacaccagagtgaagggctggttcctgctggacaactacatccccaccttcatctgcagcgtgatctacctgctgatcgtgtggctgggccccaagtacatgagaaacaagcagcccttcagctgcagaggcatcctggtggtgtacaacctgggcctgaccctgctgagcctgtacatgttctgcgagctggtgaccggcgtgtgggagggcaagtacaacttcttctgccagggcaccagaaccgccggcgagagcgacatgaagatcatcagagtgctgtggtggtactacttcagcaagctgatcgagttcatggacaccttcttcttcatcctgagaaagaacaaccaccagatcaccgtgctgcacgtgtaccaccacgccagcatgctgaacatctggtggttcgtgatgaactgggtgccctgcggccacagctacttcggcgccaccctgaacagcttcatccacgtgctgatgtacagctactacggcctgagcagcgtgcccagcatgagaccctacctgtggtggaagaagtacatcacccagggccagctgctgcagttcgtgctgaccatcatccagaccagctgcggcgtgatctggccctgcaccttccccctgggctggctgtacttccagatcggctacatgatcagcctgatcgccctgttcaccaacttctacatccagacctacaacaagaagggcgccagcagaagaaaggaccacctgaaggaccaccagaacggcagcatggccgccgtgaacggccacaccaacagcttcagccccctggagaacaacgtgaagcccagaaagctgagaaaggactag

SEQ ID NO: 80300 - DNA, 267 bp, synthetic construct
  misc_feature 1..267: note = Description of Artificial Sequence: Synthetic coding sequence
  source 1..267: mol_type = other DNA
atggagcacttcgacgccagcctgagcacctacttcaaggccctgctgggccccagaggcatcagcagcagcgtgctgagaatgggcccccccctgcacaccgtggtgggctggctgcagcagctgcaggccgcccacagcgaggaggaggagaagatgttccacctgtgcggcttcaagcacaaggaggtggtgagccagagcagcctgcccgccgtgatcccccagaacagcctggccaccatcgccagccacgcccccgcctag

SEQ ID NO: 80301 - DNA, 870 bp, synthetic construct
  misc_feature 1..870: note = Description of Artificial Sequence: Synthetic coding sequence
  source 1..870: mol_type = other DNA
atggagcacttcgacgccagcctgagcacctacttcaaggccctgctgggccccagagacaccagagtgaagggctggttcctgctggacaactacatccccaccttcatctgcagcgtgatctacctgctgatcgtgtggctgggccccaagtacatgagaaacaagcagcccttcagctgcagaggcatcctggtggtgtacaagttctgcgagctggtgaccggcgtgtgggagggcaagtacaacttcttctgccagggcaccagaaccgccggcgagagcgacatgaagatcatcagagtgctgtggtggtactacttcagcaagctgatcgagttcatggacaccttcttcttcatcctgagaaagaacaaccaccagatcaccgtgctgcacgtgtaccaccacgccagcatgctgaacatctggtggttcgtgatgaactgggtgccctgcggccacagctacttcggcgccaccctgaacagcttcatccacgtgctgatgtacagctactacggcctgagcagcgtgcccagcatgagaccctacctgtggtggaagaagtacatcacccagggccagctgctgcagttcgtgctgaccatcatccagaccagctgcggcgtgatctggccctgcaccttccccctgggctggctgtacttccagatcggctacatgatcagcctgatcgccctgttcaccaacttctacatccagacctacaacaagaagggcgccagcagaagaaaggaccacctgaaggaccaccagaacggcagcatggccgccgtgaacggccacaccaacagcttcagccccctggagaacaacgtgaagcccagaaagctgagaaaggactag

SEQ ID NO: 80302 - DNA, 981 bp, synthetic construct
  misc_feature 1..981: note = Description of Artificial Sequence: Synthetic coding sequence
  source 1..981: mol_type = other DNA
atggagcacttcgacgccagcctgagcacctacttcaaggccctgctgggccccagagacaccagagtgaagggctggttcctgctggacaactacatccccaccttcatctgcagcgtgatctacctgctgatcgtgtggctgggccccaagtacatgagaaacaagcagcccttcagctgcagaggcatcctggtggtgtacaacctgggcctgaccctgctgagcctgtacatgttctgcgagagcaagagagagcagcccagaagaagcgcctgcgccagcagaaccgaccccagcacccagcagcagctgcccgagaacagactggtgaccggcgtgtgggagggcaagtacaacttcttctgccagggcaccagaaccgccggcgagagcgacatgaagatcatcagagtgctgtggtggtactacttcagcaagctgatcgagttcatggacaccttcttcttcatcctgagaaagaacaaccaccagatcaccgtgctgcacgtgtaccaccacgccagcatgctgaacatctggtggttcgtgatgaactgggtgccctgcggccacagctacttcggcgccaccctgaacagcttcatccacgtgctgatgtacagctactacggcctgagcagcgtgcccagcatgagaccctacctgtggtggaagaagtacatcacccagggccagctgctgcagttcgtgctgaccatcatccagaccagctgcggcgtgatctggccctgcaccttccccctgggctggctgtacttccagatcggctacatgatcagcctgatcgccctgttcaccaacttctacatccagacctacaacaagaagggcgccagcagaagaaaggaccacctgaaggaccaccagaacggcagcatggccgccgtgaacggccacaccaacagcttcagccccctggagaacaacgtgaagcccagaaagctgagaaaggactag

SEQ ID NO: 80303 - DNA, 900 bp, synthetic construct; identical to SEQ ID NO: 80299
  misc_feature 1..900: note = Description of Artificial Sequence: Synthetic coding sequence
  source 1..900: mol_type = other DNA

SEQ ID NO: 80304 - DNA, 798 bp, synthetic construct
  misc_feature 1..798: note = Description of Artificial Sequence: Synthetic coding sequence
  source 1..798: mol_type = other DNA
atgaacatgagcgtgctgaccctgcaggagtacgagttcgagaagcagttcaacgagaacgaggccatccagtggatgcaggagaactggaagaagagcttcctgttcagcgccctgtacgccgccttcatcttcggcggcagacacctgatgaacaagagagccaagttcgagctgagaaagcccctggtgctgtggagcctgaccctggccgtgttcagcatcttcggcgccctgagaaccggcgcctacatggtgtacatcctgatgaccaagggcctgaagcagagcgtgtgcgaccagggcttctacaacggccccgtgagcaagttctgggcctacgccttcgtgctgagcaaggcccccgagctgggcgacaccatcttcatcatcctgagaaagcagaagctgatcttcctgcactggtaccaccacatcaccgtgctgctgtacagctggtacagctacaaggacatggtggccggcggcggctggttcatgaccatgaactacggcgtgcacgccgtgatgtacagctactacgccctgagagccgccggcttcagagtgagcagaaagttcgccatgttcatcaccctgagccagatcacccagatgctgatgggctgcgtggtgaactacctggtgttctgctggatgcagcacgaccagtgccacagccacttccagaacatcttctggagcagcctgatgtacctgagctacctggtgctgttctgccacttcttcttcgaggcctacatcggcaagatgagaaagaccaccaaggccgagtag

SEQ ID NO: 80305 - DNA, 798 bp, synthetic construct; identical to SEQ ID NO: 80304
  misc_feature 1..798: note = Description of Artificial Sequence: Synthetic coding sequence
  source 1..798: mol_type = other DNA

SEQ ID NO: 80306 - DNA, 327 bp, synthetic construct
  misc_feature 1..327: note = Description of Artificial Sequence: Synthetic coding sequence
  source 1..327: mol_type = other DNA
atgaacatgagcgtgctgaccctgcaggagtacgagttcgagaagcagttcaacgagaacgaggccatccagtggatgcaggagaactggaagaagagcttcctgttcagcgccctgtacgccgccttcatcttcggcggcagacacctgatgaacaagagagccaagttcgagctgagaaagcccctggtgctgtggagcctgaccctggccgtgttcagcatcttcggcgccctgagaaccggcgcctacatggtgtacatcctgatgaccaagggcctgaagcagagcgtgtgcgaccagggcttctacaacggccccgtgtag

SEQ ID NO: 80307 - DNA, 414 bp, synthetic construct
  misc_feature 1..414: note = Description of Artificial Sequence: Synthetic coding sequence
  source 1..414: mol_type = other DNA
atgaacatgagcgtgctgaccctgcaggagtacgagttcgagaagcagttcaacgagaacgaggccatccagtggatgcaggagaactggaagaagagcttcctgttcagcgccctgtacgccgccttcatcttcggcggcagacacctgatgaacaagagagccaagttcgagctgagaaagcccctggtgctgtggagcctgaccctggccgtgttcagcatcttcggcgccctgagaaccggcgcctacatggtgtacatcctgatgaccaagggcctgaagcagagcgtgtgcgaccagggcttctacaacggccccgtgagcaagttctgggcctacgccttcgtgctgagcaaggcccccgagctgggcgacaccatcttcatcatcctgagaaagcagaagctgtag

SEQ ID NO: 80308 - DNA, 846 bp, synthetic construct
  misc_feature 1..846: note = Description of Artificial Sequence: Synthetic coding sequence
  source 1..846: mol_type = other DNA
atggccttcagcgacctgaccagcagaaccgtgcacctgtacgacaactggatcaaggacgccgaccccagagtggaggactggctgctgatgagcagccccctgccccagaccatcctgctgggcttctacgtgtacttcgtgaccagcctgggccccaagctgatggagaacagaaagcccttcgagctgaagaaggccatgatcacctacaacttcttcatcgtgctgttcagcgtgtacatgtgctacgagttcgtgatgagcggctggggcatcggctacagcttcagatgcgacatcgtggactacagcagaagccccaccgccctgagaatggccagaacctgctggctgtactacttcagcaagttcatcgagctgctggacaccatcttcttcgtgctgagaaagaagaacagccaggtgaccttcctgcacgtgttccaccacaccatcatgccctggacctggtggttcggcgtgaagttcgccgccggcggcctgggcaccttccacgccctgctgaacaccgccgtgcacgtggtgatgtacagctactacggcctgagcgccctgggccccgcctaccagaagtacctgtggtggaagaagtacctgaccagcctgcagctggtgcagttcgtgatcgtggccatccacatcagccagttcttcttcatggaggactgcaagtaccagttccccgtgttcgcctgcatcatcatgagctacagcttcatgttcctgctgctgttcctgcacttctggtacagagcctacaccaagggccagagactgcccaagaccgtgaagaacggcacctgcaagaacaaggacaactag

SEQ ID NO: 80309 - DNA, 846 bp, synthetic construct; identical to SEQ ID NO: 80308
  misc_feature 1..846: note = Description of Artificial Sequence: Synthetic coding sequence
  source 1..846: mol_type = other DNA

SEQ ID NO: 80310 - DNA, 498 bp, synthetic construct
  misc_feature 1..498: note = Description of Artificial Sequence: Synthetic coding sequence
  source 1..498: mol_type = other DNA
atggccttcagcgacctgaccagcagaaccgtgcacctgtacgacaactggatcaaggacgccgaccccagagtggaggactggctgctgatgagcagccccctgccccagaccatcctgctgggcttctacgtgtacttcgtgaccagcctgggccccaagctgatggagaacagaaagcccttcgagctgaagaaggccatgatcacctacaacttcttcatcgtgctgttcagcgtgtacatgtgctacgagttcgtgatgagcggctggggcatcggctacagcttcagatgcgacatcgtggactacagcagaagccccaccgccctgagaatggccagaacctgctggctgtactacttcagcaagttcatcgagctgctggacaccatcttcttcgtgctgagaaagaagaacagccaggtgaccttcctgcacgtgttccaccacaccatcatgccctggacctggtggttcggcgtgaagttcgcctag

SEQ ID NO: 80311 - DNA, 846 bp, synthetic construct; identical to SEQ ID NO: 80308
  misc_feature 1..846: note = Description of Artificial Sequence: Synthetic coding sequence
  source 1..846: mol_type = other DNA

SEQ ID NO: 80312 - DNA, 498 bp, synthetic construct; identical to SEQ ID NO: 80310
  misc_feature 1..498: note = Description of Artificial Sequence: Synthetic coding sequence
  source 1..498: mol_type = other DNA

SEQ ID NO: 80313 - DNA, 921 bp, synthetic construct
  misc_feature 1..921: note = Description of Artificial Sequence: Synthetic coding sequence
  source 1..921: mol_type = other DNA
atggccgccgccgccgccgccgccgccgccgccggcgccgccggcggcagaggcagcggccccggcagaagaagacacctggtgcccggcgccggcggcgaggccggcgagggcgcccccggcggcgccggcgactacggcaacggcctggagagcgaggagctggagcccgaggagctgctgctggagcccgagcccgagcccgagcccgaggaggagccccccagacccagagccccccccggcgcccccggccccggccccggcagcggcgcccccggcagccaggaggaggaggaggagcccggcctggtggagggcgaccccggcgacggcgccatcgaggaccccgagctggaggccatcaaggccagagtgagagagatggaggaggaggccgagaagctgaaggagctgcagaacgaggtggagaagcagatgaacatgagccccccccccggcaacgccggccccgtgatcatgagcatcgaggagaagatggaggccgacgccagaagcatctacgtgggcaacgtggactacggcgccaccgccgaggagctggaggcccacttccacggctgcggcagcgtgaacagagtgaccatcctgtgcgacaagttcagcggccaccccaagggcttcgcctacatcgagttcagcgacaaggagagcgtgagaaccagcctggccctggacgagagcctgttcagaggcagacagatcaaggtgatccccaagagaaccaacagacccggcatcagcaccaccgacagaggcttccccagagccagatacagagccagaaccaccaactacaacagcagcagaagcagattctacagcggcttcaacagcagacccagaggcagagtgtacagaggcagagccagagccaccagctggtacagcccctactag

SEQ ID NO: 80314 - DNA, 1407 bp, synthetic construct
  misc_feature 1..1407: note = Description of Artificial Sequence: Synthetic coding sequence
  source 1..1407: mol_type = other DNA
atggccatcgccaccagcgtgtacgtggtgcccccccccgccagaccctgccccaccagcggcccccccgccggcccctgcccccccagccccgacctgatctacaagatccccagagccagcggcacccagctggccgcccccagagacgccctggaggtgtacgacgtgccccccaccgccctgagagtgcccagcagcggcccctacgactgccccgccagcttcagccaccccctgaccagagtggccccccagccccccggcgaggacgacgccccctacgacgtgcccctgacccccaagccccccgccgagctggagcccgacctggagtgggagggcggcagagagcccggcccccccatctacgccgcccccagcaacctgaagagagccagcgccctgctgaacctgtacgaggcccccgaggagctgctggccgacggcgagggcggcggcaccgacgagggcatctacgacgtgcccctgctgggccccgaggccccccccagccccgagccccccggcgccctggccagccacgaccaggacaccctggcccagctgctggccagaagccccccccccccccacagacccagactgcccagcgccgagagcctgagcagaagacccctgcccgccctgcccgtgcccgaggcccccagccccagccccgtgcccagccccgcccccggcagaaagggcagcatccaggacagacccctgcccccccccccccccagactgcccggctacggcggccccaaggtggagggcgaccccgagggcagagagatggaggacgaccccgccggccaccacaacgagtacgagggcatccccatggccgaggagtacgactacgtgcacctgaagggcatggacaaggcccagggcagcagaccccccgaccaggcctgcaccggcgaccccgagctgcccgagagaggcatgcccgccccccaggaggccctgagccccggcgagcccctggtggtgagcaccggcgacctgcagctgctgtacttctacgccggccagtgccagagccactacagcgccctgcaggccgccgtggccgccctgatgagcagcacccaggccaaccagccccccagactgttcgtgccccacagcaagagagtggtggtggccgcccacagactggtgttcgtgggcgacaccctgggcagactggccgccagcgcccccctgagagcccaggtgagagccgccggcaccgccctgggccaggccctgagagccaccgtgctggccgtgaagggcgccgccctgggctaccccagcagccccgccatccaggagatggtgcagtgcgtgaccgagctggccggccaggccctgcagttcaccaccctgctgaccagcctggccccctag

SEQ ID NO: 80315 - DNA, 1179 bp, synthetic construct
  misc_feature 1..1179: note = Description of Artificial Sequence: Synthetic coding sequence
  source 1..1179: mol_type = other DNA
atggccatcgccaccagcgtgtacgtggtgcccccccccgccagaccctgccccaccagcggcccccccgccggcccctgcccccccagccccgacctgatctacaagatccccagagccagcggcacccagctggccgcccccagagacgccctggaggtgtacgacgtgccccccaccgccctgagagtgcccagcagcggcccctacgactgccccgccagcttcagccaccccctgaccagagtggccccccagccccccggcgaggacgacgccccccccagccccgagccccccggcgccctggccagccacgaccaggacaccctggcccagctgctggccagaagccccccccccccccacagacccagactgcccagcgccgagagcctgagcagaagacccctgcccgccctgcccgtgcccgaggcccccagccccagccccgtgcccagccccgcccccggcagaaagggcagcatccaggacagacccctgcccccccccccccccagactgcccggctacggcggccccaaggtggagggcgaccccgagggcagagagatggaggacgaccccgccggccaccacaacgagtacgagggcatccccatggccgaggagtacgactacgtgcacctgaagggcatggacaaggcccagggcagcagaccccccgaccaggcctgcaccggcgaccccgagctgcccgagagaggcatgcccgccccccaggaggccctgagccccggcgagcccctggtggtgagcaccggcgacctgcagctgctgtacttctacgccggccagtgccagagccactacagcgccctgcaggccgccgtggccgccctgatgagcagcacccaggccaaccagccccccagactgttcgtgccccacagcaagagagtggtggtggccgcccacagactggtgttcgtgggcgacaccctgggcagactggccgccagcgcccccctgagagcccaggtgagagccgccggcaccgccctgggccaggccctgagagccaccgtgctggccgtgaagggcgccgccctgggctaccccagcagccccgccatccaggagatggtgcagtgcgtgaccgagctggccggccaggccctgcagttcaccaccctgctgaccagcctggccccctag

SEQ ID NO: 80316 - DNA, 1326 bp, synthetic construct
  misc_feature 1..1326: note = Description of Artificial Sequence: Synthetic coding sequence
  source 1..1326: mol_type = other DNA
atgagcgagagagaggtgagcaccgcccccgccggcaccgacatgcccgccgccaagaagcagaagctgagcagcgacgagaacagcaaccccgacctgagcggcgacgagaacgacgacgccgtgagcatcgagagcggcaccaacaccgagagacccgacacccccaccaacacccccaacgcccccggcagaaagagctggggcaagggcaagtggaagagcaagaagtgcaagtacagcttcaagtgcgtgaacagcctgaaggaggaccacaaccagcccctgttcggcgtgcagttcaactggcacagcaaggagggcgaccccctggtgttcgccaccgtgggcagcaacagagtgaccctgtacgagtgccacagccagggcgagatcagactgctgcagagctacgtggacgccgacgccgacgagaacttctacacctgcgcctggacctacgacagcaacaccagccaccccctgctggccgtggccggcagcagaggcatcatcagaatcatcaaccccatcaccatgcagtgcatcaagcactacgtgggccacggcaacgccatcaacgagctgaagttccaccccagagaccccaacctgctgctgagcgtgagcaaggaccacgccctgagactgtggaacatccagaccgacaccctggtggccatcttcggcggcgtggagggccacagagacgaggtgctgagcgccgactacgacctgctgggcgagaagatcatgagctgcggcatggaccacagcctgaagctgtggagaatcaacagcaagagaatgatgaacgccatcaaggagagctacgactacaaccccaacaagaccaacagacccttcatcagccagaagatccacttccccgacttcagcaccagagacatccacagaaactacgtggactgcgtgagatggctgggcgacctgatcctgagcaagagctgcgagaacgccatcgtgtgctggaagcccggcaagatggaggacgacatcgacaagatcaagcccagcgagagcaacgtgaccatcctgggcagattcgactacagccagtgcgacatctggtacatgagattcagcatggacttctggcagaagatgctggccctgggcaaccaggtgggcaagctgtacgtgtgggacctggaggtggaggacccccacaaggccaagtgcaccaccctgacccaccacaagtgcggcgccgccatcagacagaccagcttcagcagagacagcagcatcctgatcgccgtgtgcgacgacgccagcatctggagatgggacagactgagatag

SEQ ID NO: 80317 - DNA, 1203 bp, synthetic construct
  misc_feature 1..1203: note = Description of Artificial Sequence: Synthetic coding sequence
  source 1..1203: mol_type = other DNA
atgagcgagagagaggtgagcaccgcccccgccggcaccgacatgcccgccgccaagaagcagaagctgagcagcgacgagaacagcaaccccgacctgagcggcgacgagaacgacgacgccgtgagcatcgagagcggcaccaacaccgagagacccgacacccccaccaacacccccaacgcccccggcagaaagagctggggcaagggcaagtggaagagcaagaagtgcaagtacagcttcaagtgcgtgaacagcctgaaggaggaccacaaccagcccctgttcggcgtgcagttcaactggcacagcaaggagggcgaccccctggtgttcgccaccgtgggcagcaacagagtgaccctgtacgagtgccacagccagggcgagatcagactgctgcagagctacgtggacgccgacgccgacgagaacttctacacctgcgcctggacctacgacagcaacaccagccaccccctgctggccgtggccggcagcagaggcatcatcagaatcatcaaccccatcaccatgcagtgcatcaagcactacgtgggccacggcaacgccatcaacgagctgaagttccaccccagagaccccaacctgctgctgagcgtgagcaaggaccacgccctgagactgtggaacatccagaccgacaccctggtggccatcttcggcggcgtggagggccacagagacgaggtgctgagcgccgactacgacctgctgggcgagaagatcatgagctgcggcatggaccacagcctgaagctgtggagaatcaacagcaagagaatgatgaacgccatcaaggagagctacgactacaaccccaacaagaccaacagacccttcatcagccagaagatccacttccccgacttcagcaccagagacatccacagaaactacgtggactgcgtgagatggctgggcgacctgatcctgagcaagagctgcgagaacgccatcgtgtgctggaagcccggcaagatggaggacgacatcgacaagatcaagcccagcgagagcaacgtgaccatcctgggcagattcgactacagccagtgcgacatctggtacatgagattcagcatggacttctggcagaagatgctggccctgggcaaccaggtgggcaagctgtacgtgtgggacctggaggtggaggacccccacaaggccaagtag

SEQ ID NO: 80318 - DNA, 1401 bp, synthetic construct
  misc_feature 1..1401: note = Description of Artificial Sequence: Synthetic coding sequence
  source 1..1401: mol_type = other DNA
atgagcgagagagaggtgagcaccgcccccgccggcaccgacatgcccgccgccaagaagcagaagctgagcagcgacgagaacagcaaccccgacctgagcggcgacgagaacgacgacgccgtgagcatcgagagcggcaccaacaccgagagacccgacacccccaccaacacccccaacgcccccggcagaaagagctggggcaagggcaagtggaagagcaagaagtgcaagtacagcttcaagtgcgtgaacagcctgaaggaggaccacaaccagcccctgttcggcgtgcagttcaactggcacagcaaggagggcgaccccctggtgttcgccaccgtgggcagcaacagagtgaccctgtacgagtgccacagccagggcgagatcagactgctgcagagctacgtggacgccgacgccgacgagaacttctacacctgcgcctggacctacgacagcaacaccagccaccccctgctggccgtggccggcagcagaggcatcatcagaatcatcaaccccatcaccatgcagtgcatcaagcactacgtgggccacggcaacgccatcaacgagctgaagttccaccccagagaccccaacctgctgctgagcgtgagcaaggaccacgccctgagactgtggaacatccagaccgacaccctggtggccatcttcggcggcgtggagggccacagagacgaggtgctgagcgccgactacgacctgctgggcgagaagatcatgagctgcggcatggaccacagcctgaagctgtggagaatcaacagcaagagaatgatgaacgccatcaaggagagctacgactacaaccccaacaagaccaacagacccttcatcagccagaagatccacttccccgacttcagcaccagagacatccacagaaactacgtggactgcgtgagatggctgggcgacctgatcctgagcaagagcggcagagccatcctgcacagccaccagcagtgcatgagagaccccgtgagccccaacctgagacagcacctgagctgcgagaacgccatcgtgtgctggaagcccggcaagatggaggacgacatcgacaagatcaagcccagcgagagcaacgtgaccatcctgggcagattcgactacagccagtgcgacatctggtacatgagattcagcatggacttctggcagaagatgctggccctgggcaaccaggtgggcaagctgtacgtgtgggacctggaggtggaggacccccacaaggccaagtgcaccaccctgacccaccacaagtgcggcgccgccatcagacagaccagcttcagcagagacagcagcatcctgatcgccgtgtgcgacgacgccagcatctggagatgggacagactgagatag

SEQ ID NO: 80319 - DNA, 471 bp, synthetic construct
  misc_feature 1..471: note = Description of Artificial Sequence: Synthetic coding sequence
  source 1..471: mol_type = other DNA
atgagcgagagagaggtgagcaccgcccccgccggcaccgacatgcccgccgccaagaagcagaagctgagcagcgacgagaacagcaaccccgacctgagcggcgacgagaacgacgacgccgtgagcatcgagagcggcaccaacaccgagagacccgacacccccaccaacacccccaacgcccccggcagaaagagctggggcaagggcaagtggaagagcaagaagtgcaagtacagcttcaagtgcgtgaacagcctgaaggaggaccacaaccagcccctgttcggcgtgcagttcaactggcacagcaaggagggcgaccccctggtgttcgccaccgtgggcagcaacagagtgaccctgtacgagtgccacagccagggcgagatcagactgctgcagagctacgtggacgccgacgccgacgagaacttctacacctgcgcctggaagtgctaccagtag

SEQ ID NO: 80320 - DNA, 660 bp, synthetic construct
  misc_feature 1..660: note = Description of Artificial Sequence: Synthetic coding sequence
  source 1..660: mol_type = other DNA
atggacaactacgccgacctgagcgacaccgagctgaccaccctgctgagaagatacaacatcccccacggccccgtggtggacctgaacagcaccagaggcgacgccgacatgtacgacctgcccaagaaggaggacgccctgctgtaccagagcaagggctacaacgacgactactacgaggagagctacttcaccaccagaacctacggcgagcccgagagcgccggccccagcagagccgtgagacagagcgtgaccagcttccccgacgccgacgccttccaccaccaggtgcacgacgacgacctgctgagcagcagcgaggaggagtgcaaggacagagagagacccatgtacggcagagacagcgcctaccagagcatcacccactacagacccgtgagcgccagcagaagcagcctggacctgagctactaccccaccagcagcagcaccagcttcatgagcagcagcagcagcagcagcagctggctgaccagaagagccatcagacccgagaacagagcccccggcgccggcctgggccaggacagacaggtgcccctgtggggccagctgctgctgttcctggtgttcgtgatcgtgctgttcttcatctaccacttcatgcaggccgaggagggcaaccccttctag

SEQ ID NO: 80321 - DNA, 765 bp, synthetic construct
  misc_feature 1..765: note = Description of Artificial Sequence: Synthetic coding sequence
  source 1..765: mol_type = other DNA
atggacaactacgccgacctgagcgacaccgagctgaccaccctgctgagaagatacaacatcccccacggccccgtggtgggcagcaccagaagactgtacgagaagaagatcttcgagtacgagacccagagaagaagactgagcccccccagcagcagcgccgccagcagctacagcttcagcgacctgaacagcaccagaggcgacgccgacatgtacgacctgcccaagaaggaggacgccctgctgtaccagagcaagggctacaacgacgactactacgaggagagctacttcaccaccagaacctacggcgagcccgagagcgccggccccagcagagccgtgagacagagcgtgaccagcttccccgacgccgacgccttccaccaccaggtgcacgacgacgacctgctgagcagcagcgaggaggagtgcaaggacagagagagacccatgtacggcagagacagcgcctaccagagcatcacccactacagacccgtgagcgccagcagaagcagcctggacctgagctactaccccaccagcagcagcaccagcttcatgagcagcagcagcagcagcagcagctggctgaccagaagagccatcagacccgagaacagagcccccggcgccggcctgggccaggacagacaggtgcccctgtggggccagctgctgctgttcctggtgttcgtgatcgtgctgttcttcatctaccacttcatgcaggccgaggagggcaaccccttctag

SEQ ID NO: 80322 - DNA, 441 bp, synthetic construct
  misc_feature 1..441: note = Description of Artificial Sequence: Synthetic coding sequence
  source 1..441: mol_type = other DNA
atgaccaccaacgccggccccctgcacccctactggccccagcacctgagactggacaacttcgtgcccaacgacagacccacctggcacatcctggccggcctgttcagcgtgaccggcgtgctggtggtgaccacctggctgctgagcggcagagccgccgtggtgcccctgggcacctggagaagactgagcctgtgctggttcgccgtgtgcggcttcatccacctggtgatcgagggctggttcgtgctgtactacgaggacctgctgggcgaccaggccttcctgagccagctgtggaaggagtacgccaagggcgacagcagatacatcctgggcgacaacttcaccgtgtgcatggagaccatcaccgcctgcctgtggggccccctgagcctgtgggtggtgatcgccttcctgagacagcaccccctgtag

SEQ ID NO: 80323 - DNA, 483 bp, synthetic construct
  misc_feature 1..483: note = Description of Artificial Sequence: Synthetic coding sequence
  source 1..483: mol_type = other DNA
atgaccaccaacgccggccccctgcacccctactggccccagcacctgagactggacaacttcgtgcccaacgacagacccacctggcacatcctggccggcctgttcagcgtgaccggcgtgctggtggtgaccacctggctgctgagcggcagagccgccgtggtgcccctgggcacctggagaagactgagcctgtgctggttcgccgtgtgcggcttcatccacctggtgatcgagggctggttcgtgctgtactacgaggacctgctgggcgaccaggccttcctgagccagctgtggaaggagtacgccaagggcgacagcagatacatcctgggcgacaacttcaccgtgtgcatggagaccatcaccgcctgcctgtggggccccctgagcctgtgggtggtgatcgccttcctgagacagcaccccctgagattcatcctgcagctggtggtgagcgtgggccagatctactag

SEQ ID NO: 80324 - DNA, 693 bp, synthetic construct
  misc_feature 1..693: note = Description of Artificial Sequence: Synthetic coding sequence
  source 1..693: mol_type = other DNA
atgaccaccaacgccggccccctgcacccctactggccccagcacctgagactggacaacttcgtgcccaacgacagacccacctggcacatcctggccggcctgttcagcgtgaccggcgtgctggtggtgaccacctggctgctgagcggcagagccgccgtggtgcccctgggcacctggagaagactgagcctgtgctggttcgccgtgtgcggcttcatccacctggtgatcgagggctggttcgtgctgtactacgaggacctgctgggcgaccaggccttcctgagccagctgtggaaggagtacgccaagggcgacagcagatacatcctgggcgacaacttcaccgtgtgcatggagaccatcaccgcctgcctgtggggccccctgagcctgtgggtggtgatcgccttcctgagacagcaccccctgagattcatcctgcagctggtggtgagcgtgggccagatctacggcgacgtgctgtacttcctgaccgagcacagagacggcttccagcacggcgagctgggccaccccctgtacttctggttctacttcgtgttcatgaacgccctgtggctggtgctgcccggcgtgctggtgctggacgccgtgaagcacctgacccacgcccagagcaccctggacgccaaggccaccaaggccaagagcaagaagaactag

SEQ ID NO: 80325 - DNA, 873 bp, synthetic construct
  misc_feature 1..873: note = Description of Artificial Sequence: Synthetic coding sequence
  source 1..873: mol_type = other DNA
atgtgcctggccggctgcacccccagaaaggccgccgcccccggcagaggcgccctgcccagagccagactgcccagaaccgcccccgccgccgccaccatgttccagcccgccgccaagagaggcttcaccatcgagagcctggtggccaaggacggcggcaccggcggcggcaccggcggcggcggcgccggcagccacctgctggccgccgccgccagcgaggagcccctgagacccaccgccctgaactacccccaccccagcgccgccgaggccgccttcgtgagcggcttccccgccgccgccgccgccggcgccggcagaagcctgtacggcggccccgagctggtgttccccgaggccatgaaccaccccgccctgaccgtgcaccccgcccaccagctgggcgccagccccctgcagcccccccacagcttcttcggcgcccagcacagagaccccctgcacttctacccctgggtgctgagaaacagattcttcggccacagattccaggccagcgacgtgccccaggacggcctgctgctgcacggccccttcgccagaaagcccaagagaatcagaaccgccttcagccccagccagctgctgagactggagagagccttcgagaagaaccactacgtggtgggcgccgagagaaagcagctggccggcagcctgagcctgagcgagacccaggtgaaggtgtggttccagaacagaagaaccaagtacaagagacagaagctggaggaggagggccccgagagcgagcagaagaagaagggcagccaccacatcaacagatggagaatcgccaccaagcaggccaacggcgaggacatcgacgtgaccagcaacgactag

SEQ ID NO: 80326 - DNA, 759 bp, synthetic construct
  misc_feature 1..759: note = Description of Artificial Sequence: Synthetic coding sequence
  source 1..759: mol_type = other DNA
atgttccagcccgcccccaagagatgcttcaccatcgagagcctggtggccaaggacagccccctgcccgccagcagaagcgaggaccccatcagacccgccgccctgagctacgccaacagcagccccatcaaccccttcctgaacggcttccacagcgccgccgccgccgccgccggcagaggcgtgtacagcaaccccgacctggtgttcgccgaggccgtgagccacccccccaaccccgccgtgcccgtgcaccccgtgccccccccccacgccctggccgcccaccccctgcccagcagccacagcccccaccccctgttcgccagccagcagagagaccccagcaccttctacccctggctgatccacagatacagatacctgggccacagattccagggcaacgacaccagccccgagagcttcctgctgcacaacgccctggccagaaagcccaagagaatcagaaccgccttcagccccagccagctgctgagactggagcacgccttcgagaagaaccactacgtggtgggcgccgagagaaagcagctggcccacagcctgagcctgaccgagacccaggtgaaggtgtggttccagaacagaagaaccaagttcaagagacagaagctggaggaggagggcagcgacagccagcagaagaagaagggcacccaccacatcaacagatggagaatcgccaccaagcaggccagccccgaggagatcgacgtgaccagcgacgactag

SEQ ID NO: 80327 - DNA, 510 bp, synthetic construct
  misc_feature 1..510: note = Description of Artificial Sequence: Synthetic coding sequence
  source 1..510: mol_type = other DNA
atgttccagcccgcccccaagagatgcttcaccatcgagagcctggtggccaaggacagccccctgcccgccagcagaagcgaggaccccatcagacccgccgccctgagctacgccaacagcagccccatcaaccccttcctgaacggcttccacagcgccgccgccgccgccgccggcagaggcgtgtacagcaaccccgacctggtgttcgccgaggccgtgagccacccccccaaccccgccgtgcccgtgcaccccgtgccccccccccacgccctggccgcccaccccctgcccagcagccacagcccccaccccctgttcgccagccagcagagagaccccagcaccttctacccctggctgatccacagatacagatacctgggccacagattccagggcaagagcatggtgagcgagcccaagaacaaggtgcagaaggccgaggccggcggcagaagactgagattcgccaccaaggagaagagagacgccccctactag

SEQ ID NO: 80328 - DNA, 957 bp, synthetic construct
  misc_feature 1..957: note = Description of Artificial Sequence: Synthetic coding sequence
  source 1..957: mol_type = other DNA
atggccatcaagagcatcgccagcagactgagaggcagcagaagattcctgagcggcttcgtggccggcgccgtggtgggcgccgccggcgccggcctggccgccctgcagttcttcagaagccagggcgccgagggcgccctgaccggcaagcagcccgacggcgacgccgacagaaagcactgcaagttcaagcccgaccccaacatcccccccaccttcagcgccttcaacgaggactacgtgggcagcggctggagcagaggccacatggcccccgccggcaacaacaagttcagcagcaaggccatggccgagaccttctacctgagcaacatcgtgccccaggacttcgacaacaacagcggctactggaacagaatcgagatgtactgcagagagctgaccgagagattcgaggacgtgtgggtggtgagcggccccctgaccctgccccagaccagaggcgacggcaagaagatcgtgagctaccaggtgatcggcgaggacaacgtggccgtgcccagccacctgtacaaggtgatcctggccagaagaagcagcgtgagcaccgagcccctggccctgggcgccttcgtggtgcccaacgaggccatcggcttccagccccagctgaccgagttccaggtgagcctgcaggacctggagaagctgagcggcctggtgttcttcccccacctggacagaaccagcgacatcagaaacatctgcagcgtggacacctgcaagctgctggacttccaggagttcaccctgtacctgagcaccagaaagatcgagggcgccagaagcgtgctgagactggagaagatcatggagaacctgaagaacgccgagatcgagcccgacgactacttcatgagcagatacgagaagaagctggaggagctgaaggccaaggagcagagcggcacccagatcagaaagcccagctag

SEQ ID NO: 80329 - DNA, 1107 bp, synthetic construct
  misc_feature 1..1107: note = Description of Artificial Sequence: Synthetic coding sequence
  source 1..1107: mol_type = other DNA
atggccatcaagagcatcgccagcagactgagaggcagcagaagattcctgagcggcttcgtggccggcgccgtggtgggcgccgccggcgccggcctggccgccctgcagttcttcagaagccagggcgccgagggcgccctgaccggcaagcagcccgacggcagcgccgagaaggccgtgctggagcagttcggcttccccctgaccggcaccgaggccagatgctacaccaaccacgccctgagctacgaccaggccaagagagtgcccagatgggtgctggagcacatcagcaagagcaagatcatgggcgacgccgacagaaagcactgcaagttcaagcccgaccccaacatcccccccaccttcagcgccttcaacgaggactacgtgggcagcggctggagcagaggccacatggcccccgccggcaacaacaagttcagcagcaaggccatggccgagaccttctacctgagcaacatcgtgccccaggacttcgacaacaacagcggctactggaacagaatcgagatgtactgcagagagctgaccgagagattcgaggacgtgtgggtggtgagcggccccctgaccctgccccagaccagaggcgacggcaagaagatcgtgagctaccaggtgatcggcgaggacaacgtggccgtgcccagccacctgtacaaggtgatcctggccagaagaagcagcgtgagcaccgagcccctggccctgggcgccttcgtggtgcccaacgaggccatcggcttccagccccagctgaccgagttccaggtgagcctgcaggacctggagaagctgagcggcctggtgttcttcccccacctggacagaaccagcgacatcagaaacatctgcagcgtggacacctgcaagctgctggacttccaggagttcaccctgtacctgagcaccagaaagatcgagggcgccagaagcgtgctgagactggagaagatcatggagaacctgaagaacgccgagatcgagcccgacgactacttcatgagcagatacgagaagaagctggaggagctgaaggccaaggagcagagcggcacccagatcagaaagcccagctag

SEQ ID NO: 80330 - DNA, 450 bp, synthetic construct
  misc_feature 1..450: note = Description of Artificial Sequence: Synthetic coding sequence
  source 1..450: mol_type = other DNA
atggcccccgccggcaacaacaagttcagcagcaaggccatggccgagaccttctacctgagcaacatcgtgccccaggacttcgacaacaacagcggctactggaacagaatcgagatgtactgcagagagctgaccgagagattcgaggacgtgtgggtggtgagcggccccctgaccctgccccagaccagaggcgacggcaagaagatcgtgagctaccaggtgatcggcgaggacaacgtggccgtgcccagccacctgtacaaggaccacgccggctgctgcgtggagagccccctgggcaccagaaccagcgaggaggccaccgccagaatccaggagagagacgacggcggcagcgaccagagaagcggcctggtggagctgggcatctacttcgagggcagagccaacagaatcagcggcagaatcggctgcagagtgtag

SEQ ID NO: 80331 - DNA, 819 bp, synthetic construct
  misc_feature 1..819: note = Description of Artificial Sequence: Synthetic coding sequence
  source 1..819: mol_type = other DNA
atgggctacttcctgaagctgtacgcctacgtgaacagccacagcctgttcgtgtgggtgtgcgacagaagctacaagagaagcttcagacccatgatcctgaacaagatcaaggagctgagcagaaaccagttcagcaccatgagccacctgagaaaggacagccagcccagcagccccggcgacgacgccatggacagaagcggcctgcccgacctgcagggcagattcgagctgagcggcaagaacagacagtaccccctggacgccctggagccccagcccagcatcggcgacatcaaggacatcaagaaggccgccaagagcatgctggaccccgcccacaagagccacttccaccccgtgacccccagcctggtgttcctgtgcttcatcttcgacggcctgcaccaggccctgctgagcgtgggcgtgagcaagagaagcaacaccgtggtgggcaacgagaacgaggagagaggcaccccctacgccagcagattcaaggacatgcccaacttcatcgccctggagaagagcagcgtgctgagacactgctgcgacctgctgatcggcatcgccgccggcagcagcgacaagatctgcaccagcagcctgcaggtgcagagaagattcaaggccatgatggccagcatcggcagactgagccacggcgagagcgccgacctgctgatcagctgcaacgccgagagcgccatcggctggatcagcagcagaccctgggtgggcgagctgatgttcaccctgctgttcggcgacttcgagagccccctgcacaagctgagaaagagcagctag

SEQ ID NO: 80332 - DNA, 894 bp, synthetic construct
  misc_feature 1..894: note = Description of Artificial Sequence: Synthetic coding sequence
  source 1..894: mol_type = other DNA
atgagagccctgagagccggcctgaccctggccagcggcgccggcctgggcgccgtggtggagggctggagaagaagaagagaggacgccagagccgcccccggcctgctgggcagactgcccgtgctgcccgtggccgccgccgccgagctgccccccgtgcccggcggccccagaggccccggcgagctggccaagtacggcctgcccggcctggcccagctgaagagcagagagagctacgtgctgtgctacgaccccagaaccagaggcgccctgtgggtggtggagcagctgagacccgagagactgagaggcgacggcgacagaagagagtgcgacttcagagaggacgacagcgtgcacgcctaccacagagccaccaacgccgactacagaggcagcggcttcgacagaggccacctggccgccgccgccaaccacagatggagccagaaggccatggacgacaccttctacctgagcaacgtggccccccaggtgccccacctgaaccagaacgcctggaacaacctggagaagtacagcagaagcctgaccagaagctaccagaacgtgtacgtgtgcaccggccccctgttcctgcccagaaccgaggccgacggcaagagctacgtgaagtaccaggtgatcggcaagaaccacgtggccgtgcccacccacttcttcaaggtgctgatcctggaggccgccggcggccagatcgagctgagaacctacgtgatgcccaacgcccccgtggacgaggccatccccctggagagattcctggtgcccatcgagagcatcgagagagccagcggcctgctgttcgtgcccaacatcctggccagagccggcagcctgaaggccatcaccgccggcagcaagtag

SEQ ID NO: 80333 - DNA, 2847 bp, synthetic construct
  misc_feature 1..2847: note = Description of Artificial Sequence: Synthetic coding sequence
  source 1..2847: mol_type = other DNA
atggtgttcctgcccctgaagtggagcctggccaccatgagcttcctgctgagcagcctgctggccctgctgaccgtgagcacccccagctggtgccagagcaccgaggccagccccaagagaagcgacggcacccccttcccctggaacaagatcagactgcccgagtacgtgatccccgtgcactacgacctgctgatccacgccaacctgaccaccctgaccttctggggcaccaccaaggtggagatcaccgccagccagcccaccagcaccatcatcctgcacagccaccacctgcagatcagcagagccaccctgagaaagggcgccggcgagagactgagcgaggagcccctgcaggtgctggagcaccccagacaggagcagatcgccctgctggcccccgagcccctgctggtgggcctgccctacaccgtggtgatccactacgccggcaacctgagcgagaccttccacggcttctacaagagcacctacagaaccaaggagggcgagctgagaatcctggccagcacccagttcgagcccaccgccgccagaatggccttcccctgcttcgacgagcccgccttcaaggccagcttcagcatcaagatcagaagagagcccagacacctggccatcagcaacatgcccctggtgaagagcgtgaccgtggccgagggcctgatcgaggaccacttcgacgtgaccgtgaagatgagcacctacctggtggccttcatcatcagcgacttcgagagcgtgagcaagatcaccaagagcggcgtgaaggtgagcgtgtacgccgtgcccgacaagatcaaccaggccgactacgccctggacgccgccgtgaccctgctggagttctacgaggactacttcagcatcccctaccccctgcccaagcaggacctggccgccatccccgacttccagagcggcgccatggagaactggggcctgaccacctacagagagagcgccctgctgttcgacgccgagaagagcagcgccagcagcaagctgggcatcaccatgaccgtggcccacgagctggcccaccagtggttcggcaacctggtgaccatggagtggtggaacgacctgtggctgaacgagggcttcgccaagttcatggagttcgtgagcgtgagcgtgacccaccccgagctgaaggtgggcgactacttcttcggcaagtgcttcgacgccatggaggtggacgccctgaacagcagccaccccgtgagcacccccgtggagaaccccgcccagatcagagagatgttcgacgacgtgagctacgacaagggcgcctgcatcctgaacatgctgagagagtacctgagcgccgacgccttcaagagcggcatcgtgcagtacctgcagaagcacagctacaagaacaccaagaacgaggacctgtgggacagcatggccagcatctgccccaccgacggcgtgaagggcatggacggcttctgcagcagaagccagcacagcagcagcagcagccactggcaccaggagggcgtggacgtgaagaccatgatgaacacctggaccctgcagaagggcttccccctgatcaccatcaccgtgagaggcagaaacgtgcacatgaagcaggagcactacatgaagggcagcgacggcgcccccgacaccggctacctgtggcacgtgcccctgaccttcatcaccagcaagagcgacatggtgcacagattcctgctgaagaccaagaccgacgtgctgatcctgcccgaggaggtggagtggatcaagttcaacgtgggcatgaacggctactacatcgtgcactacgaggacgacggctgggacagcctgaccggcctgctgaagggcacccacaccgccgtgagcagcaacgacagagccagcctgatcaacaacgccttccagctggtgagcatcggcaagctgagcatcgagaaggccctggacctgagcctgtacctgaagcacgagaccgagatcatgcccgtgttccagggcctgaacgagctgatccccatgtacaagctgatggagaagagagacatgaacgaggtggagacccagttcaaggccttcctgatcagactgctgagagacctgatcgacaagcagacctggaccgacgagggcagcgtgagcgagagaatgctgagaagccagctgctgctgctggcctgcgtgcacaactaccagccctgcgtgcagagagccgagggctacttcagaaagtggaaggagagcaacggcaacctgagcctgcccgtggacgtgaccctggccgtgttcgccgtgggcgcccagagcaccgagggctgggacttcctgtacagcaagtaccagttcagcctgagcagcaccgagaagagccagatcgagttcgccctgtgcagaacccagaacaaggagaagctgcagtggctgctggacgagagcttcaagggcgacaagatcaagacccaggagttcccccagatcctgaccctgatcggcagaaaccccgtgggctaccccctggcctggcagttcctgagaaagaactggaacaagctggtgcagaagttcgagctgggcagcagcagcatcgcccacatggtgatgggcaccaccaaccagttcagcaccagaaccagactggaggaggtgaagggcttcttcagcagcctgaaggagaacggcagccagctgagatgcgtgcagcagaccatcgagaccatcgaggagaacatcggctggatggacaagaacttcgacaagatcagagtgtggctgcagagcgagaagctggagcacgaccccgaggccgacgccaccggctag

SEQ ID NO: 80334 - DNA, 2826 bp, synthetic construct
  misc_feature 1..2826: note = Description of Artificial Sequence: Synthetic coding sequence
  source 1..2826: mol_type = other DNA
atggtgttcctgcccctgaagtggagcctggccaccatgagcttcctgctgagcagcctgctggccctgctgaccgtgagcacccccagctggtgccagagcaccgaggccagccccaagagaagcgacggcacccccttcccctggaacaagatcagactgcccgagtacgtgatccccgtgcactacgacctgctgatccacgccaacctgaccaccctgaccttctggggcaccaccaaggtggagatcaccgccagccagcccaccagcaccatcatcctgcacagccaccacctgcagatcagcagagccaccctgagaaagggcgccggcgagagactgagcgaggagcccctgcaggtgctggagcaccccagacaggagcagatcgccctgctggcccccgagcccctgctggtgggcctgccctacaccgtggtgatccactacgccggcaacctgagcgagaccttccacggcttctacaagagcacctacagaaccaaggagggcgagctgagaatcctggccagcacccagttcgagcccaccgccgccagaatggccttcccctgcttcgacgagcccgccttcaaggccagcttcagcatcaagatcagaagagagcccagacacctggccatcagcaacatgcccctggtgaagagcgtgaccgtggccgagggcctgatcgaggaccacttcgacgtgaccgtgaagatgagcacctacctggtggccttcatcatcagcgacttcgagagcgtgagcaagatcaccaagagcggcgtgaaggtgagcgtgtacgccgtgcccgacaagatcaaccaggccgactacgccctggacgccgccgtgaccctgctggagttctacgaggactacttcagcatcccctaccccctgcccaagcaggacctggccgccatccccgacttccagagcggcgccatggagaactggggcctgaccacctacagagagagcgccctgctgttcgacgccgagaagagcagcgccagcagcaagctgggcatcaccatgaccgtggcccacgagctggcccaccagtggttcggcaacctggtgaccatggagtggtggaacgacctgtggctgaacgagggcttcgccaagttcatggagttcgtgagcgtgagcgtgacccaccccgagctgaaggtgggcgactacttcttcggcaagtgcttcgacgccatggaggtggacgccctgaacagcagccaccccgtgagcacccccgtggagaaccccgcccagatcagagagatgttcgacgacgtgagctacgacaagggcgcctgcatcctgaacatgctgagagagtacctgagcgccgacgccttcaagagcggcatcgtgcagtacctgcagaagcacagctacaagaacaccaagaacgaggacctgtgggacagcatggccagcatctgccccaccgacggcgtgaagggcatggacggcttctgcagcagaagccagcacagcagcagcagcagccactggcaccaggagggcgtggacgtgaagaccatgatgaacacctggaccctgcagaagggcttccccctgatcaccatcaccgtgagaggcagaaacgtgcacatgaagcaggagcactacatgaagggcagcgacggcgcccccgacaccggctacctgtggcacgtgcccctgaccttcatcaccagcaagagcgacatggtgcacagattcctgctgaagaccaagaccgacgtgctgatcctgcccgaggaggtggagtggatcaagttcaacgtgggcatgaacggctactacatcgtgcactacgaggacgacggctgggacagcctgaccggcctgctgaagggcacccacaccgccgtgagcagcaacgacagagccagcctgatcaacaacgccttccagctggtgagcatcggcaagctgagcatcgagaaggccctggacctgagcctgtacctgaagcacgagaccgagatcatgcccgtgttccagggcctgaacgagctgatccccatgtacaagctgatggagaagagagacatgaacgaggtggagacccagttcaaggccttcctgatcagactgctgagagacctgatcgacaagcagacctggaccgacgagggcagcgtgagcgagagaatgctgagaagccagctgctgctgctggcctgcgtgcacaactaccagccctgcgtgcagagagccgagggctacttcagaaagtggaaggagagcaacggcaacctgagcctgcccgtggacgtgaccctggccgtgttcgccgtgggcgcccagagcaccgagggctgggacttcctgtacagcaagtaccagttcagcctgagcagcaccgagaagagccagatcgagttcgccctgtgcagaacccagaacaaggagaagctgcagtggctgctggacgagagcttcaagggcgacaagatcaagacccaggagttcccccagatcctgaccctgatcggcagaaaccccgtgggctaccccctggcctggcagttcctgagaaagaactggaacaagctggtgcagaagttcgagctgggcagcagcagcatcgcccacatggtgatgggcaccaccaaccagttcagcaccagaaccagactggaggaggtgaagggcttcttcagcagcctgaaggagaacggcagccagctgagatgcgtgcagcagaccatcgagaccatcgaggagaacatcggctggatggacaagaacttcgacaagatcagagtgtggctgcagagcgagaagctggagagaatgtag

SEQ ID NO: 80335 - DNA, 2826 bp, synthetic construct; identical to SEQ ID NO: 80334
  misc_feature 1..2826: note = Description of Artificial Sequence: Synthetic coding sequence
  source 1..2826: mol_type = other DNA

SEQ ID NO: 80336 - DNA, 390 bp, synthetic construct
  misc_feature 1..390: note = Description of Artificial Sequence: Synthetic coding sequence
  source 1..390: mol_type = other DNA
atggtgttcctgcccctgaagtggagcctggccaccatgagcttcctgctgagcagcctgctggccctgctgaccgtgagcacccccagctggtgccagagcaccgaggccagccccaagagaagcgacggcacccccttcccctggaacaagatcagactgcccgagtacgtgatccccgtgcactacgacctgctgatccacgccaacctgaccaccctgaccttctggggcaccaccaaggtggagatcaccgccagccagcccaccagcaccatcatcctgcacagccaccacctgcagatcagcagagccaccctgagaaagggcgccggcgagagactgagcgaggagcccctgcaggtgctggagcaccccagacaggagtag

SEQ ID NO: 80337 - DNA, 2748 bp, synthetic construct
  misc_feature 1..2748: note = Description of Artificial Sequence: Synthetic coding sequence
  source 1..2748: mol_type = other DNA
atgttccacagcagcgccatggtgaacagccacagaaagcccatgttcaacatccacagaggcttctactgcctgaccgccatcctgccccagatctgcatctgcagccagttcagcgtgcccagcagctaccacttcaccgaggaccccggcgccttccccgtggccaccaacggcgagagattcccctggcaggagctgagactgcccagcgtggtgatccccctgcactacgacctgttcgtgcaccccaacctgaccagcctggacttcgtggccagcgagaagatcgaggtgctggtgagcaacgccacccagttcatcatcctgcacagcaaggacctggagatcaccaacgccaccctgcagagcgaggaggacagcagatacatgaagcccggcaaggagctgaaggtgctgagctaccccgcccacgagcagatcgccctgctggtgcccgagaagctgaccccccacctgaagtactacgtggccatggacttccaggccaagctgggcgacggcttcgagggcttctacaagagcacctacagaaccctgggcggcgagaccagaatcctggccgtgaccgacttcgagcccacccaggccagaatggccttcccctgcttcgacgagcccctgttcaaggccaacttcagcatcaagatcagaagagagagcagacacatcgccctgagcaacatgcccaaggtgagcatctacgccagccccgacaagagaaaccagacccactacgccctgcaggccagcctgaagctgctggacttctacgagaagtacttcgacatctactaccccctgagcaagctggacctgatcgccatccccgacttcgcccccggcgccatggagaactggggcctgatcacctacagagagaccagcctgctgttcgaccccaagaccagcagcgccagcgacaagctgtgggtgaccagagtgatcgcccacgagctggcccaccagtggttcggcaacctggtgaccatggagtggtggaacgacatctggctgaaggagggcttcgccaagtacatggagctgatcgccgtgaacgccacctaccccgagctgcagttcgacgactacttcctgaacgtgtgcttcgaggtgatcaccaaggacagcctgaacagcagcagacccatcagcaagcccgccgagacccccacccagatccaggagatgttcgacgaggtgagctacaacaagggcgcctgcatcctgaacatgctgaaggacttcctgggcgaggagaagttccagaagggcatcatccagtacctgaagaagttcagctacagaaacgccaagaacgacgacctgtggagcagcctgagcaacagctgcctggagagcgacttcaccagcggcggcgtgtgccacagcgaccccaagatgaccagcaacatgctggccttcctgggcgagaacgccgaggtgaaggagatgatgaccacctggaccctgcagaagggcatccccctgctggtggtgaagcaggacggctgcagcctgagactgcagcaggagagattcctgcagggcgtgttccaggaggaccccgagtggagagccctgcaggagagatacctgtggcacatccccctgacctacagcaccagcagcagcaacgtgatccacagacacatcctgaagagcaagaccgacaccctggacctgcccgagaagaccagctgggtgaagttcaacgtggacagcaacggctactacatcgtgcactacgagggccacggctgggaccagctgatcacccagctgaaccagaaccacaccctgctgagacccaaggacagagtgggcctgatccacgacgtgttccagctggtgggcgccggcagactgaccctggacaaggccctggacatgacctactacctgcagcacgagaccagcagccccgccctgctggagggcctgagctacctggagagcttctaccacatgatggacagaagaaacatcagcgacatcagcgagaacctgaagagatacctgctgcagtacttcaagcccgtgatcgacagacagagctggagcgacaagggcagcgtgtgggacagaatgctgagaagcgccctgctgaagctggcctgcgacctgaaccacgccccctgcatccagaaggccgccgagctgttcagccagtggatggagagcagcggcaagctgaacatccccaccgacgtgctgaagatcgtgtacagcgtgggcgcccagaccaccgccggctggaactacctgctggagcagtacgagctgagcatgagcagcgccgagcagaacaagatcctgtacgccctgagcaccagcaagcaccaggagaagctgctgaagctgatcgagctgggcatggagggcaaggtgatcaagacccagaacctggccgccctgctgcacgccatcgccagaagacccaagggccagcagctggcctgggacttcgtgagagagaactggacccacctgctgaagaagttcgacctgggcagctacgacatcagaatgatcatcagcggcaccaccgcccacttcagcagcaaggacaagctgcaggaggtgaagctgttcttcgagagcctggaggcccagggcagccacctggacatcttccagaccgtgctggagaccatcaccaagaacatcaagtggctggagaagaacctgcccaccctgagaacctggctgatggtgaacacctag

SEQ ID NO: 80338 - DNA, 2883 bp, synthetic construct
  misc_feature 1..2883: note = Description of Artificial Sequence: Synthetic coding sequence
  source 1..2883: mol_type = other DNA
atgttccacagcagcgccatggtgaacagccacagaaagcccatgttcaacatccacagaggcttctactgcctgaccgccatcctgccccagatctgcatctgcagccagttcagcgtgcccagcagctaccacttcaccgaggaccccggcgccttccccgtggccaccaacggcgagagattcccctggcaggagctgagactgcccagcgtggtgatccccctgcactacgacctgttcgtgcaccccaacctgaccagcctggacttcgtggccagcgagaagatcgaggtgctggtgagcaacgccacccagttcatcatcctgcacagcaaggacctggagatcaccaacgccaccctgcagagcgaggaggacagcagatacatgaagcccggcaaggagctgaaggtgctgagctaccccgcccacgagcagatcgccctgctggtgcccgagaagctgaccccccacctgaagtactacgtggccatggacttccaggccaagctgggcgacggcttcgagggcttctacaagagcacctacagaaccctgggcggcgagaccagaatcctggccgtgaccgacttcgagcccacccaggccagaatggccttcccctgcttcgacgagcccctgttcaaggccaacttcagcatcaagatcagaagagagagcagacacatcgccctgagcaacatgcccaaggtgaagaccatcgagctggagggcggcctgctggaggaccacttcgagaccaccgtgaagatgagcacctacctggtggcctacatcgtgtgcgacttccacagcctgagcggcttcaccagcagcggcgtgaaggtgagcatctacgccagccccgacaagagaaaccagacccactacgccctgcaggccagcctgaagctgctggacttctacgagaagtacttcgacatctactaccccctgagcaagctggacctgatcgccatccccgacttcgcccccggcgccatggagaactggggcctgatcacctacagagagaccagcctgctgttcgaccccaagaccagcagcgccagcgacaagctgtgggtgaccagagtgatcgcccacgagctggcccaccagtggttcggcaacctggtgaccatggagtggtggaacgacatctggctgaaggagggcttcgccaagtacatggagctgatcgccgtgaacgccacctaccccgagctgcagttcgacgactacttcctgaacgtgtgcttcgaggtgatcaccaaggacagcctgaacagcagcagacccatcagcaagcccgccgagacccccacccagatccaggagatgttcgacgaggtgagctacaacaagggcgcctgcatcctgaacatgctgaaggacttcctgggcgaggagaagttccagaagggcatcatccagtacctgaagaagttcagctacagaaacgccaagaacgacgacctgtggagcagcctgagcaacagctgcctggagagcgacttcaccagcggcggcgtgtgccacagcgaccccaagatgaccagcaacatgctggccttcctgggcgagaacgccgaggtgaaggagatgatgaccacctggaccctgcagaagggcatccccctgctggtggtgaagcaggacggctgcagcctgagactgcagcaggagagattcctgcagggcgtgttccaggaggaccccgagtggagagccctgcaggagagatacctgtggcacatccccctgacctacagcaccagcagcagcaacgtgatccacagacacatcctgaagagcaagaccgacaccctggacctgcccgagaagaccagctgggtgaagttcaacgtggacagcaacggctactacatcgtgcactacgagggccacggctgggaccagctgatcacccagctgaaccagaaccacaccctgctgagacccaaggacagagtgggcctgatccacgacgtgttccagctggtgggcgccggcagactgaccctggacaaggccctggacatgacctactacctgcagcacgagaccagcagccccgccctgctggagggcctgagctacctggagagcttctaccacatgatggacagaagaaacatcagcgacatcagcgagaacctgaagagatacctgctgcagtacttcaagcccgtgatcgacagacagagctggagcgacaagggcagcgtgtgggacagaatgctgagaagcgccctgctgaagctggcctgcgacctgaaccacgccccctgcatccagaaggccgccgagctgttcagccagtggatggagagcagcggcaagctgaacatccccaccgacgtgctgaagatcgtgtacagcgtgggcgcccagaccaccgccggctggaactacctgctggagcagtacgagctgagcatgagcagcgccgagcagaacaagatcctgtacgccctgagcaccagcaagcaccaggagaagctgctgaagctgatcgagctgggcatggagggcaaggtgatcaagacccagaacctggccgccctgctgcacgccatcgccagaagacccaagggccagcagctggcctgggacttcgtgagagagaactggacccacctgctgaagaagttcgacctgggcagctacgacatcagaatgatcatcagcggcaccaccgcccacttcagcagcaaggacaagctgcaggaggtgaagctgttcttcgagagcctggaggcccagggcagccacctggacatcttccagaccgtgctggagaccatcaccaagaacatcaagtggctggagaagaacctgcccaccctgagaacctggctgatggtgaacacctag

SEQ ID NO: 80339 - DNA, 1053 bp, synthetic construct
  misc_feature 1..1053: note = Description of Artificial Sequence: Synthetic coding sequence
  source 1..1053: mol_type = other DNA
atgttccacagcagcgccatggtgaacagccacagaaagcccatgttcaacatccacagaggcttctactgcctgaccgccatcctgccccagatctgcatctgcagccagttcagcgtgcccagcagctaccacttcaccgaggaccccggcgccttccccgtggccaccaacggcgagagattcccctggcaggagctgagactgcccagcgtggtgatccccctgcactacgacctgttcgtgcaccccaacctgaccagcctggacttcgtggccagcgagaagatcgaggtgctggtgagcaacgccacccagttcatcatcctgcacagcaaggacctggagatcaccaacgccaccctgcagagcgaggaggacagcagatacatgaagcccggcaaggagctgaaggtgctgagctaccccgcccacgagcagatcgccctgctggtgcccgagaagctgaccccccacctgaagtactacgtggccatggacttccaggccaagctgggcgacggcttcgagggcttctacaagagcacctacagaaccctgggcggcgagaccagaatcctggccgtgaccgacttcgagcccacccaggccagaatggccttcccctgcttcgacgagcccctgttcaaggccaacttcagcatcaagatcagaagagagagcagacacatcgccctgagcaacatgcccaaggtgaagaccatcgagctggagggcggcctgctggaggaccacttcgagaccaccgtgaagatgagcacctacctggtggcctacatcgtgtgcgacttccacagcctgagcggcttcaccagcagcggcgtgaaggtgagcatctacgccagccccgacaagagaaaccagacccactacgccctgcaggccagcctgaagctgctggacttctacgagaagtacttcgacatctactaccccctgagcaagctgggcatgttcaagttccacatcatcgtgttcatcttcgcccacaagacctgcttcgacctgttccccctgagcctgagcatgtag

SEQ ID NO: 80340 - DNA, 2085 bp, synthetic construct
  misc_feature 1..2085: note = Description of Artificial Sequence: Synthetic coding sequence
  source 1..2085: mol_type = other DNA
atgttccacagcagcgccatggtgaacagccacagaaagcccatgttcaacatccacagaggcttctactgcctgaccgccatcctgccccagatctgcatctgcagccagttcagcgtgcccagcagctaccacttcaccgaggaccccggcgccttccccgtggccaccaacggcgagagattcccctggcaggagctgagactgcccagcgtggtgatccccctgcactacgacctgttcgtgcaccccaacctgaccagcctggacttcgtggccagcgagaagatcgaggtgctggtgagcaacgccacccagttcatcatcctgcacagcaaggacctggagatcaccaacgccaccctgcagagcgaggaggacagcagatacatgaagcccggcaaggagctgaaggtgctgagctaccccgcccacgagcagatcgccctgctggtgcccgagaagctgaccccccacctgaagtactacgtggccatggacttccaggccaagctgggcgacggcttcgagggcttctacaagagcacctacagaaccctgggcggcgagaccagaatcctggccgtgaccgacttcgagcccacccaggccagaatggccttcccctgcttcgacgagcccctgttcaaggccaacttcagcatcaagatcagaagagagagcagacacatcgccctgagcaacatgcccaaggtgaagaccatcgagctggagggcggcctgctggaggaccacttcgagaccaccgtgaagatgagcacctacctggtggcctacatcgtgtgcgacttccacagcctgagcggcttcaccagcagcggcgtgaaggtgagcatctacgccagccccgacaagagaaaccagacccactacgccctgcaggccagcctgaagctgctggacttctacgagaagtacttcgacatctactaccccctgagcaagctggacctgatcgccatccccgacttcgcccccggcgccatggagaactggggcctgatcacctacagagagaccagcctgctgttcgaccccaagaccagcagcgccagcgacaagctgtgggtgaccagagtgatcgcccacgagctggcccaccagtggttcggcaacctggtgaccatggagtggtggaacgacatctggctgaaggagggcttcgccaagtacatggagctgatcgccgtgaacgccacctaccccgagctgcagttcgacgactacttcctgaacgtgtgcttcgaggtgatcaccaaggacagcctgaacagcagcagacccatcagcaagcccgccgagacccccacccagatccaggagatgttcgacgaggtgagctacaacaagggcgcctgcatcctgaacatgctgaaggacttcctgggcgaggagaagttccagaagggcatcatccagtacctgaagaagttcagctacagaaacgccaagaacgacgacctgtggagcagcctgagcaacagctgcctggagagcgacttcaccagcggcggcgtgtgccacagcgaccccaagatgaccagcaacatgctggccttcctgggcgagaacgccgaggtgaaggagatgatgaccacctggaccctgcagaagggcatccccctgctggtggtgaagcaggacggctgcagcctgagactgcagcaggagagattcctgcagggcgtgttccaggaggaccccgagtggagagccctgcaggagagatacctgtggcacatccccctgacctacagcaccagcagcagcaacgtgatccacagacacatcctgaagagcaagaccgacaccctggacctgcccgagaagaccagctgggtgaagttcaacgtggacagcaacggctactacatcgtgcactacgagggccacggctgggaccagctgatcacccagctgaaccagaaccacaccctgctgagacccaaggacagagtgggcctgatccacgacgtgttccagctggtgggcgccggcagactgaccctggacaaggccctggacatgacctactacctgcagcacgagaccagcagcccctag

SEQ ID NO: 80341 - DNA, 1452 bp, synthetic construct
  misc_feature 1..1452: note = Description of Artificial Sequence: Synthetic coding sequence
  source 1..1452: mol_type = other DNA
atggaggagggcggcggcggcgtgagaagcctggtgcccggcggccccgtgctgctggtgctgtgcggcctgctggaggccagcggcggcggcagagccctgccccagctgagcgacgacatccccttcagagtgaactggcccggcaccgagttcagcctgcccaccaccggcgtgctgtacaaggaggacaactacgtgatcatgaccaccgcccacaaggagaagtacaagtgcatcctgcccctggtgaccagcggcgacgaggaggaggagaaggactacaagggccccaaccccagagagctgctggagcccctgttcaagcagagcagctgcagctacagaatcgagagctactggacctacgaggtgtgccacggcaagcacatcagacagtaccacgaggagaaggagaccggccagaagatcaacatccacgagtactacctgggcaacatgctggccaagaacctgctgttcgagaaggagagagaggccgaggagaaggagaagagcaacgagatccccaccaagaacatcgagggccagatgaccccctactaccccgtgggcatgggcaacggcaccccctgcagcctgaagcagaacagacccagaagcagcaccgtgatgtacatctgccaccccgagagcaagcacgagatcctgagcgtggccgaggtgaccacctgcgagtacgaggtggtgatcctgacccccctgctgtgcagccaccccaagtacagattcagagccagccccgtgaacgacatcttctgccagagcctgcccggcagccccttcaagcccctgaccctgagacagctggagcagcaggaggagatcctgagagtgcccttcagaagaaacaaggaggaggacctgcagagcaccaaggaggagagattccccgccatccacaagagcatcgccatcggcagccagcccgtgctgaccgtgggcaccacccacatcagcaagctgaccgacgaccagctgatcaaggagttcctgagcggcagctactgcttcagaggcggcgtgggctggtggaagtacgagttctgctacggcaagcacgtgcaccagtaccacgaggacaaggacagcggcaagaccagcgtggtggtgggcacctggaaccaggaggagcacatcgagtgggccaagaagaacaccgccagagcctaccacctgcaggacgacggcacccagaccgtgagaatggtgagccacttctacggcaacggcgacatctgcgacatcaccgacaagcccagacaggtgaccgtgaagctgaagtgcaaggagagcgacagcccccacgccgtgaccgtgtacatgctggagccccacagctgccagtacatcctgggcgtggagagccccgtgatctgcaagatcctggacaccgccgacgagaacggcctgctgagcctgcccaactag

SEQ ID NO: 80342 - DNA, 1290 bp, synthetic construct
  misc_feature 1..1290: note = Description of Artificial Sequence: Synthetic coding sequence
  source 1..1290: mol_type = other DNA
atggaggagggcggcggcggcgtgagaagcctggtgcccggcggccccgtgctgctggtgctgtgcggcctgctggaggccagcggcggcggcagagccctgccccagctgagcgacgacatccccttcagagtgaactggcccggcaccgagttcagcctgcccaccaccggcgtgctgtacaaggaggacaactacgtgatcatgaccaccgcccacaaggagaagtacaagtgcatcctgcccctggtgaccagcggcgacgaggaggaggagaaggactacaagggccccaaccccagagagctgctggagcccctgttcaagcagagcagctgcagctacagaatcgagagctactggacctacgaggtgtgccacggcaagcacatcagacagtaccacgaggagaaggagaccggccagaagatcaacatccacgagtactacctgggcaacatgctggccaagaacctgctgttcgagaaggagagagaggccgaggagaaggagaagagcaacgagatccccaccaagaacatcgagggccagatgaccccctactaccccgtgggcatgggcaacggcaccccctgcagcctgaagcagaacagacccagaagcagcaccgtgatgtacatctgccaccccgagagcaagcacgagatcctgagcgtggccgaggtgaccacctgcgagtacgaggtggtgatcctgacccccctgctgtgcagccaccccaagtacagattcagagccagccccgtgaacgacatcttctgccagagcctgcccggcagccccttcaagcccctgaccctgagacagctggagcagcaggaggagatcctgagagtgcccttcagaagaaacaaggagggcgtgggctggtggaagtacgagttctgctacggcaagcacgtgcaccagtaccacgaggacaaggacagcggcaagaccagcgtggtggtgggcacctggaaccaggaggagcacatcgagtgggccaagaagaacaccgccagagcctaccacctgcaggacgacggcacccagaccgtgagaatggtgagccacttctacggcaacggcgacatctgcgacatcaccgacaagcccagacaggtgaccgtgaagctgaagtgcaaggagagcgacagcccccacgccgtgaccgtgtacatgctggagccccacagctgccagtacatcctgggcgtggagagccccgtgatctgcaagatcctggacaccgccgacgagaacggcctgctgagcctgcccaactag

SEQ ID NO: 80343 - DNA, 1374 bp, synthetic construct
  misc_feature 1..1374: note = Description of Artificial Sequence: Synthetic coding sequence
  source 1..1374: mol_type = other DNA
atggaggagggcggcggcggcgtgagaagcctggtgcccggcggccccgtgctgctggtgctgtgcggcctgctggaggccagcggcggcggcagagccctgccccagctgagcgacgacatccccttcagagtgaactggcccggcaccgagttcagcctgcccaccaccggcgtgctgtacaaggaggacaactacgtgatcatgaccaccgcccacaaggagaagtacaagtgcatcctgcccctggtgaccagcggcgacgaggaggaggagaaggactacaagggccccaaccccagagagctgctggagcccctgttcaagcagagcagctgcagctacagaatcgagagctactggacctacgaggtgtgccacggcaagcacatcagacagtaccacgaggagaaggagaccggccagaagatcaacatccacgagtactacctgggcaacatgctggccaagaacctgctgttcgagaaggagagagaggccgaggagaaggagaagagcaacgagatccccaccaagaacatcgagggccagatgaccccctactaccccgtgggcatgggcaacggcaccccctgcagcctgaagcagaacagacccagaagcagcaccgtgatgtacatctgccaccccgagagcaagcacgagatcctgagcgtggccgaggtgaccacctgcgagtacgaggtggtgatcctgacccccctgctgtgcagccaccccaagtacagattcagagccagccccgtgaacgacatcttctgccagagcctgcccggcagccccttcaagcccctgaccctgagacagctggagcagcaggaggagatcctgagagtgcccttcagaagaaacaaggaggaggacctgcagagcaccaaggaggagagattccccgccatccacaagagcatcgccatcggcagccagcccgtgctgaccgtgggcaccacccacatcagcaagctgaccgacgaccagctgatcaaggagttcctgagcggcagctactgcttcagaggcggcgtgggctggtggaagtacgagttctgctacggcaagcacgtgcaccagtaccacgaggacaaggacagcggcaagaccagcgtggtggtgggcacctggaaccaggaggagcacatcgagtgggccaagaagaacaccgccagagcctaccacctgcaggacgacggcacccagaccgtgagatgcaaggagagcgacagcccccacgccgtgaccgtgtacatgctggagccccacagctgccagtacatcctgggcgtggagagccccgtgatctgcaagatcctggacaccgccgacgagaacggcctgctgagcctgcccaactag

SEQ ID NO: 80344 - DNA, 2715 bp, synthetic construct
  misc_feature 1..2715: note = Description of Artificial Sequence: Synthetic coding sequence
  source 1..2715: mol_type = other DNA
atggagtggggcagcgagagcgccgccgtgagaagacacagagtgggcgtggagagaagagagggcgccgccgccgcccccccccccgagagagaggccagagcccaggagcccctggtggacggctgcagcggcggcggcagaaccagaaagagaagccccggcggcagcggcggcgccagcagaggcgccggcaccggcctgagcgaggtgagagccgccctgggcctggccctgtacctgatcgccctgagaaccctggtgcagctgagcctgcagcagctggtgctgagaggcgccgccggccacagaggcgagttcgacgccctgcaggccagagactacctggagcacatcaccagcatcggccccagaaccaccggcagccccgagaacgagatcctgaccgtgcactacctgctggagcagatcaagctgatcgaggtgcagagcaacagcctgcacaagatcagcgtggacgtgcagagacccaccggcagcttcagcatcgacttcctgggcggcttcaccagctactacgacaacatcaccaacgtggtggtgaagctggagcccagagacggcgcccagcacgccgtgctggccaactgccacttcgacagcgtggccaacagccccggcgccagcgacgacgccgtgagctgcagcgtgatgctggaggtgctgagagtgctgagcaccagcagcgaggccctgcaccacgccgtgatcttcctgttcaacggcgccgaggagaacgtgctgcaggccagccacggcttcatcacccagcacccctgggccagcctgatcagagccttcatcaacctggaggccgccggcgtgggcggcaaggagctggtgttccagaccggccccgagaacccctggctggtgcaggcctacgtgagcgccgccaagcaccccttcgccagcgtggtggcccaggaggtgttccagagcggcatcatccccagcgacaccgacttcagaatctacagagacttcggcaacatccccggcatcgacctggccttcatcgagaacggctacatctaccacaccaagtacgacaccgccgacagaatcctgaccgacagcatccagagagccggcgacaacatcctggccgtgctgaagcacctggccaccagcgacatgctggccgccgccagcaagtacagacacggcaacatggtgttcttcgacgtgctgggcctgttcgtgatcgcctaccccagcagaatcggcagcatcatcaactacatggtggtgatgggcgtggtgctgtacctgggcaagaagttcctgcagcccaagcacaagaccggcaactacaagaaggacttcctgtgcggcctgggcatcaccctgatcagctggttcaccagcctggtgaccgtgctgatcatcgccgtgttcatcagcctgatcggccagagcctgagctggtacaaccacttctacgtgagcgtgtgcctgtacggcaccgccaccgtggccaagatcatcctgatccacaccctggccaagagattctactacatgaacgccagcgcccagtacctgggcgaggtgttcttcgacatcagcctgttcgtgcactgctgcttcctggtgaccctgacctaccagggcctgtgcagcgccttcatcagcgccgtgtgggtggccttccccctgctgaccaagctgtgcgtgcacaaggacttcaagcagcacggcgcccagggcaagttcatcgccttctacctgctgggcatgttcatcccctacctgtacgccctgtacctgatctgggccgtgttcgagatgttcacccccatcctgggcagaagcggcagcgagatcccccccgacgtggtgctggccagcatcctggccggctgcaccatgatcctgagcagctacttcatcaacttcatctacctggccaagagcaccaagaagaccatgctgaccctgaccctggtgtgcgccatcaccttcctgctggtgtgcagcggcaccttcttcccctacagcagcaaccccgccaaccccaagcccaagagagtgttcctgcagcacatgaccagaaccttccacgacctggagggcaacgccgtgaagagagacagcggcatctggatcaacggcttcgactacaccggcatcagccacatcaccccccacatccccgagatcaacgacagcatcagagcccactgcgaggagaacgcccccctgtgcggcttcccctggtacctgcccgtgcacttcctgatcagaaagaactggtacctgcccgcccccgaggtgagccccagaaaccccccccacttcagactgatcagcaaggagcagaccccctgggacagcatcaagctgaccttcgaggccaccggccccagccacatgagcttctacgtgagagcccacaagggcagcaccctgagccagtggagcctgggcaacggcacccccgtgaccagcaagggcggcgactacttcgtgttctacagccacggcctgcaggccagcgcctggcagttctggatcgaggtgcaggtgagcgaggagcaccccgagggcatggtgaccgtggccatcgccgcccactacctgagcggcgaggacaagagaagcccccagctggacgccctgaaggagaagttccccgactggaccttccccagcgcctgggtgtgcacctacgacctgttcgtgttctag

SEQ ID NO: 80345 - DNA, 1056 bp, synthetic construct
  misc_feature 1..1056: note = Description of Artificial Sequence: Synthetic coding sequence
  source 1..1056: mol_type = other DNA
atgctggaggtgctgagagtgctgagcaccagcagcgaggccctgcaccacgccgtgatcttcctgttcaacggcgccgaggagaacgtgctgcaggccagccacggcttcatcacccagcacccctgggccagcctgatcagagccttcatcaacctggaggccgccggcgtgggcggcaaggagctggtgttccagaccggccccgagaacccctggctggtgcaggcctacgtgagcgccgccaagcaccccttcgccagcgtggtggcccaggaggtgttccagagcggcatcatccccagcgacaccgacttcagaatctacagagacttcggcaacatccccggcatcgacctggccttcatcgagaacggctacatctaccacaccaagtacgacaccgccgacagaatcctgaccgacagcatccagagagccggcgacaacatcctggccgtgctgaagcacctggccaccagcgacatgctggccgccgccagcaagtacagacacggcaacatggtgttcttcgacgtgctgggcctgttcgtgatcgcctaccccagcagaatcggcagcatcatcaactacatggtggtgatgggcgtggtgctgtacctgggcaagaagttcctgcagcccaagcacaagaccggcaactacaagaaggacttcctgtgcggcctgggcatcaccctgatcagctggttcaccagcctggtgaccgtgctgatcatcgccgtgttcatcagcctgatcggccagagcctgagctggtacaaccacttctacgtgagcgtgtgcctgtacggcaccgccaccgtggccaagatcatcctgatccacaccctggccaagagattctactacatgaacgccagcgcccagtacctgggcgaggtgttcttcgacatcagcctgttcgtgcactgctgcttcctggtgaccctgacctaccagggcctgtgcagcgccttcatcagcgccgtgtgggtggccttccccctgctgaccaagctgtgcgtgcacaaggacttcaagcagcacgactag

SEQ ID NO: 80346 - DNA, 2715 bp, synthetic construct; identical to SEQ ID NO: 80344
  misc_feature 1..2715: note = Description of Artificial Sequence: Synthetic coding sequence
  source 1..2715: mol_type = other DNA

SEQ ID NO: 80347 - DNA, 1260 bp, synthetic construct
  misc_feature 1..1260: note = Description of Artificial Sequence: Synthetic coding sequence
  source 1..1260: mol_type = other DNA
atggtggtgatgggcgtggtgctgtacctgggcaagaagttcctgcagcccaagcacaagaccggcaactacaagaaggacttcctgtgcggcctgggcatcaccctgatcagctggttcaccagcctggtgaccgtgctgatcatcgccgtgttcatcagcctgatcggccagagcctgagctggtacaaccacttctacgtgagcgtgtgcctgtacggcaccgccaccgtggccaagatcatcctgatccacaccctggccaagagattctactacatgaacgccagcgcccagtacctgggcgaggtgttcttcgacatcagcctgttcgtgcactgctgcttcctggtgaccctgacctaccagggcctgtgcagcgccttcatcagcgccgtgtgggtggccttccccctgctgaccaagctgtgcgtgcacaaggacttcaagcagcacggcgcccagggcaagttcatcgccttctacctgctgggcatgttcatcccctacctgtacgccctgtacctgatctgggccgtgttcgagatgttcacccccatcctgggcagaagcggcagcgagatcccccccgacgtggtgctggccagcatcctggccggctgcaccatgatcctgagcagctacttcatcaacttcatctacctggccaagagcaccaagaagaccatgctgaccctgaccctggtgtgcgccatcaccttcctgctggtgtgcagcggcaccttcttcccctacagcagcaaccccgccaaccccaagcccaagagagtgttcctgcagcacatgaccagaaccttccacgacctggagggcaacgccgtgaagagagacagcggcatctggatcaacggcttcgactacaccggcatcagccacatcaccccccacatccccgagatcaacgacagcatcagagcccactgcgaggagaacgcccccctgtgcggcttcccctggtacctgcccgtgcacttcctgatcagaaagaactggtacctgcccgcccccgaggtgagccccagaaaccccccccacttcagactgatcagcaaggagcagaccccctgggacagcatcaagctgaccttcgaggccaccgcctgcctgcccatcctgcagatcctggacctgcccgccagcaccatcatgaccaagccctacgtgctgctgtgcagcagcccccagagagtgaacaccttcagcgtggtgagctggcagtggcaccccagccacaagtag

SEQ ID NO: 80348 - DNA, 786 bp, synthetic construct
  misc_feature 1..786: note = Description of Artificial Sequence: Synthetic coding sequence
  source 1..786: mol_type = other DNA
atggccgccgccgtgcccagagccgccttcctgagccccctgctgcccctgctgctgggcttcctgctgctgagcgccccccacggcggcagcggcctgcacaccaagggcgccctgcccctggacaccgtgaccttctacaaggtgatccccaagagcaagttcgtgctggtgaagttcgacacccagtacccctacggcgagaagcaggacgagttcaagagactggccgagaacagcgccagcagcgacgacctgctggtggccgaggtgggcatcagcgactacggcgacaagctgaacatggagctgagcgagaagtacaagctggacaaggagagctaccccgtgttctacctgttcagagacggcgacttcgagaaccccgtgccctacaccggcgccgtgaaggtgggcgccatccagagatggctgaagggccagggcgtgtacctgggcatgcccggctgcctgcccgtgtacgacgccctggccggcgagttcatcagagccagcggcgtggaggccagacaggccctgctgaagcagggccaggacaacctgagcagcgtgaaggagacccagaagaagtgggccgagcagtacctgaagatcatgggcaagatcctggaccagggcgaggacttccccgccagcgagatgaccagaatcgccagactgatcgagaagaacaagatgagcgacggcaagaaggaggagctgcagaagagcctgaacatcctgaccgccttccagaagaagggcgccgagaaggaggagctgtag

SEQ ID NO: 80349 - DNA, 162 bp, synthetic construct
  misc_feature 1..162: note = Description of Artificial Sequence: Synthetic coding sequence
  source 1..162: mol_type = other DNA
atggccgccgccgtgcccagagccgccttcctgagccccctgctgcccctgctgctgggcttcctgctgctgagcgccccccacggcggcagcggcctgcacaccaagggcgccctgcccctggacaccgtgaccttctacaagatcatggtgaccagctag

SEQ ID NO: 80350 - DNA, 2925 bp, synthetic construct
  misc_feature 1..2925: note = Description of Artificial Sequence: Synthetic coding sequence
  source 1..2925: mol_type = other DNA
atgagaagagccggcatcggcgaggacagcagactgggcctgcaggcccagcccggcgccgagcccagccccggcagagccggcaccgagagaagcctgggcggcacccagggccccggccagccctgcagctgccccggcgccatggccagcgccgtgagaggcagcagaccctggcccagactgggcctgcagctgcagttcgccgccctgctgctgggcaccctgagcccccaggtgcacaccctgagacccgagaacctgctgctggtgagcaccctggacggcagcctgcacgccctgagcaagcagaccggcgacctgaagtggaccctgagagacgaccccgtgatcgagggccccatgtacgtgaccgagatggccttcctgagcgaccccgccgacggcagcctgtacatcctgggcacccagaagcagcagggcctgatgaagctgcccttcaccatccccgagctggtgcacgccagcccctgcagaagcagcgacggcgtgttctacaccggcagaaagcaggacgcctggttcgtggtggaccccgagagcggcgagacccagatgaccctgaccaccgagggccccagcacccccagactgtacatcggcagaacccagtacaccgtgaccatgcacgaccccagagcccccgccctgagatggaacaccacctacagaagatacagcgccccccccatggacggcagccccggcaagtacatgagccacctggccagctgcggcatgggcctgctgctgaccgtggaccccggcagcggcaccgtgctgtggacccaggacctgggcgtgcccgtgatgggcgtgtacacctggcaccaggacggcctgagacagctgccccacctgaccctggccagagacaccctgcacttcctggccctgagatggggccacatcagactgcccgccagcggccccagagacaccgccaccctgttcagcaccctggacacccagctgctgatgaccctgtacgtgggcaaggacgagaccggcttctacgtgagcaaggccctggtgcacaccggcgtggccctggtgcccagaggcctgaccctggcccccgccgacggccccaccaccgacgaggtgaccctgcaggtgagcggcgagagagagggcagccccagcaccgccgtgagataccccagcggcagcgtggccctgcccagccagtggctgctgatcggccaccacgagctgccccccgtgctgcacaccaccatgctgagagtgcaccccaccctgggcagcggcaccgccgagaccagaccccccgagaacacccaggcccccgccttcttcctggagctgctgagcctgagcagagagaagctgtgggacagcgagctgcaccccgaggagaagacccccgacagctacctgggcctgggcccccaggacctgctggccgccagcctgaccgccgtgctgctgggcggctggatcctgttcgtgatgagacagcagcagccccaggtggtggagaagcagcaggagacccccctggcccccgccgacttcgcccacatcagccaggacgcccagagcctgcacagcggcgccagcagaagaagccagaagagactgcagagccccagcaagcaggcccagcccctggacgaccccgaggccgagcagctgaccgtggtgggcaagatcagcttcaaccccaaggacgtgctgggcagaggcgccggcggcaccttcgtgttcagaggccagttcgagggcagagccgtggccgtgaagagactgctgagagagtgcttcggcctggtgagaagagaggtgcagctgctgcaggagagcgacagacaccccaacgtgctgagatacttctgcaccgagagaggcccccagttccactacatcgccctggagctgtgcagagccagcctgcaggagtacgtggagaaccccgacctggacagaggcggcctggagcccgaggtggtgctgcagcagctgatgagcggcctggcccacctgcacagcctgcacatcgtgcacagagacctgaagcccggcaacatcctgatcaccggccccgacagccagggcctgggcagagtggtgctgagcgacttcggcctgtgcaagaagctgcccgccggcagatgcagcttcagcctgcacagcggcatccccggcaccgagggctggatggcccccgagctgctgcagctgctgccccccgacagccccaccagcgccgtggacatcttcagcgccggctgcgtgttctactacgtgctgagcggcggcagccaccccttcggcgacagcctgtacagacaggccaacatcctgaccggcgccccctgcctggcccacctggaggaggaggtgcacgacaaggtggtggccagagacctggtgggcgccatgctgagccccctgccccagcccagacccagcgccccccaggtgctggcccaccccttcttctggagcagagccaagcagctgcagttcttccaggacgtgagcgactggctggagaaggagagcgagcaggagcccctggtgagagccctggaggccggcggctgcgccgtggtgagagacaactggcacgagcacatcagcatgcccctgcagaccgacctgagaaagttcagaagctacaagggcaccagcgtgagagacctgctgagagccgtgagaaacaagaagcaccactacagagagctgcccgtggaggtgagacaggccctgggccaggtgcccgacggcttcgtgcagtacttcaccaacagattccccagactgctgctgcacacccacagagccatgagaagctgcgccagcgagagcctgttcctgccctactacccccccgacagcgaggccagaagaccctgccccggcgccaccggcagatag

SEQ ID NO: 80351 - DNA, 2625 bp, synthetic construct
  misc_feature 1..2625: note = Description of Artificial Sequence: Synthetic coding sequence
  source 1..2625: mol_type = other DNA
atggccagcgccgtgagaggcagcagaccctggcccagactgggcctgcagctgcagttcgccgccctgctgctgggcaccctgagcccccaggtgcacaccctgagacccgagaacctgctgctggtgagcaccctggacggcagcctgcacgccctgagcaagcagaccggcgacctgaagtggaccctgagagacgaccccgtgatcgagggccccatgtacgtgaccgagatggccttcctgagcgaccccgccgacggcagcctgtacatcctgggcacccagaagcagcagggcctgatgaagctgcccttcaccatccccgagctggtgcacgccagcccctgcagaagcagcgacggcgtgttctacaccggcagaaagcaggacgcctggttcgtggtggaccccgagagcggcgagacccagatgaccctgaccaccgagggccccagcacccccagactgtacatcggcagaacccagtacaccgtgaccatgcacgaccccagagcccccgccctgagatggaacaccacctacagaagatacagcgccccccccatggacggcagccccggcaagtacatgagccacctggccagctgcggcatgggcctgctgctgaccgtggaccccggcagcggcaccgtgctgtggacccaggacctgggcgtgcccgtgatgggcgtgtacacctggcaccaggacggcctgagacagctgccccacctgaccctggccagagacaccctgcacttcctggccctgagatggggccacatcagactgcccgccagcggccccagagacaccgccaccctgttcagcaccctggacacccagctgctgatgaccctgtacgtgggcaaggacgagaccggcttctacgtgagcaaggccctggtgcacaccggcgtggccctggtgcccagaggcctgaccctggcccccgccgacggccccaccaccgacgaggtgaccctgcaggtgagcggcgagagagagggcagccccagcaccgccgtgagataccccagcggcagcgtggccctgcccagccagtggctgctgatcggccaccacgagctgccccccgtgctgcacaccaccatgctgagagtgcaccccaccctgggcagcggcaccgccgagaccagaccccccgagaacacccaggcccccgccttcttcctggagcagcagccccaggtggtggagaagcagcaggagacccccctggcccccgccgacttcgcccacatcagccaggacgcccagagcctgcacagcggcgccagcagaagaagccagaagagactgcagagccccagcaagcaggcccagcccctggacgaccccgaggccgagcagctgaccgtggtgggcaagatcagcttcaaccccaaggacgtgctgggcagaggcgccggcggcaccttcgtgttcagaggccagttcgagggcagagccgtggccgtgaagagactgctgagagagtgcttcggcctggtgagaagagaggtgcagctgctgcaggagagcgacagacaccccaacgtgctgagatacttctgcaccgagagaggcccccagttccactacatcgccctggagctgtgcagagccagcctgcaggagtacgtggagaaccccgacctggacagaggcggcctggagcccgaggtggtgctgcagcagctgatgagcggcctggcccacctgcacagcctgcacatcgtgcacagagacctgaagcccggcaacatcctgatcaccggccccgacagccagggcctgggcagagtggtgctgagcgacttcggcctgtgcaagaagctgcccgccggcagatgcagcttcagcctgcacagcggcatccccggcaccgagggctggatggcccccgagctgctgcagctgctgccccccgacagccccaccagcgccgtggacatcttcagcgccggctgcgtgttctactacgtgctgagcggcggcagccaccccttcggcgacagcctgtacagacaggccaacatcctgaccggcgccccctgcctggcccacctggaggaggaggtgcacgacaaggtggtggccagagacctggtgggcgccatgctgagccccctgccccagcccagacccagcgccccccaggtgctggcccaccccttcttctggagcagagccaagcagctgcagttcttccaggacgtgagcgactggctggagaaggagagcgagcaggagcccctggtgagagccctggaggccggcggctgcgccgtggtgagagacaactggcacgagcacatcagcatgcccctgcagaccgacctgagaaagttcagaagctacaagggcaccagcgtgagagacctgctgagagccgtgagaaacaagaagcaccactacagagagctgcccgtggaggtgagacaggccctgggccaggtgcccgacggcttcgtgcagtacttcaccaacagattccccagactgctgctgcacacccacagagccatgagaagctgcgccagcgagagcctgttcctgccctactacccccccgacagcgaggccagaagaccctgccccggcgccaccggcagatag

SEQ ID NO: 80352 - DNA, 354 bp, synthetic construct
  misc_feature 1..354: note = Description of Artificial Sequence: Synthetic coding sequence
  source 1..354: mol_type = other DNA
atgagccagaagcaggaggaggagaaccccgccgaggagaccggcgaggagaagcaggacacccaggagaaggagggcatcctgcccgagagagccgaggaggccaagctgaaggccaagtaccccagcctgggccagaagcccggcggcagcgacttcctgatgaagagactgcagaagggccagaagtacttcgacagcggcgactacaacatggccaaggccaagatgaagaacaagcagctgcccagcgccggccccgacaagaacctggtgaccggcgaccacatccccaccccccaggacctgccccagagaaagagcagcctggtgaccagcaagctggccggctag

SEQ ID NO: 80353 - DNA, 414 bp, synthetic construct
  misc_feature 1..414: note = Description of Artificial Sequence: Synthetic coding sequence
  source 1..414: mol_type = other DNA
atgagccagaagcaggaggaggagaaccccgccgaggagaccggcgaggagaagcaggacacccaggagaaggagggcatcctgcccgagagagccgaggaggccaagctgaaggccaagtaccccagcctgggccagaagcccggcggcagcgacttcctgatgaagagactgcagaagggcgactacaagagcctgcactggagcgtgctgctgtgcgccgacgagatgcagaagtacttcgacagcggcgactacaacatggccaaggccaagatgaagaacaagcagctgcccagcgccggccccgacaagaacctggtgaccggcgaccacatccccaccccccaggacctgccccagagaaagagcagcctggtgaccagcaagctggccggcggccaggtggagtag

SEQ ID NO: 80354 - DNA, 423 bp, synthetic construct
  misc_feature 1..423: note = Description of Artificial Sequence: Synthetic coding sequence
  source 1..423: mol_type = other DNA
atgagccagaagcaggaggaggagaaccccgccgaggagaccggcgaggagaagcaggacacccaggagaaggagggcatcctgcccgagagagccgaggaggccaagctgaaggccaagtaccccagcctgggccagaagcccggcggcagcgacttcctgatgaagagactgcagaagggcgtgtggggcatcgtgagctaccccctgagcctggagctgaaggaggtgctgagaatgaagagcgtggagcagaagtacttcgacagcggcgactacaacatggccaaggccaagatgaagaacaagcagctgcccagcgccggccccgacaagaacctggtgaccggcgaccacatccccaccccccaggacctgccccagagaaagagcagcctggtgaccagcaagctggccggctag

SEQ ID NO: 80355 - DNA, 354 bp, synthetic construct
  misc_feature 1..354: note = Description of Artificial Sequence: Synthetic coding sequence
  source 1..354: mol_type = other DNA
atggccggcggcctgggctgcgacgtgtgctactggttcgtggaggacacccaggagaaggagggcatcctgcccgagagagccgaggaggccaagctgaaggccaagtaccccagcctgggccagaagcccggcggcagcgacttcctgatgaagagactgcagaagggccagaagtacttcgacagcggcgactacaacatggccaaggccaagatgaagaacaagcagctgcccagcgccggccccgacaagaacctggtgaccggcgaccacatccccaccccccaggacctgccccagagaaagagcagcctggtgaccagcaagctggccggcggccaggtggagtag

SEQ ID NO: 80356 - DNA, 402 bp, synthetic construct
  misc_feature 1..402: note = Description of Artificial Sequence: Synthetic coding sequence
  source 1..402: mol_type = other DNA
atggccggcggcctgggctgcgacgtgtgctactggttcgtggaggacacccaggagaaggagggcatcctgcccgagagagccgaggaggccaagctgaaggccaagtaccccagcctgggccagaagcccggcggcagcgacttcctgatgaagagactgcagaagggcgactacaagagcctgcactggagcgtgctgctgtgcgccgacgagatgcagaagtacttcgacagcggcgactacaacatggccaaggccaagatgaagaacaagcagctgcccagcgccggccccgacaagaacctggtgaccggcgaccacatccccaccccccaggacctgccccagagaaagagcagcctggtgaccagcaagctggccggcggccaggtggagtag

SEQ ID NO: 80357 - DNA, 318 bp, synthetic construct
  misc_feature 1..318: note = Description of Artificial Sequence: Synthetic coding sequence
  source 1..318: mol_type = other DNA
atgagccagaagcaggaggaggagaaccccgccgaggagaccggcgaggagaagcaggacacccaggagaaggagggcatcctgcccgagagagccgaggaggccaagctgaaggccaagtaccccagcctgggccagaagcccggcggcagcgacttcctgatgaagagactgcagaagggcgtgtggggcatcgtgagctaccccctgagcctggagctgaaggaggtgctgagaatgaagagcgtggaggtgctgctggaccccttcctggaggtgctgctgctgaacagaagcagaggcgagttcgagatctag

SEQ ID NO: 80358 - DNA, 435 bp, synthetic construct
  misc_feature 1..435: note = Description of Artificial Sequence: Synthetic coding sequence
  source 1..435: mol_type = other DNA
atgagccagaagcaggaggaggagaaccccgccgaggagaccggcgaggagaagcaggacacccaggagaaggagggcatcctgcccgagagagccgaggaggccaagctgaaggccaagtaccccagcctgggccagaagcccggcggcagcgacttcctgatgaagagactgcagaagggcgtgtggggcatcgtgagctaccccctgagcctggagctgaaggaggtgctgagaatgaagagcgtggagcagaagtacttcgacagcggcgactacaacatggccaaggccaagatgaagaacaagcagctgcccagcgccggccccgacaagaacctggtgaccggcgaccacatccccaccccccaggacctgccccagagaaagagcagcctggtgaccagcaagctggccggcggccaggtggagtag

SEQ ID NO: 80359 - DNA, 366 bp, synthetic construct
  misc_feature 1..366: note = Description of Artificial Sequence: Synthetic coding sequence
  source 1..366: mol_type = other DNA
atgagccagaagcaggaggaggagaaccccgccgaggagaccggcgaggagaagcaggacacccaggagaaggagggcatcctgcccgagagagccgaggaggccaagctgaaggccaagtaccccagcctgggccagaagcccggcggcagcgacttcctgatgaagagactgcagaagggccagaagtacttcgacagcggcgactacaacatggccaaggccaagatgaagaacaagcagctgcccagcgccggccccgacaagaacctggtgaccggcgaccacatccccaccccccaggacctgccccagagaaagagcagcctggtgaccagcaagctggccggcggccaggtggagtag

SEQ ID NO: 80360 - DNA, 402 bp, synthetic construct
  misc_feature 1..402: note = Description of Artificial Sequence: Synthetic coding sequence
  source 1..402: mol_type = other DNA
atgagccagaagcaggaggaggagaaccccgccgaggagaccggcgaggagaagcaggacacccaggagaaggagggcatcctgcccgagagagccgaggaggccaagctgaaggccaagtaccccagcctgggccagaagcccggcggcagcgacttcctgatgaagagactgcagaagggcgactacaagagcctgcactggagcgtgctgctgtgcgccgacgagatgcagaagtacttcgacagcggcgactacaacatggccaaggccaagatgaagaacaagcagctgcccagcgccggccccgacaagaacctggtgaccggcgaccacatccccaccccccaggacctgccccagagaaagagcagcctggtgaccagcaagctggccggctag

SEQ ID NO: 80361 - DNA, 318 bp, synthetic construct; identical to SEQ ID NO: 80357
  misc_feature 1..318: note = Description of Artificial Sequence: Synthetic coding sequence
  source 1..318: mol_type = other DNA

SEQ ID NO: 80362 - DNA, 342 bp, synthetic construct
  misc_feature 1..342: note = Description of Artificial Sequence: Synthetic coding sequence
  source 1..342: mol_type = other DNA
atggccggcggcctgggctgcgacgtgtgctactggttcgtggaggacacccaggagaaggagggcatcctgcccgagagagccgaggaggccaagctgaaggccaagtaccccagcctgggccagaagcccggcggcagcgacttcctgatgaagagactgcagaagggccagaagtacttcgacagcggcgactacaacatggccaaggccaagatgaagaacaagcagctgcccagcgccggccccgacaagaacctggtgaccggcgaccacatccccaccccccaggacctgccccagagaaagagcagcctggtgaccagcaagctggccggctag

SEQ ID NO: 80363 - DNA, 1173 bp, synthetic construct
  misc_feature 1..1173: note = Description of Artificial Sequence: Synthetic coding sequence
  source 1..1173: mol_type = other DNA
atgatcagcctgcccggccccctggtgaccaacctgctgagattcctgttcctgggcctgagcgccctggccccccccagcagagcccagctgcagctgcacctgcccgccaacagactgcaggccgtggagggcggcgaggtggtgctgcccgcctggtacaccctgcacggcgaggtgagcagcagccagccctgggaggtgcccttcgtgatgtggttcttcaagcagaaggagaaggaggaccaggtgctgagctacatcaacggcgtgaccaccagcaagcccggcgtgagcctggtgtacagcatgcccagcagaaacctgagcctgagactggagggcctgcaggagaaggacagcggcccctacagctgcagcgtgaacgtgcaggacaagcagggcaagagcagaggccacagcatcaagaccctggagctgaacgtgctggtgccccccgccccccccagctgcagactgcagggcgtgccccacgtgggcgccaacgtgaccctgagctgccagagccccagaagcaagcccgccgtgcagtaccagtgggacagacagctgcccagcttccagaccttcttcgcccccgccctggacgtgatcagaggcagcctgagcctgaccaacctgagcagcagcatggccggcgtgtacgtgtgcaaggcccacaacgaggtgggcaccgcccagtgcaacgtgaccctggaggtgagcaccggccccggcgccgccgtggtggccggcgccgtggtgggcaccctggtgggcctgggcctgctggccggcctggtgctgctgtaccacagaagaggcaaggccctggaggagcccgccaacgacatcaaggaggacgccatcgcccccagaaccctgccctggcccaagagcagcgacaccatcagcaagaacggcaccctgagcagcgtgaccagcgccagagccctgagacccccccacggcccccccagacccggcgccctgacccccacccccagcctgagcagccaggccctgcccagccccagactgcccaccaccgacggcgcccacccccagcccatcagccccatccccggcggcgtgagcagcagcggcctgagcagaatgggcgccgtgcccgtgatggtgcccgcccagagccaggccggcagcctggtgtag

SEQ ID NO: 80364 - DNA, 426 bp, synthetic construct
  misc_feature 1..426: note = Description of Artificial Sequence: Synthetic coding sequence
  source 1..426: mol_type = other DNA
atgatcagcctgcccggccccctggtgaccaacctgctgagattcctgttcctgggcctgagcgccctggacgtgatcagaggcagcctgagcctgaccaacctgagcagcagcatggccggcgtgtacgtgtgcaaggcccacaacgaggtgggcaccgcccagtgcaacgtgaccctggaggtgagcaccggccccggcgccgccgtggtggccggcgccgtggtgggcaccctggtgggcctgggcctgctggccggcctggtgctgctgtaccacagaagaggcaaggccctggaggagcccgccaacgacatcaaggtgagaagccccctgggcctgagcttcagcgcccccaagatggagtggctgtggaagtggagagacgcccacttctacagagacagctacctgagcaagtggtag

SEQ ID NO: 80365 - DNA, 2613 bp, synthetic construct
  misc_feature 1..2613: note = Description of Artificial Sequence: Synthetic coding sequence
  source 1..2613: mol_type = other DNA
atgaccgccgacaaggagaagaagagaagcagcagcgagagaagaaaggagaagagcagagacgccgccagatgcagaagaagcaaggagaccgaggtgttctacgagctggcccacgagctgcccctgccccacagcgtgagcagccacctggacaaggccagcatcatgagactggccatcagcttcctgagaacccacaagctgctgagcagcgtgtgcagcgagaacgagagcgaggccgaggccgaccagcagatggacaacctgtacctgaaggccctggagggcttcatcgccgtggtgacccaggacggcgacatgatcttcctgagcgagaacatcagcaagttcatgggcctgacccaggtggagctgaccggccacagcatcttcgacttcacccacccctgcgaccacgaggagatcagagagaacctgagcctgaagaacggcagcggcttcggcaagaagagcaaggacatgagcaccgagagagacttcttcatgagaatgaagtgcaccgtgaccaacagaggcagaaccgtgaacctgaagagcgccacctggaaggtgctgcactgcaccggccaggtgaaggtgtacaacaactgccccccccacaacagcctgtgcggctacaaggagcccctgctgagctgcctgatcatcatgtgcgagcccatccagcaccccagccacatggacatccccctggacagcaagaccttcctgagcagacacagcatggacatgaagttcacctactgcgacgacagaatcaccgagctgatcggctaccaccccgaggagctgctgggcagaagcgcctacgagttctaccacgccctggacagcgagaacatgaccaagagccaccagaacctgtgcaccaagggccaggtggtgagcggccagtacagaatgctggccaagcacggcggctacgtgtggctggagacccagggcaccgtgatctacaaccccagaaacctgcagccccagtgcatcatgtgcgtgaactacgtgctgagcgagatcgagaagaacgacgtggtgttcagcatggaccagaccgagagcctgttcaagccccacctgatggccatgaacagcatcttcgacagcagcggcaagggcgccgtgagcgagaagagcaacttcctgttcaccaagctgaaggaggagcccgaggagctggcccagctggcccccacccccggcgacgccatcatcagcctggacttcggcaaccagaacttcgaggagagcagcgcctacggcaaggccatcctgccccccagccagccctgggccaccgagctgagaagccacagcacccagagcgaggccggcagcctgcccgccttcaccgtgccccaggccgccgcccccggcagcaccacccccagcgccaccagcagcagcagcagctgcagcacccccaacagccccgaggactactacaccagcctggacaacgacctgaagatcgaggtgatcgagaagctgttcgccatggacaccgaggccaaggaccagtgcagcacccagaccgacttcaacgagctggacctggagaccctggccccctacatccccatggacggcgaggacttccagctgagccccatctgccccgaggagagactgctggccgagaacccccagagcaccccccagcactgcttcagcgccatgaccaacatcttccagcccctggcccccgtggccccccacagccccttcctgctggacaagttccagcagcagctggagagcaagaagaccgagcccgagcacagacccatgagcagcatcttcttcgacgccggcagcaaggccagcctgcccccctgctgcggccaggccagcacccccctgagcagcatgggcggcagaagcaacacccagtggccccccgacccccccctgcacttcggccccaccaagtgggccgtgggcgaccagagaaccgagttcctgggcgccgcccccctgggcccccccgtgagccccccccacgtgagcaccttcaagaccagaagcgccaagggcttcggcgccagaggccccgacgtgctgagccccgccatggtggccctgagcaacaagctgaagctgaagagacagctggagtacgaggagcaggccttccaggacctgagcggcggcgacccccccggcggcagcaccagccacctgatgtggaagagaatgaagaacctgagaggcggcagctgccccctgatgcccgacaagcccctgagcgccaacgtgcccaacgacaagttcacccagaaccccatgagaggcctgggccaccccctgagacacctgcccctgccccagccccccagcgccatcagccccggcgagaacagcaagagcagattccccccccagtgctacgccacccagtaccaggactacagcctgagcagcgcccacaaggtgagcggcatggccagcagactgctgggccccagcttcgagagctacctgctgcccgagctgaccagatacgactgcgaggtgaacgtgcccgtgctgggcagcagcaccctgctgcagggcggcgacctgctgagagccctggaccaggccacctag

SEQ ID NO: 80366 - DNA, 780 bp, synthetic construct
  misc_feature 1..780: note = Description of Artificial Sequence: Synthetic coding sequence
  source 1..780: mol_type = other DNA
atgaccgccgacaaggagaagaagagaagcagcagcgagagaagaaaggagaagagcagagacgccgccagatgcagaagaagcaaggagaccgaggtgttctacgagctggcccacgagctgcccctgccccacagcgtgagcagccacctggacaaggccagcatcatgagactggccatcagcttcctgagaacccacaagctgctgagcagcgtgtgcagcgagaacgagagcgaggccgaggccgaccagcagatggacaacctgtacctgaaggccctggagggcttcatcgccgtggtgacccaggacggcgacatgatcttcctgagcgagaacatcagcaagttcatgggcctgacccaggtggagctgaccggccacagcatcttcgacttcacccacccctgcgaccacgaggagatcagagagaacctgagcctgaagaacggcagcggcttcggcaagaagagcaaggacatgagcaccgagagagacttcttcatgagaatgaagtgcaccgtgaccaacagaggcagaaccgtgaacctgaagagcgccacctggaaggtgctgcactgcaccggccaggtgaaggtgtacaacaactgccccccccacaacagcctgtgcggctacaaggagcccctgctgagctgcctgatcatcatgtgcgagcccatccagcaccccagccacatggacatccccctggacagcaagaccttcctgagcagacacagcatggacatgaagttcacctactgcgacgactag

SEQ ID NO: 80367 - DNA, 537 bp, synthetic construct
  misc_feature 1..537: note = Description of Artificial Sequence: Synthetic coding sequence
  source 1..537: mol_type = other DNA
atggtgagcgtgcccaccacctggtgcagcgtggccctggccctgctggtggccctgcacgagggcaagggccaggccgccgccaccctggagcagcccgccagcagcagccacgcccagggcacccacctgagactgagaagatgcagctgcagcagctggctggacaaggagtgcgtgtacttctgccacctggacatcatctgggtgaacacccccgagcagaccgccccctacggcctgggcaacccccccagaagaagaagaagaagcctgcccagaagatgccagtgcagcagcgccagagaccccgcctgcgccaccttctgcctgagaagaccctggaccgaggccggcgccgtgcccagcagaaagagccccgccgacgtgttccagaccggcaagaccggcgccaccaccggcgagctgctgcagagactgagagacatcagcaccgtgaagagcctgttcgccaagagacagcaggaggccatgagagagcccagaagcacccacagcagatggagaaagagatag

SEQ ID NO: 80368 - DNA, 660 bp, synthetic construct
  misc_feature 1..660: note = Description of Artificial Sequence: Synthetic coding sequence
  source 1..660: mol_type = other DNA
atggagcccggcctgtggctgctgttcggcctgaccgtgaccagcgccgccggcttcgtgccctgcagccagagcggcgacgccggcagaagaggcgtgagccaggcccccaccgccgccagaagcgagggcgactgcgaggagaccgtggccggccccggcgaggagaccgtggccggccccggcgagggcaccgtggcccccaccgccctgcagggccccagccccggcagccccggccaggagcaggccgccgagggcgcccccgagcaccacagaagcagaagatgcacctgcttcacctacaaggacaaggagtgcgtgtactactgccacctggacatcatctggatcaacacccccgagcagaccgtgccctacggcctgagcaactacagaggcagcttcagaggcaagagaagcgccggccccctgcccggcaacctgcagctgagccacagaccccacctgagatgcgcctgcgtgggcagatacgacaaggcctgcctgcacttctgcacccagaccctggacgtgagcagcaacagcagaaccgccgagaagaccgacaaggaggaggagggcaaggtgagaggcgccaacagaggcctgtgccagagaagactgaagagcagaaccaacaaggccagcagactgtag

SEQ ID NO: 80369 - DNA, 717 bp, synthetic construct
  misc_feature 1..717: note = Description of Artificial Sequence: Synthetic coding sequence
  source 1..717: mol_type = other DNA
atggagcccggcctgtggctgctgttcggcctgaccgtgaccagcgccgccggcttcgtgccctgcagccagagcggcgacgccggcagaagaggcgtgagccaggcccccaccgccgccagaagcgagggcgactgcgaggagaccgtggccggccccggcgaggagaccgtggccggccccggcgagggcaccgtggcccccaccgccctgcagggccccagccccggcagccccggccaggagcaggccgccgagggcgcccccgagcaccacagaagcagaagatgcacctgcttcacctacaaggacaaggagtgcgtgtactactgccacctggacatcatctggatcaacacccccgagcagaccgtgccctacggcctgagcaactacagaggcagcttcagaggcaagagaagcgccggccccctgcccggcaacctgcagctgagccacagaccccacctgagatgcgcctgcgtgggcagatacgacaaggcctgcctgcacttctgcacccagaccctggacgtgagcagcaacagcagaaccgccgagaagaccgacaaggaggaggagggcaaggtggaggtgaaggaccagcagagcaagcaggccctggacctgcaccaccccaagctgatgcccggcagcggcctggccctggcccccagcacctgccccagatgcctgttccaggagggcgccccctag

SEQ ID NO: 80370 - DNA, 579 bp, synthetic construct
  misc_feature 1..579: note = Description of Artificial Sequence: Synthetic coding sequence
  source 1..579: mol_type = other DNA
atggagcccggcctgtggctgctgttcggcctgaccgtgaccagcgccgccggcttcgtgccctgcagccagagcggcgacgccggcagaagaggcgtgagccaggcccccaccgccgccagaagcgagggcgactgcgaggagaccgtggccggccccggcgaggagaccgtggccggccccggcgagggcaccgtggcccccaccgccctgcagggccccagccccggcagccccggccaggagcaggccgccgagggcgcccccgagcaccacagaagcagaagatgcacctgcttcacctacaaggacaaggagtgcgtgtactactgccacctggacatcatctggatcaacacccccgagcagaccgtgccctacggcctgagcaactacagaggcagcttcagaggcaagagaagcgccggccccctgcccggcaacctgcagctgagccacagaccccacctgagatgcgcctgcgtgggcagatacgacaaggcctgcctgcacttctgcacccagaccctggacgtgagcagactgaagagcagaaccaacaaggccagcagactgtag

SEQ ID NO: 80371 - DNA, 717 bp, synthetic construct; identical to SEQ ID NO: 80369
  misc_feature 1..717: note = Description of Artificial Sequence: Synthetic coding sequence
  source 1..717: mol_type = other DNA

SEQ ID NO: 80372 - DNA, 675 bp, synthetic construct
  misc_feature 1..675: note = Description of Artificial Sequence: Synthetic coding sequence
  source 1..675: mol_type = other DNA
atggagcccggcctgtggctgctgttcggcctgaccgtgaccagcgccgccggcttcgtgccctgcagccagagcggcgacgccggcagaagaggcgtgagccaggcccccaccgccgccagaagcgagggcgactgcgaggagaccgtggccggccccggcgaggagaccgtggccggccccggcgagggcaccgtggcccccaccgccctgcagggccccagccccggcagccccggccaggagcaggccgccgagggcgcccccgagcaccacagaagcagaagatgcacctgcttcacctacaaggacaaggagtgcgtgtactactgccacctggacatcatctggatcaacacccccgagcagaccgtgccctacggcctgagcaactacagaggcagcttcagaggcaagagaagcgccggccccctgcccggcaacctgcagctgagccacagaccccacctgagatgcgcctgcgtgggcagatacgacaaggcctgcctgcacttctgcacccagaccctggacgtgagcagacaggtggaggtgaaggaccagcagagcaagcaggccctggacctgcaccaccccaagctgatgcccggcagcggcctggccctggcccccagcacctgccccagatgcctgttccaggagggcgccccctag

SEQ ID NO: 80373 - DNA, 2304 bp, synthetic construct
  misc_feature 1..2304: note = Description of Artificial Sequence: Synthetic coding sequence
  source 1..2304: mol_type = other DNA
atggaggccctgagagagagcgtgctgcacctggccctgcagatgagcacctacaagagagccaccctggacgaggaggacctggtggacagcctgagcgagggcgacgcctaccccaacggcctgcaggtgaacttccacagccccagaagcggccagagatgctgggccgccagaacccaggtggagaagagactggtggtgctggtggtgctgctggccgccggcctggtggcctgcctggccgccctgggcatccagtaccagaccagaagccccagcgtgtgcctgagcgaggcctgcgtgagcgtgaccagcagcatcctgagcagcatggaccccaccgtggacccctgccacgacttcttcagctacgcctgcggcggctggatcaaggccaaccccgtgcccgacggccacagcagatggggcaccttcagcaacctgtgggagcacaaccaggccatcatcaagcacctgctggagaacagcaccgccagcgtgagcgaggccgagagaaaggcccaggtgtactacagagcctgcatgaacgagaccagaatcgaggagctgagagccaagcccctgatggagctgatcgagagactgggcggctggaacatcaccggcccctgggccaaggacaacttccaggacaccctgcaggtggtgaccgcccactacagaaccagccccttcttcagcgtgtacgtgagcgccgacagcaagaacagcaacagcaacgtgatccaggtggaccagagcggcctgggcctgcccagcagagactactacctgaacaagaccgagaacgagaaggtgctgaccggctacctgaactacatggtgcagctgggcaagctgctgggcggcggcgacgaggaggccatcagaccccagatgcagcagatcctggacttcgagaccgccctggccaacatcaccatcccccaggagaagagaagagacgaggagctgatctaccacaaggtgaccgccgccgagctgcagaccctggcccccgccatcaactggctgcccttcctgaacaccatcttctaccccgtggagatcaacgagagcgagcccatcgtggtgtacgacaaggagtacctggagcagatcagcaccctgatcaacaccaccgacagatgcctgctgaacaactacatgatctggaacctggtgagaaagaccagcagcttcctggaccagagattccaggacgccgacgagaagttcatggaggtgatgtacggcaccaagaagacctgcctgcccagatggaagttctgcgtgagcgacaccgagaacaacctgggcttcgccctgggccccatgttcgtgaaggccaccttcgccgaggacagcaagagcatcgccaccgagatcatcctggagatcaagaaggccttcgaggagagcctgagcaccctgaagtggatggacgaggagaccagaaagagcgccaaggagaaggccgacgccatctacaacatgatcggctaccccaacttcatcatggaccccaaggagctggacaaggtgttcaacgactacaccgccgtgcccgacctgtacttcgagaacgccatgagattcttcaacttcagctggagagtgaccgccgaccagctgagaaaggcccccaacagagaccagtggagcatgaccccccccatggtgaacgcctactacagccccaccaagaacgagatcgtgttccccgccggcatcctgcaggcccccttctacaccagaagcagccccaaggccctgaacttcggcggcatcggcgtggtggtgggccacgagctgacccacgccttcgacgaccagggcagagagtacgacaaggacggcaacctgagaccctggtggaagaacagcagcgtggaggccttcaagagacagaccgagtgcatggtggagcagtacagcaactacagcgtgaacggcgagcccgtgaacggcagacacaccctgggcgagaacatcgccgacaacggcggcctgaaggccgcctacagagcctaccagaactgggtgaagaagaacggcgccgagcacagcctgcccaccctgggcctgaccaacaaccagctgttcttcctgggcttcgcccaggtgtggtgcagcgtgagaacccccgagagcagccacgagggcctgatcaccgacccccacagccccagcagattcagagtgatcggcagcctgagcaacagcaaggagttcagcgagcacttcagatgcccccccggcagccccatgaaccccccccacaagtgcgaggtgtggtag

SEQ ID NO: 80374 - DNA, 2277 bp, synthetic construct
  misc_feature 1..2277: note = Description of Artificial Sequence: Synthetic coding sequence
  source 1..2277: mol_type = other DNA
atgcccctgcagggcctgggcctgcagagaaaccccttcctgcagggcaagagaggccccggcctgaccagcagcccccccctgctgccccccagcctgcaggtgaacttccacagccccagaagcggccagagatgctgggccgccagaacccaggtggagaagagactggtggtgctggtggtgctgctggccgccggcctggtggcctgcctggccgccctgggcatccagtaccagaccagaagccccagcgtgtgcctgagcgaggcctgcgtgagcgtgaccagcagcatcctgagcagcatggaccccaccgtggacccctgccacgacttcttcagctacgcctgcggcggctggatcaaggccaaccccgtgcccgacggccacagcagatggggcaccttcagcaacctgtgggagcacaaccaggccatcatcaagcacctgctggagaacagcaccgccagcgtgagcgaggccgagagaaaggcccaggtgtactacagagcctgcatgaacgagaccagaatcgaggagctgagagccaagcccctgatggagctgatcgagagactgggcggctggaacatcaccggcccctgggccaaggacaacttccaggacaccctgcaggtggtgaccgcccactacagaaccagccccttcttcagcgtgtacgtgagcgccgacagcaagaacagcaacagcaacgtgatccaggtggaccagagcggcctgggcctgcccagcagagactactacctgaacaagaccgagaacgagaaggtgctgaccggctacctgaactacatggtgcagctgggcaagctgctgggcggcggcgacgaggaggccatcagaccccagatgcagcagatcctggacttcgagaccgccctggccaacatcaccatcccccaggagaagagaagagacgaggagctgatctaccacaaggtgaccgccgccgagctgcagaccctggcccccgccatcaactggctgcccttcctgaacaccatcttctaccccgtggagatcaacgagagcgagcccatcgtggtgtacgacaaggagtacctggagcagatcagcaccctgatcaacaccaccgacagatgcctgctgaacaactacatgatctggaacctggtgagaaagaccagcagcttcctggaccagagattccaggacgccgacgagaagttcatggaggtgatgtacggcaccaagaagacctgcctgcccagatggaagttctgcgtgagcgacaccgagaacaacctgggcttcgccctgggccccatgttcgtgaaggccaccttcgccgaggacagcaagagcatcgccaccgagatcatcctggagatcaagaaggccttcgaggagagcctgagcaccctgaagtggatggacgaggagaccagaaagagcgccaaggagaaggccgacgccatctacaacatgatcggctaccccaacttcatcatggaccccaaggagctggacaaggtgttcaacgactacaccgccgtgcccgacctgtacttcgagaacgccatgagattcttcaacttcagctggagagtgaccgccgaccagctgagaaaggcccccaacagagaccagtggagcatgaccccccccatggtgaacgcctactacagccccaccaagaacgagatcgtgttccccgccggcatcctgcaggcccccttctacaccagaagcagccccaaggccctgaacttcggcggcatcggcgtggtggtgggccacgagctgacccacgccttcgacgaccagggcagagagtacgacaaggacggcaacctgagaccctggtggaagaacagcagcgtggaggccttcaagagacagaccgagtgcatggtggagcagtacagcaactacagcgtgaacggcgagcccgtgaacggcagacacaccctgggcgagaacatcgccgacaacggcggcctgaaggccgcctacagagcctaccagaactgggtgaagaagaacggcgccgagcacagcctgcccaccctgggcctgaccaacaaccagctgttcttcctgggcttcgcccaggtgtggtgcagcgtgagaacccccgagagcagccacgagggcctgatcaccgacccccacagccccagcagattcagagtgatcggcagcctgagcaacagcaaggagttcagcgagcacttcagatgcccccccggcagccccatgaaccccccccacaagtgcgaggtgtggtag

SEQ ID NO: 80375 - DNA, 2313 bp, synthetic construct
  misc_feature 1..2313: note = Description of Artificial Sequence: Synthetic coding sequence
  source 1..2313: mol_type = other DNA
atgagaggcgtgtggcccccccccgtgagcgccctgctgagcgccctgggcatgagcacctacaagagagccaccctggacgaggaggacctggtggacagcctgagcgagggcgacgcctaccccaacggcctgcaggtgaacttccacagccccagaagcggccagagatgctgggccgccagaacccaggtggagaagagactggtggtgctggtggtgctgctggccgccggcctggtggcctgcctggccgccctgggcatccagtaccagaccagaagccccagcgtgtgcctgagcgaggcctgcgtgagcgtgaccagcagcatcctgagcagcatggaccccaccgtggacccctgccacgacttcttcagctacgcctgcggcggctggatcaaggccaaccccgtgcccgacggccacagcagatggggcaccttcagcaacctgtgggagcacaaccaggccatcatcaagcacctgctggagaacagcaccgccagcgtgagcgaggccgagagaaaggcccaggtgtactacagagcctgcatgaacgagaccagaatcgaggagctgagagccaagcccctgatggagctgatcgagagactgggcggctggaacatcaccggcccctgggccaaggacaacttccaggacaccctgcaggtggtgaccgcccactacagaaccagccccttcttcagcgtgtacgtgagcgccgacagcaagaacagcaacagcaacgtgatccaggtggaccagagcggcctgggcctgcccagcagagactactacctgaacaagaccgagaacgagaaggtgctgaccggctacctgaactacatggtgcagctgggcaagctgctgggcggcggcgacgaggaggccatcagaccccagatgcagcagatcctggacttcgagaccgccctggccaacatcaccatcccccaggagaagagaagagacgaggagctgatctaccacaaggtgaccgccgccgagctgcagaccctggcccccgccatcaactggctgcccttcctgaacaccatcttctaccccgtggagatcaacgagagcgagcccatcgtggtgtacgacaaggagtacctggagcagatcagcaccctgatcaacaccaccgacagatgcctgctgaacaactacatgatctggaacctggtgagaaagaccagcagcttcctggaccagagattccaggacgccgacgagaagttcatggaggtgatgtacggcaccaagaagacctgcctgcccagatggaagttctgcgtgagcgacaccgagaacaacctgggcttcgccctgggccccatgttcgtgaaggccaccttcgccgaggacagcaagagcatcgccaccgagatcatcctggagatcaagaaggccttcgaggagagcctgagcaccctgaagtggatggacgaggagaccagaaagagcgccaaggagaaggccgacgccatctacaacatgatcggctaccccaacttcatcatggaccccaaggagctggacaaggtgttcaacgactacaccgccgtgcccgacctgtacttcgagaacgccatgagattcttcaacttcagctggagagtgaccgccgaccagctgagaaaggcccccaacagagaccagtggagcatgaccccccccatggtgaacgcctactacagccccaccaagaacgagatcgtgttccccgccggcatcctgcaggcccccttctacaccagaagcagccccaaggccctgaacttcggcggcatcggcgtggtggtgggccacgagctgacccacgccttcgacgaccagggcagagagtacgacaaggacggcaacctgagaccctggtggaagaacagcagcgtggaggccttcaagagacagaccgagtgcatggtggagcagtacagcaactacagcgtgaacggcgagcccgtgaacggcagacacaccctgggcgagaacatcgccgacaacggcggcctgaaggccgcctacagagcctaccagaactgggtgaagaagaacggcgccgagcacagcctgcccaccctgggcctgaccaacaaccagctgttcttcctgggcttcgcccaggtgtggtgcagcgtgagaacccccgagagcagccacgagggcctgatcaccgacccccacagccccagcagattcagagtgatcggcagcctgagcaacagcaaggagttcagcgagcacttcagatgcccccccggcagccccatgaaccccccccacaagtgcgaggtgtggtag

SEQ ID NO: 80376 - DNA, 2265 bp, synthetic construct
  misc_feature 1..2265: note = Description of Artificial Sequence: Synthetic coding sequence
  source 1..2265: mol_type = other DNA
atgatgagcacctacaagagagccaccctggacgaggaggacctggtggacagcctgagcgagggcgacgcctaccccaacggcctgcaggtgaacttccacagccccagaagcggccagagatgctgggccgccagaacccaggtggagaagagactggtggtgctggtggtgctgctggccgccggcctggtggcctgcctggccgccctgggcatccagtaccagaccagaagccccagcgtgtgcctgagcgaggcctgcgtgagcgtgaccagcagcatcctgagcagcatggaccccaccgtggacccctgccacgacttcttcagctacgcctgcggcggctggatcaaggccaaccccgtgcccgacggccacagcagatggggcaccttcagcaacctgtgggagcacaaccaggccatcatcaagcacctgctggagaacagcaccgccagcgtgagcgaggccgagagaaaggcccaggtgtactacagagcctgcatgaacgagaccagaatcgaggagctgagagccaagcccctgatggagctgatcgagagactgggcggctggaacatcaccggcccctgggccaaggacaacttccaggacaccctgcaggtggtgaccgcccactacagaaccagccccttcttcagcgtgtacgtgagcgccgacagcaagaacagcaacagcaacgtgatccaggtggaccagagcggcctgggcctgcccagcagagactactacctgaacaagaccgagaacgagaaggtgctgaccggctacctgaactacatggtgcagctgggcaagctgctgggcggcggcgacgaggaggccatcagaccccagatgcagcagatcctggacttcgagaccgccctggccaacatcaccatcccccaggagaagagaagagacgaggagctgatctaccacaaggtgaccgccgccgagctgcagaccctggcccccgccatcaactggctgcccttcctgaacaccatcttctaccccgtggagatcaacgagagcgagcccatcgtggtgtacgacaaggagtacctggagcagatcagcaccctgatcaacaccaccgacagatgcctgctgaacaactacatgatctggaacctggtgagaaagaccagcagcttcctggaccagagattccaggacgccgacgagaagttcatggaggtgatgtacggcaccaagaagacctgcctgcccagatggaagttctgcgtgagcgacaccgagaacaacctgggcttcgccctgggccccatgttcgtgaaggccaccttcgccgaggacagcaagagcatcgccaccgagatcatcctggagatcaagaaggccttcgaggagagcctgagcaccctgaagtggatggacgaggagaccagaaagagcgccaaggagaaggccgacgccatctacaacatgatcggctaccccaacttcatcatggaccccaaggagctggacaaggtgttcaacgactacaccgccgtgcccgacctgtacttcgagaacgccatgagattcttcaacttcagctggagagtgaccgccgaccagctgagaaaggcccccaacagagaccagtggagcatgaccccccccatggtgaacgcctactacagccccaccaagaacgagatcgtgttccccgccggcatcctgcaggcccccttctacaccagaagcagccccaaggccctgaacttcggcggcatcggcgtggtggtgggccacgagctgacccacgccttcgacgaccagggcagagagtacgacaaggacggcaacctgagaccctggtggaagaacagcagcgtggaggccttcaagagacagaccgagtgcatggtggagcagtacagcaactacagcgtgaacggcgagcccgtgaacggcagacacaccctgggcgagaacatcgccgacaacggcggcctgaaggccgcctacagagcctaccagaactgggtgaagaagaacggcgccgagcacagcctgcccaccctgggcctgaccaacaaccagctgttcttcctgggcttcgcccaggtgtggtgcagcgtgagaacccccgagagcagccacgagggcctgatcaccgacccccacagccccagcagattcagagtgatcggcagcctgagcaacagcaaggagttcagcgagcacttcagatgcccccccggcagccccatgaaccccccccacaagtgcgaggtgtggtag

SEQ ID NO: 80377 - DNA, 2217 bp, synthetic construct
  misc_feature 1..2217: note = Description of Artificial Sequence: Synthetic coding sequence
  source 1..2217: mol_type = other DNA
atgagaggcgtgtggcccccccccgtgagcgccctgctgagcgccctgggcatgagcacctacaagagagccaccctggacgaggaggacctggtggacagcctgagcgagggcgacgcctaccccaacggcctgcaggtgaacttccacagccccagaagcggccagagatgctgggccgccagaacccaggtggagaagagactggtggtgctggtggtgctgctggccgccggcctggtggcctgcctggccgccctgggcatccagtaccagaccagaagccccagcgtgtgcctgagcgaggcctgcgtgagcgtgaccagcagcatcctgagcagcatggaccccaccgtggacccctgccacgacttcttcagctacgcctgcggcggctggatcaaggccaaccccgtgcccgacggccacagcagatggggcaccttcagcaacctgtgggagcacaaccaggccatcatcaagcacctgctggagaacagcaccgccagcgtgagcgaggccgagagaaaggcccaggtgtactacagagcctgcatgaacgagaccagaatcgaggagctgagagccaagcccctgatggagctgatcgagagactgggcggctggaacatcaccggcccctgggccaaggacaacttccaggacaccctgcaggtggtgaccgcccactacagaaccagccccttcttcagcgtgtacgtgagcgccgacagcaagaacagcaacagcaacgtgatccaggtggaccagagcggcctgggcctgcccagcagagactactacctgaacaagaccgagaacgagaaggtgctgaccggctacctgaactacatggtgcagctgggcaagctgctgggcggcggcgacgaggaggccatcagaccccagatgcagcagatcctggacttcgagaccgccctggccaacatcaccatcccccaggagaagagaagagacgaggagctgatctaccacaaggtgaccgccgccgagctgcagaccctggcccccgccatcaactggctgcccttcctgaacaccatcttctaccccgtggagatcaacgagagcgagcccatcgtggtgtacgacaaggagtacctggagcagatcagcaccctgatcaacaccaccgacagatgcctgctgaacaactacatgatctggaacctggtgagaaagaccagcagcttcctggaccagagattccaggacgccgacgagaagttcatggaggtgatgtacggcaccaagaagacctgcctgcccagatggaagttctgcgtgagcgacaccgagaacaacctgggcttcgccctgggccccatgttcgtgaaggccaccttcgccgaggacagcaagagcatcgccaccgagatcatcctggagatcaagaaggccttcgaggagagcctgagcaccctgaagtggatggacgaggagaccagaaagagcgccaaggagaaggccgacgccatctacaacatgatcggctaccccaacttcatcatggaccccaaggagctggacaaggtgttcaacgactacaccgccgtgcccgacctgtacttcgagaacgccatgagattcttcaacttcagctggagagtgaccgccgaccagctgagaaaggcccccaacagagaccagtggagcatgaccccccccatggtgaacgcctactacagccccaccaagaacgagatcgtgttccccgccggcatcctgcaggcccccttctacaccagaagcagccccaaggccctgaacttcggcggcatcggcgtggtggtgggccacgagctgacccacgccttcgacgaccagggcagagagtacgacaaggacggcaacctgagaccctggtggaagaacagcagcgtggaggccttcaagagacagaccgagtgcatggtggagcagtacagcaactacagcgtgaacggcgagcccgtgaacggcagacacaccctgggcgagaacatcgccgacaacggcggcctgaaggccgcctacagagtgtggtgcagcgtgagaacccccgagagcagccacgagggcctgatcaccgacccccacagccccagcagattcagagtgatcggcagcctgagcaacagcaaggagttcagcgagcacttcagatgcccccccggcagccccatgaaccccccccacaagtgcgaggtgtggtag

SEQ ID NO: 80378 - DNA, 2328 bp, synthetic construct
  misc_feature 1..2328: note = Description of Artificial Sequence: Synthetic coding sequence
  source 1..2328: mol_type = other DNA
atggagcccccctacagcctgaccgcccactacgacgagttccaggaggtgaagtacgtgagcagatgcggcgccggcggcgccagaggcgccagcctgccccccggcttccccctgggcgccgccagaagcgccaccggcgccagaagcggcctgcccagatggaacagaagagaggtgtgcctgctgagcggcctggtgttcgccgccggcctgtgcgccatcctggccgccatgctggccctgaagtacctgggccccgtggccgccggcggcggcgcctgccccgagggctgccccgagagaaaggccttcgccagagccgccagattcctggccgccaacctggacgccagcatcgacccctgccaggacttctacagcttcgcctgcggcggctggctgagaagacacgccatccccgacgacaagctgacctacggcaccatcgccgccatcggcgagcagaacgaggagagactgagaagactgctggccagacccggcggcggccccggcggcgccgcccagagaaaggtgagagccttcttcagaagctgcctggacatgagagagatcgagagactgggccccagacccatgctggaggtgatcgaggactgcggcggctgggacctgggcggcgccgaggagagacccggcgtggccgccagatgggacctgaacagactgctgtacaaggcccagggcgtgtacagcgccgccgccctgttcagcctgaccgtgagcctggacgacagaaacagcagcagatacgtgatcagaatcgaccaggacggcctgaccctgcccgagagaaccctgtacctggcccaggacgaggacagcgagaagatcctggccgcctacagagtgttcatggagagagtgctgagcctgctgggcgccgacgccgtggagcagaaggcccaggagatcctgcaggtggagcagcagctggccaacatcaccgtgagcgagcacgacgacctgagaagagacgtgagcagcatgtacaacaaggtgaccctgggccagctgcagaagatcaccccccacctgagatggaagtggctgctggaccagatcttccaggaggacttcagcgaggaggaggaggtggtgctgctggccaccgactacatgcagcaggtgagccagctgatcagaagcaccccccacagagtgctgcacaactacctggtgtggagagtggtggtggtgctgagcgagcacctgagcccccccttcagagaggccctgcacgagctggcccaggagatggagggcagcgacaagccccaggagctggccagagtgtgcctgggccaggccaacagacacttcggcatggccctgggcgccctgttcgtgcacgagcacttcagcgccgccagcaaggccaaggtgcagcagctggtggaggacatcaagtacatcctgggccagagactggaggagctggactggatggacgccgagaccagagccgccgccagagccaagctgcagtacatgatggtgatggtgggctaccccgacttcctgctgaagcccgacgccgtggacaaggagtacgagttcgaggtgcacgagaagacctacttcaagaacatcctgaacagcatcagattcagcatccagctgagcgtgaagaagatcagacaggaggtggacaagagcacctggctgctgcccccccaggccctgaacgcctactacctgcccaacaagaaccagatggtgttccccgccggcatcctgcagcccaccctgtacgaccccgacttcccccagagcctgaactacggcggcatcggcaccatcatcggccacgagctgacccacggctacgacgactggggcggccagtacgacagaagcggcaacctgctgcactggtggaccgaggccagctacagcagattcctgagaaaggccgagtgcatcgtgagactgtacgacaacttcaccgtgtacaaccagagagtgaacggcaagcacaccctgggcgagaacatcgccgacatgggcggcctgaagctggcctaccacgcctaccagaagtgggtgagagagcacggccccgagcaccccctgcccagactgaagtacacccacgaccagctgttcttcatcgccttcgcccagaactggtgcatcaagagaagaagccagagcatctacctgcaggtgctgaccgacaagcacgcccccgagcactacagagtgctgggcagcgtgagccagttcgaggagttcggcagagccttccactgccccaaggacagccccatgaaccccgcccacaagtgcagcgtgtggtag

SEQ ID NO: 80379 - DNA, 2322 bp, synthetic construct
  misc_feature 1..2322: note = Description of Artificial Sequence: Synthetic coding sequence
  source 1..2322: mol_type = other DNA
atggagcccccctacagcctgaccgcccactacgacgagttccaggaggtgaagtacgtgagcagatgcggcgccggcggcgccagaggcgccagcctgccccccggcttccccctgggcgccgccagaagcgccaccggcgccagaagcggcctgcccagatggaacagaagagaggtgtgcctgctgagcggcctggtgttcgccgccggcctgtgcgccatcctggccgccatgctggccctgaagtacctgggccccgtggccgccggcggcggcgcctgccccgagggctgccccgagagaaaggccttcgccagagccgccagattcctggccgccaacctggacgccagcatcgacccctgccaggacttctacagcttcgcctgcggcggctggctgagaagacacgccatccccgacgacaagctgacctacggcaccatcgccgccatcggcgagcagaacgaggagagactgagaagactgctggccagacccggcggcggccccggcggcgccgcccagagaaaggtgagagccttcttcagaagctgcctggacatgagagagatcgagagactgggccccagacccatgctggaggtgatcgaggactgcggcggctgggacctgggcggcgccgaggagagacccggcgtggccgccagatgggacctgaacagactgctgtacaaggcccagggcgtgtacagcgccgccgccctgttcagcctgaccgtgagcctggacgacagaaacagcagcagatacgtgatcagaatcgaccaggacggcctgaccctgcccgagagaaccctgtacctggcccaggacgaggacagcgagaagatcctggccgcctacagagtgttcatggagagagtgctgagcctgctgggcgccgacgccgtggagcagaaggcccaggagatcctgcaggtggagcagcagctggccaacatcaccgtgagcgagcacgacgacctgagaagagacgtgagcagcatgtacaacaaggtgaccctgggccagctgcagaagatcaccccccacctgagatggaagtggctgctggaccagatcttccaggaggacttcagcgaggaggaggaggtggtgctgctggccaccgactacatgcagcaggtgagccagctgatcagaagcaccccccacagagtgctgcacaactacctggtgtggagagtggtggtggtgctgagcgagcacctgagcccccccttcagagaggccctgcacgagctggcccaggagatggagggcagcgacaagccccaggagctggccagagtgtgcctgggccaggccaacagacacttcggcatggccctgggcgccctgttcgtgcacgagcacttcagcgccgccagcaaggccaaggtgcagcagctggtggaggacatcaagtacatcctgggccagagactggaggagctggactggatggacgccgagaccagagccgccgccagagccaagctgcagtacatgatggtgatggtgggctaccccgacttcctgctgaagcccgacgccgtggacaaggagtacgagttcgaggtgcacgagaagacctacttcaagaacatcctgaacagcatcagattcagcatccagctgagcgtgaagaagatcagacaggaggtggacaagtggctgctgcccccccaggccctgaacgcctactacctgcccaacaagaaccagatggtgttccccgccggcatcctgcagcccaccctgtacgaccccgacttcccccagagcctgaactacggcggcatcggcaccatcatcggccacgagctgacccacggctacgacgactggggcggccagtacgacagaagcggcaacctgctgcactggtggaccgaggccagctacagcagattcctgagaaaggccgagtgcatcgtgagactgtacgacaacttcaccgtgtacaaccagagagtgaacggcaagcacaccctgggcgagaacatcgccgacatgggcggcctgaagctggcctaccacgcctaccagaagtgggtgagagagcacggccccgagcaccccctgcccagactgaagtacacccacgaccagctgttcttcatcgccttcgcccagaactggtgcatcaagagaagaagccagagcatctacctgcaggtgctgaccgacaagcacgcccccgagcactacagagtgctgggcagcgtgagccagttcgaggagttcggcagagccttccactgccccaaggacagccccatgaaccccgcccacaagtgcagcgtgtggtag

SEQ ID NO: 80380 - DNA, 1284 bp, synthetic construct
  misc_feature 1..1284: note = Description of Artificial Sequence: Synthetic coding sequence
  source 1..1284: mol_type = other DNA
atggagaccctgtgcctgagagccagcttctggctggccctggtgggctgcgtgatcagcgacaaccccgagagatacagcaccaacctgagcaaccacgtggacgacttcaccaccttcagaggcaccgagctgagcttcctggtgaccacccaccagcccaccaacctggtgctgcccagcaacggcagcatgcacaactactgcccccagcagaccaagatcaccagcgccttcaagtacatcaacaccgtgatcagctgcaccatcttcatcgtgggcatggtgggcaacgccaccctgctgagaatcatctaccagaacaagtgcatgagaaacggccccaacgccctgatcgccagcctggccctgggcgacctgatctacgtggtgatcgacctgcccatcaacgtgttcaagctgctggccggcagatggcccttcgaccacaacgacttcggcgtgttcctgtgcaagctgttccccttcctgcagaagagcagcgtgggcatcaccgtgctgaacctgtgcgccctgagcgtggacagatacagagccgtggccagctggagcagagtgcagggcatcggcatccccctggtgaccgccatcgagatcgtgagcatctggatcctgagcttcatcctggccatccccgaggccatcggcttcgtgatggtgcccttcgagtacagaggcgagcagcacaagacctgcatgctgaacgccaccagcaagttcatggagttctaccaggacgtgaaggactggtggctgttcggcttctacttctgcatgcccctggtgtgcaccgccatcttctacaccctgatgacctgcgagatgctgaacagaagaaacggcagcctgagaatcgccctgagcgagcacctgaagcagagaagagaggtggccaagaccgtgttctgcctggtggtgatcttcgccctgtgctggttccccctgcacctgagcagaatcctgaagaagaccgtgtacaacgagatggacaagaacagatgcgagctgctgagcttcctgctgctgatggactacatcggcatcaacctggccaccatgaacagctgcatcaaccccatcgccctgtacttcgtgagcaagaagttcaagaactgcttccagagctgcctgtgctgctgctgctaccagagcaagagcctgatgaccagcgtgcccatgaacggcaccagcatccagtggaagaaccacgaccagaacaaccacaacaccgacagaagcagccacaaggacagcatgaactag

SEQ ID NO: 80381 - DNA, 486 bp, synthetic construct
  misc_feature 1..486: note = Description of Artificial Sequence: Synthetic coding sequence
  source 1..486: mol_type = other DNA
atggagaccctgtgcctgagagccagcttctggctggccctggtgggctgcgtgatcagcgacaaccccgagagatacagcaccaacctgagcaaccacgtggacgacttcaccaccttcagaggcaccgagctgagcttcctggtgaccacccaccagcccaccaacctggtgctgcccagcaacggcagcatgcacaactactgcccccagcagaccaagatcaccagcgccttcaagtacatcaacaccgtgatcagctgcaccatcttcatcgtgggcatggtgggcaacgccaccctgctgagaatcatctaccagaacaagtgcatgagaaacggccccaacgccctgatcgccagcctggccctgggcgacctgatctacgtggtgatcgacctgcccatcaacgtgttcaaggtgcagagcagctgcctgctggagagctgcagcggcaactgggacagcttcggcaactgccactag

SEQ ID NO: 80382 - DNA, 957 bp, synthetic construct
  misc_feature 1..957: note = Description of Artificial Sequence: Synthetic coding sequence
  source 1..957: mol_type = other DNA
atggagaccctgtgcctgagagccagcttctggctggccctggtgggctgcgtgatcagcgacaaccccgagagatacagcaccaacctgagcaaccacgtggacgacttcaccaccttcagaggcaccgagctgagcttcctggtgaccacccaccagcccaccaacctggtgctgcccagcaacggcagcatgcacaactactgcccccagcagaccaagatcaccagcgccttcaagtacatcaacaccgtgatcagctgcaccatcttcatcgtgggcatggtgggcaacgccaccctgctgagaatcatctaccagaacaagtgcatgagaaacggccccaacgccctgatcgccagcctggccctgggcgacctgatctacgtggtgatcgacctgcccatcaacgtgttcaagttctaccaggacgtgaaggactggtggctgttcggcttctacttctgcatgcccctggtgtgcaccgccatcttctacaccctgatgacctgcgagatgctgaacagaagaaacggcagcctgagaatcgccctgagcgagcacctgaagcagagaagagaggtggccaagaccgtgttctgcctggtggtgatcttcgccctgtgctggttccccctgcacctgagcagaatcctgaagaagaccgtgtacaacgagatggacaagaacagatgcgagctgctgagcttcctgctgctgatggactacatcggcatcaacctggccaccatgaacagctgcatcaaccccatcgccctgtacttcgtgagcaagaagttcaagaactgcttccagagctgcctgtgctgctgctgctaccagagcaagagcctgatgaccagcgtgcccatgaacggcaccagcatccagtggaagaaccacgaccagaacaaccacaacaccgacagaagcagccacaaggacagcatgaactag

SEQ ID NO: 80383 - DNA, 564 bp, synthetic construct
  misc_feature 1..564: note = Description of Artificial Sequence: Synthetic coding sequence
  source 1..564: mol_type = other DNA
atggagaccctgtgcctgagagccagcttctggctggccctggtgggctgcgtgatcagcgacaaccccgagagatacagcaccaacctgagcaaccacgtggacgacttcaccaccttcagaggcaccgagctgagcttcctggtgaccacccaccagcccaccaacctggtgctgcccagcaacggcagcatgcacaactactgcccccagcagaccaagatcaccagcgccttcaagtacatcaacaccgtgatcagctgcaccatcttcatcgtgggcatggtgggcaacgccaccctgctgagaatcatctaccagaacaagtgcatgagaaacggccccaacgccctgatcgccagcctggccctgggcgacctgatctacgtggtgatcgacctgcccatcaacgtgttcaagctgctggccggcagatggcccttcgaccacaacgacttcggcgtgttcctgtgcaagctgttccccttcctgcagaagagcagcgtgggcatcaccgtgctgaacctgtgcgccctgagcgtggacagaaagaccgagatgtag

SEQ ID NO: 80384 - DNA, 957 bp, synthetic construct; identical to SEQ ID NO: 80382
  misc_feature 1..957: note = Description of Artificial Sequence: Synthetic coding sequence
  source 1..957: mol_type = other DNA

SEQ ID NO: 80385 - DNA, 1179 bp, synthetic construct
  misc_feature 1..1179: note = Description of Artificial Sequence: Synthetic coding sequence
  source 1..1179: mol_type = other DNA
atggaggagcagcagcccgagcccaagagccagagagacagcgccctgggcgccgccgccgccgccacccccggcggcctgagcctgagcctgagccccggcgccagcggcagcagcggcagcggcagcgacggcgacagcgtgcccgtgagcccccagcccgccccccccagcccccccgccgccccctgcctgccccccctggcccaccacccccacctgcccccccaccccccccccccccccccccagcacctggccgcccccgcccaccagccccagcccgccgcccagctgcacagaaccaccaacttcttcatcgacaacatcctgagacccgacttcggctgcaagaaggagcagccccccccccagctgctggtggccgccgccgccagaggcggcgccggcggcggcggcagagtggagagagacagaggccagaccgccgccggcagagaccccgtgcaccccctgggcaccagagcccccggcgccgccagcctgctgtgcgcccccgacgccaactgcggcccccccgacggcagccagcccgccgccgccggcgccggcgccagcaaggccggcaaccccgccgccgccgccgccgccgccgccgccgccgtggccgccgccgccgccgccgccgccgccaagcccagcgacaccggcggcggcggcagcggcggcggcgccggcagccccggcgcccagggcaccaagtaccccgagcacggcaaccccgccatcctgctgatgggcagcgccaacggcggccccgtggtgaagaccgacagccagcagcccctggtgtggcccgcctgggtgtactgcaccagatacagcgacagacccagcagcggccccagaaccagaaagctgaagaagaagaagaacgagaaggaggacaagagacccagaaccgccttcaccgccgagcagctgcagagactgaaggccgagttccaggccaacagatacatcaccgagcagagaagacagaccctggcccaggagctgagcctgaacgagagccagatcaagatctggttccagaacaagagagccaagatcaagaaggccaccggcatcaagaacggcctggccctgcacctgatggcccagggcctgtacaaccacagcaccaccaccgtgcaggacaaggacgagagcgagtag

SEQ ID NO: 80386 - DNA, 1002 bp, synthetic construct
  misc_feature 1..1002: note = Description of Artificial Sequence: Synthetic coding sequence
  source 1..1002: mol_type = other DNA
atggaggagaacgaccccaagcccggcgaggccgccgccgccgtggagggccagagacagcccgagagcagccccggcggcggcagcggcggcggcggcggcagcagccccggcgaggccgacaccggcagaagaagagccctgatgctgcccgccgtgctgcaggcccccggcaaccaccagcacccccacagaatcaccaacttcttcatcgacaacatcctgagacccgagttcggcagaagaaaggacgccggcacctgctgcgccggcgccggcggcggcagaggcggcggcgccggcggcgagggcggcgccagcggcgccgagggcggcggcggcgccggcggcagcgagcagctgctgggcagcggcagcagagagcccagacagaaccccccctgcgcccccggcgccggcggccccctgcccgccgccggcagcgacagccccggcgacggcgagggcggcagcaagaccctgagcctgcacggcggcgccaagaagggcggcgaccccggcggccccctggacggcagcctgaaggccagaggcctgggcggcggcgacctgagcgtgagcagcgacagcgacagcagccaggccggcgccaacctgggcgcccagcccatgctgtggcccgcctgggtgtactgcaccagatacagcgacagacccagcagcggccccagaagcagaaagcccaagaagaagaaccccaacaaggaggacaagagacccagaaccgccttcaccgccgagcagctgcagagactgaaggccgagttccagaccaacagatacctgaccgagcagagaagacagagcctggcccaggagctgagcctgaacgagagccagatcaagatctggttccagaacaagagagccaagatcaagaaggccaccggcaacaagaacaccctggccgtgcacctgatggcccagggcctgtacaaccacagcaccaccgccaaggagggcaagagcgacagcgagtag

SEQ ID NO: 80387 - DNA, 2184 bp, synthetic construct
  misc_feature 1..2184: note = Description of Artificial Sequence: Synthetic coding sequence
  source 1..2184: mol_type = other DNA
atgcccccccccgccgacatcgtgaaggtggccatcgagtggcccggcgcctaccccaagctgatggagatcgaccagaagaagcccctgagcgccatcatcaaggaggtgtgcgacggctggagcctggccaaccacgagtacttcgccctgcagcacgccgacagcagcaacttctacatcaccgagaagaacagaaacgagatcaagaacggcaccatcctgagactgaccaccagccccgcccagaacgcccagcagctgcacgagagaatccagagcagcagcatggacgccaagctggaggccctgaaggacctggccagcctgagcagagacgtgaccttcgcccaggagttcatcaacctggacggcatcagcctgctgacccagatggtggagagcggcaccgagagataccagaagctgcagaagatcatgaagccctgcttcggcgacatgctgagcttcaccctgaccgccttcgtggagctgatggaccacggcatcgtgagctgggacaccttcagcgtggccttcatcaagaagatcgccagcttcgtgaacaagagcgccatcgacatcagcatcctgcagagaagcctggccatcctggagagcatggtgctgaacagccacgacctgtaccagaaggtggcccaggagatcaccatcggccagctgatcccccacctgcagggcagcgaccaggagatccagacctacaccatcgccgtgatcaacgccctgttcctgaaggcccccgacgagagaagacaggagatggccaacatcctggcccagaagcagctgagaagcatcatcctgacccacgtgatcagagcccagagagccatcaacaacgagatggcccaccagctgtacgtgctgcaggtgctgaccttcaacctgctggaggacagaatgatgaccaagatggacccccaggaccaggcccagagagacatcatcttcgagctgagaagaatcgccttcgacgccgagagcgagcccaacaacagcagcggcagcatggagaagagaaagagcatgtacaccagagactacaagaagctgggcttcatcaaccacgtgaaccccgccatggacttcacccagaccccccccggcatgctggccctggacaacatgctgtacttcgccaagcaccaccaggacgcctacatcagaatcgtgctggagaacagcagcagagaggacaagcacgagtgccccttcggcagaagcagcatcgagctgaccaagatgctgtgcgagatcctgaaggtgggcgagctgcccagcgagacctgcaacgacttccaccccatgttcttcacccacgacagaagcttcgaggagttcttctgcatctgcatccagctgctgaacaagacctggaaggagatgagagccaccagcgaggacttcaacaaggtgatgcaggtggtgaaggagcaggtgatgagagccctgaccaccaagcccagcagcctggaccagttcaagagcaagctgcagaacctgagctacaccgagatcctgaagatcagacagagcgagagaatgaaccaggaggacttccagagcagacccatcctggagctgaaggagaagatccagcccgagatcctggagctgatcaagcagcagagactgaacagactggtggagggcacctgcttcagaaagctgaacgccagaagaagacaggacaagttctggtactgcagactgagccccaaccacaaggtgctgcactacggcgacctggaggagagcccccagggcgaggtgccccacgacagcctgcaggacaagctgcccgtggccgacatcaaggccgtggtgaccggcaaggactgcccccacatgaaggagaagggcgccctgaagcagaacaaggaggtgctggagctggccttcagcatcctgtacgacagcaactgccagctgaacttcatcgcccccgacaagcacgagtactgcatctggaccgacggcctgaacgccctgctgggcaaggacatgatgagcgacctgaccagaaacgacctggacaccctgctgagcatggagatcaagctgagactgctggacctggagaacatccagatccccgacgcccccccccccatccccaaggagcccagcaactacgacttcgtgtacgactgcaactag

SEQ ID NO: 80388 - DNA, 1290 bp, synthetic construct
  misc_feature 1..1290: note = Description of Artificial Sequence: Synthetic coding sequence
  source 1..1290: mol_type = other DNA
atgagcgagcaccagaaggagcagaccctggacacccccagcctgagaaccgtgaccctgaccgtgagagtgcacggcttcatcctggaggtgagcaagaccaagaacccccccatccccgacaccttctggccccccagatgggaccacagacccagccccggcggcgagaccaacgcctactgccagatgaaccacgtgaaccccgccatggacttcacccagaccccccccggcatgctggccctggacaacatgctgtacttcgccaagcaccaccaggacgcctacatcagaatcgtgctggagaacagcagcagagaggacaagcacgagtgccccttcggcagaagcagcatcgagctgaccaagatgctgtgcgagatcctgaaggtgggcgagctgcccagcgagacctgcaacgacttccaccccatgttcttcacccacgacagaagcttcgaggagttcttctgcatctgcatccagctgctgaacaagacctggaaggagatgagagccaccagcgaggacttcaacaaggtgatgcaggtggtgaaggagcaggtgatgagagccctgaccaccaagcccagcagcctggaccagttcaagagcaagctgcagaacctgagctacaccgagatcctgaagatcagacagagcgagagaatgaaccaggaggacttccagagcagacccatcctggagctgaaggagaagatccagcccgagatcctggagctgatcaagcagcagagactgaacagactggtggagggcacctgcttcagaaagctgaacgccagaagaagacaggacaagttctggtactgcagactgagccccaaccacaaggtgctgcactacggcgacctggaggagagcccccagggcgaggtgccccacgacagcctgcaggacaagctgcccgtggccgacatcaaggccgtggtgaccggcaaggactgcccccacatgaaggagaagggcgccctgaagcagaacaaggaggtgctggagctggccttcagcatcctgtacgacagcaactgccagctgaacttcatcgcccccgacaagcacgagtactgcatctggaccgacggcctgaacgccctgctgggcaaggacatgatgagcgacctgaccagaaacgacctggacaccctgctgagcatggagatcaagctgagactgctggacctggagaacatccagatccccgacgcccccccccccatccccaaggagcccagcaactacgacttcgtgtacgactgcaactag

SEQ ID NO: 80389 - DNA, 1896 bp, synthetic construct
  misc_feature 1..1896: note = Description of Artificial Sequence: Synthetic coding sequence
  source 1..1896: mol_type = other DNA
atggacgccaagctggaggccctgaaggacctggccagcctgagcagagacgtgaccttcgcccaggagttcatcaacctggacggcatcagcctgctgacccagatggtggagagcggcaccgagagataccagaagctgcagaagatcatgaagccctgcttcggcgacatgctgagcttcaccctgaccgccttcgtggagctgatggaccacggcatcgtgagctgggacaccttcagcgtggccttcatcaagaagatcgccagcttcgtgaacaagagcgccatcgacatcagcatcctgcagagaagcctggccatcctggagagcatggtgctgaacagccacgacctgtaccagaaggtggcccaggagatcaccatcggccagctgatcccccacctgcagggcagcgaccaggagatccagacctacaccatcgccgtgatcaacgccctgttcctgaaggcccccgacgagagaagacaggagatggccaacatcctggcccagaagcagctgagaagcatcatcctgacccacgtgatcagagcccagagagccatcaacaacgagatggcccaccagctgtacgtgctgcaggtgctgaccttcaacctgctggaggacagaatgatgaccaagatggacccccaggaccaggcccagagagacatcatcttcgagctgagaagaatcgccttcgacgccgagagcgagcccaacaacagcagcggcagcatggagaagagaaagagcatgtacaccagagactacaagaagctgggcttcatcaaccacgtgaaccccgccatggacttcacccagaccccccccggcatgctggccctggacaacatgctgtacttcgccaagcaccaccaggacgcctacatcagaatcgtgctggagaacagcagcagagaggacaagcacgagtgccccttcggcagaagcagcatcgagctgaccaagatgctgtgcgagatcctgaaggtgggcgagctgcccagcgagacctgcaacgacttccaccccatgttcttcacccacgacagaagcttcgaggagttcttctgcatctgcatccagctgctgaacaagacctggaaggagatgagagccaccagcgaggacttcaacaaggtgatgcaggtggtgaaggagcaggtgatgagagccctgaccaccaagcccagcagcctggaccagttcaagagcaagctgcagaacctgagctacaccgagatcctgaagatcagacagagcgagagaatgaaccaggaggacttccagagcagacccatcctggagctgaaggagaagatccagcccgagatcctggagctgatcaagcagcagagactgaacagactggtggagggcacctgcttcagaaagctgaacgccagaagaagacaggacaagttctggtactgcagactgagccccaaccacaaggtgctgcactacggcgacctggaggagagcccccagggcgaggtgccccacgacagcctgcaggacaagctgcccgtggccgacatcaaggccgtggtgaccggcaaggactgcccccacatgaaggagaagggcgccctgaagcagaacaaggaggtgctggagctggccttcagcatcctgtacgacagcaactgccagctgaacttcatcgcccccgacaagcacgagtactgcatctggaccgacggcctgaacgccctgctgggcaaggacatgatgagcgacctgaccagaaacgacctggacaccctgctgagcatggagatcaagctgagactgctggacctggagaacatccagatccccgacgcccccccccccatccccaaggagcccagcaactacgacttcgtgtacgactgcaactag

SEQ ID NO: 80390 - DNA, 744 bp, synthetic construct
  misc_feature 1..744: note = Description of Artificial Sequence: Synthetic coding sequence
  source 1..744: mol_type = other DNA
atgcaggtggtgaaggagcaggtgatgagagccctgaccaccaagcccagcagcctggaccagttcaagagcaagctgcagaacctgagctacaccgagatcctgaagatcagacagagcgagagaatgaaccaggaggacttccagagcagacccatcctggagctgaaggagaagatccagcccgagatcctggagctgatcaagcagcagagactgaacagactggtggagggcacctgcttcagaaagctgaacgccagaagaagacaggacaagttctggtactgcagactgagccccaaccacaaggtgctgcactacggcgacctggaggagagcccccagggcgaggtgccccacgacagcctgcaggacaagctgcccgtggccgacatcaaggccgtggtgaccggcaaggactgcccccacatgaaggagaagggcgccctgaagcagaacaaggaggtgctggagctggccttcagcatcctgtacgacagcaactgccagctgaacttcatcgcccccgacaagcacgagtactgcatctggaccgacggcctgaacgccctgctgggcaaggacatgatgagcgacctgaccagaaacgacctggacaccctgctgagcatggagatcaagctgagactgctggacctggagaacatccagatccccgacgcccccccccccatccccaaggagcccagcaactacgacttcgtgtacgactgcaactag

SEQ ID NO: 80391 - DNA, 744 bp, synthetic construct; identical to SEQ ID NO: 80390
  misc_feature 1..744: note = Description of Artificial Sequence: Synthetic coding sequence
  source 1..744: mol_type = other DNA

SEQ ID NO: 80392 - DNA, 2184 bp, synthetic construct; identical to SEQ ID NO: 80387
  misc_feature 1..2184: note = Description of Artificial Sequence: Synthetic coding sequence
  source 1..2184: mol_type = other DNA

SEQ ID NO: 80393 - DNA, 180 bp, synthetic construct
  misc_feature 1..180: note = Description of Artificial Sequence: Synthetic coding sequence
  source 1..180: mol_type = other DNA
atgcccccccccgccgacatcgtgaaggtggccatcgagtggcccggcgcctaccccaagctgatggagatcgaccagaagaagcccctgagcgccatcatcaaggaggtgtgcgacggctggagcctggccaaccacgagtacttcgccctgcagcacgccgacagcagcaacttctag

SEQ ID NO: 80394 - DNA, 2184 bp, synthetic construct; identical to SEQ ID NO: 80387
  misc_feature 1..2184: note = Description of Artificial Sequence: Synthetic coding sequence
  source 1..2184: mol_type = other DNA

SEQ ID NO: 80395 - DNA, 246 bp, synthetic construct
  misc_feature 1..246: note = Description of Artificial Sequence: Synthetic coding sequence
  source 1..246: mol_type = other DNA
atgcccccccccgccgacatcgtgaaggtggccatcgagtggcccggcgcctaccccaagctgatggagatcgaccagaagaagcccctgagcgccatcatcaaggaggtgtgcgacggctggagcctggccaaccacgagtacttcgccctgcagcacgccgacagcagcaacttctacatcaccgagaagaacagaaacgagatcaagaacggcaccatcctgagactgaccaccagcccctag

SEQ ID NO: 80396 - DNA, 450 bp, synthetic construct
  misc_feature 1..450: note = Description of Artificial Sequence: Synthetic coding sequence
  source 1..450: mol_type = other DNA
atgcccccccccgccgacatcgtgaaggtggccatcgagtggcccggcgcctaccccaagctgatggagatcgaccagaagaagcccctgagcgccatcatcaaggaggtgtgcgacggctggagcctggccaaccacgagtacttcgccctgcagcacgccgacagcagcaacttctacatcaccgagaagaacagaaacgagatcaagaacggcaccatcctgagactgaccaccagccccgcccagaacgcccagcagctgcacgagagaatccagagcagcagcatggacgccaagctggaggccctgaaggacctggccagcctgagcagagacgtgaccttcgcccaggagttcatcaacctggacggcatcagcctgctgacccagatggtggagagcggcaccgagagataccagaagctgcagaagatcatgaagccctag

SEQ ID NO: 80397 - DNA, 2163 bp, synthetic construct
  misc_feature 1..2163: note = Description of Artificial Sequence: Synthetic coding sequence
  source 1..2163: mol_type = other DNA
atgcccccccccagcgacatcgtgaaggtggccatcgagtggcccggcgccaacgcccagctgctggagatcgaccagaagagacccctggccagcatcatcaaggaggtgtgcgacggctggagcctgcccaaccccgagtactacaccctgagatacgccgacggcccccagctgtacatcaccgagcagaccagaagcgacatcaagaacggcaccatcctgcagctggccatcagccccagcagagccgccagacagctgatggagagaacccagagcagcaacatggagaccagactggacgccatgaaggagctggccaagctgagcgccgacgtgaccttcgccaccgagttcatcaacatggacggcatcatcgtgctgaccagactggtggagagcggcaccaagctgctgagccactacagcgagatgctggccttcaccctgaccgccttcctggagctgatggaccacggcatcgtgagctgggacatggtgagcatcaccttcatcaagcagatcgccggctacgtgagccagcccatggtggacgtgagcatcctgcagagaagcctggccatcctggagagcatggtgctgaacagccagagcctgtaccagaagatcgccgaggagatcaccgtgggccagctgatcagccacctgcaggtgagcaaccaggagatccagacctacgccatcgccctgatcaacgccctgttcctgaaggcccccgaggacaagagacaggacatggccaacgccttcgcccagaagcacctgagaagcatcatcctgaaccacgtgatcagaggcaacagacccatcaagaccgagatggcccaccagctgtacgtgctgcaggtgctgaccttcaacctgctggaggagagaatgatgaccaagatggaccccaacgaccaggcccagagagacatcatcttcgagctgagaagaatcgccttcgacgccgagagcgaccccagcaacgcccccggcagcggcaccgagaagagaaaggccatgtacaccaaggactacaagatgctgggcttcaccaaccacatcaaccccgccatggacttcacccagaccccccccggcatgctggccctggacaacatgctgtacctggccaaggtgcaccaggacacctacatcagaatcgtgctggagaacagcagcagagaggacaagcacgagtgccccttcggcagaagcgccatcgagctgaccaagatgctgtgcgagatcctgcaggtgggcgagctgcccaacgagggcagaaacgactaccaccccatgttcttcacccacgacagagccttcgaggagctgttcggcatctgcatccagctgctgaacaagacctggaaggagatgagagccaccgccgaggacttcaacaaggtgatgcaggtggtgagagagcagatcaccagagccctgcccagcaagcccaacagcctggaccagttcaagagcaagctgagaagcctgagctacagcgagatcctgagactgagacagagcgagagaatgagccaggacgacttccagagcccccccatcgtggagctgagagagaagatccagcccgagatcctggagctgatcaagcagcagagactgaacagactgtgcgagggcagcagcttcagaaagatcggcaacagaagaagacaggagagattctggtactgcagactggccctgaaccacaaggtgctgcactacggcgacctggacgacaacccccagggcgaggtgaccttcgagagcctgcaggagaagatccccgtggccgacatcaaggccatcgtgaccggcaaggactgcccccacatgaaggagaagagcgccctgaagcagaacaaggaggtgctggagctggccttcagcatcctgtacgaccccgacgagaccctgaacttcatcgcccccaacaagtacgagtactgcatctggatcgacggcctgagcgccctgctgggcaaggacatgagcagcgagctgaccaagagcgacctggacaccctgctgagcatggagatgaagctgagactgctggacctggagaacatccagatccccgaggcccccccccccatccccaaggagcccagcagctacgacttcgtgtaccactacggctag

SEQ ID NO: 80398 - DNA, 2157 bp, synthetic construct
  misc_feature 1..2157: note = Description of Artificial Sequence: Synthetic coding sequence
  source 1..2157: mol_type = other DNA
atgcccccccccagcgacatcgtgaaggtggccatcgagtggcccggcgccaacgcccagctgctggagatcgaccagaagagacccctggccagcatcatcaaggaggtgtgcgacggctggagcctgcccaaccccgagtactacaccctgagatacgccgacggcccccagctgtacatcaccgagcagaccagaagcgacatcaagaacggcaccatcctgcagctggccatcagccccagcagagccgccagacagctgatggagagaacccagagcagcaacatggagaccagactggacgccatgaaggagctggccaagctgagcgccgacgtgaccttcgccaccgagttcatcaacatggacggcatcatcgtgctgaccagactggtggagagcggcaccaagctgctgagccacgagatgctggccttcaccctgaccgccttcctggagctgatggaccacggcatcgtgagctgggacatggtgagcatcaccttcatcaagcagatcgccggctacgtgagccagcccatggtggacgtgagcatcctgcagagaagcctggccatcctggagagcatggtgctgaacagccagagcctgtaccagaagatcgccgaggagatcaccgtgggccagctgatcagccacctgcaggtgagcaaccaggagatccagacctacgccatcgccctgatcaacgccctgttcctgaaggcccccgaggacaagagacaggacatggccaacgccttcgcccagaagcacctgagaagcatcatcctgaaccacgtgatcagaggcaacagacccatcaagaccgagatggcccaccagctgtacgtgctgcaggtgctgaccttcaacctgctggaggagagaatgatgaccaagatggaccccaacgaccaggcccagagagacatcatcttcgagctgagaagaatcgccttcgacgccgagagcgaccccagcaacgcccccggcagcggcaccgagaagagaaaggccatgtacaccaaggactacaagatgctgggcttcaccaaccacatcaaccccgccatggacttcacccagaccccccccggcatgctggccctggacaacatgctgtacctggccaaggtgcaccaggacacctacatcagaatcgtgctggagaacagcagcagagaggacaagcacgagtgccccttcggcagaagcgccatcgagctgaccaagatgctgtgcgagatcctgcaggtgggcgagctgcccaacgagggcagaaacgactaccaccccatgttcttcacccacgacagagccttcgaggagctgttcggcatctgcatccagctgctgaacaagacctggaaggagatgagagccaccgccgaggacttcaacaaggtgatgcaggtggtgagagagcagatcaccagagccctgcccagcaagcccaacagcctggaccagttcaagagcaagctgagaagcctgagctacagcgagatcctgagactgagacagagcgagagaatgagccaggacgacttccagagcccccccatcgtggagctgagagagaagatccagcccgagatcctggagctgatcaagcagcagagactgaacagactgtgcgagggcagcagcttcagaaagatcggcaacagaagaagacaggagagattctggtactgcagactggccctgaaccacaaggtgctgcactacggcgacctggacgacaacccccagggcgaggtgaccttcgagagcctgcaggagaagatccccgtggccgacatcaaggccatcgtgaccggcaaggactgcccccacatgaaggagaagagcgccctgaagcagaacaaggaggtgctggagctggccttcagcatcctgtacgaccccgacgagaccctgaacttcatcgcccccaacaagtacgagtactgcatctggatcgacggcctgagcgccctgctgggcaaggacatgagcagcgagctgaccaagagcgacctggacaccctgctgagcatggagatgaagctgagactgctggacctggagaacatccagatccccgaggcccccccccccatccccaaggagcccagcagctacgacttcgtgtaccactacggctag

SEQ ID NO: 80399 - DNA, 1899 bp, synthetic construct
  misc_feature 1..1899: note = Description of Artificial Sequence: Synthetic coding sequence
  source 1..1899: mol_type = other DNA
atggagagaacccagagcagcaacatggagaccagactggacgccatgaaggagctggccaagctgagcgccgacgtgaccttcgccaccgagttcatcaacatggacggcatcatcgtgctgaccagactggtggagagcggcaccaagctgctgagccactacagcgagatgctggccttcaccctgaccgccttcctggagctgatggaccacggcatcgtgagctgggacatggtgagcatcaccttcatcaagcagatcgccggctacgtgagccagcccatggtggacgtgagcatcctgcagagaagcctggccatcctggagagcatggtgctgaacagccagagcctgtaccagaagatcgccgaggagatcaccgtgggccagctgatcagccacctgcaggtgagcaaccaggagatccagacctacgccatcgccctgatcaacgccctgttcctgaaggcccccgaggacaagagacaggacatggccaacgccttcgcccagaagcacctgagaagcatcatcctgaaccacgtgatcagaggcaacagacccatcaagaccgagatggcccaccagctgtacgtgctgcaggtgctgaccttcaacctgctggaggagagaatgatgaccaagatggaccccaacgaccaggcccagagagacatcatcttcgagctgagaagaatcgccttcgacgccgagagcgaccccagcaacgcccccggcagcggcaccgagaagagaaaggccatgtacaccaaggactacaagatgctgggcttcaccaaccacatcaaccccgccatggacttcacccagaccccccccggcatgctggccctggacaacatgctgtacctggccaaggtgcaccaggacacctacatcagaatcgtgctggagaacagcagcagagaggacaagcacgagtgccccttcggcagaagcgccatcgagctgaccaagatgctgtgcgagatcctgcaggtgggcgagctgcccaacgagggcagaaacgactaccaccccatgttcttcacccacgacagagccttcgaggagctgttcggcatctgcatccagctgctgaacaagacctggaaggagatgagagccaccgccgaggacttcaacaaggtgatgcaggtggtgagagagcagatcaccagagccctgcccagcaagcccaacagcctggaccagttcaagagcaagctgagaagcctgagctacagcgagatcctgagactgagacagagcgagagaatgagccaggacgacttccagagcccccccatcgtggagctgagagagaagatccagcccgagatcctggagctgatcaagcagcagagactgaacagactgtgcgagggcagcagcttcagaaagatcggcaacagaagaagacaggagagattctggtactgcagactggccctgaaccacaaggtgctgcactacggcgacctggacgacaacccccagggcgaggtgaccttcgagagcctgcaggagaagatccccgtggccgacatcaaggccatcgtgaccggcaaggactgcccccacatgaaggagaagagcgccctgaagcagaacaaggaggtgctggagctggccttcagcatcctgtacgaccccgacgagaccctgaacttcatcgcccccaacaagtacgagtactgcatctggatcgacggcctgagcgccctgctgggcaaggacatgagcagcgagctgaccaagagcgacctggacaccctgctgagcatggagatgaagctgagactgctggacctggagaacatccagatccccgaggcccccccccccatccccaaggagcccagcagctacgacttcgtgtaccactacggctag

SEQ ID NO: 80400 - DNA, 2163 bp, synthetic construct; identical to SEQ ID NO: 80397
  misc_feature 1..2163: note = Description of Artificial Sequence: Synthetic coding sequence
  source 1..2163: mol_type = other DNA

SEQ ID NO: 80401 - DNA, 804 bp, synthetic construct
  misc_feature 1..804: note = Description of Artificial Sequence: Synthetic coding sequence
  source 1..804: mol_type = other DNA
gaggagatcaccgtgggccagctgatcagccacctgcaggtgagcaaccaggagatccagacctacgccatcgccctgatcaacgccctgttcctgaaggcccccgaggacaagagacaggacatggccaacgccttcgcccagaagcacctgagaagcatcatcctgaaccacgtgatcagaggcaacagacccatcaagaccgagatggcccaccagctgtacgtgctgcaggtgctgaccttcaacctgctggaggagagaatgatgaccaagatggaccccaacgaccaggcccagagagacatcatcttcgagctgagaagaatcgccttcgacgccgagagcgaccccagcaacgcccccggcagcggcaccgagaagagaaaggccatgtacaccaaggactacaagatgctgggcttcaccaaccacatcaaccccgccatggacttcacccagaccccccccggcatgctggccctggacaacatgctgtacctggccaaggtgcaccaggacacctacatcagaatcgtgctggagaacagcagcagagaggacaagcacgagtgccccttcggcagaagcgccatcgagctgaccaagatgctgtgcgagatcctgcaggtgggcgagctgcccaacgagggcagaaacgactaccaccccatgttcttcacccacgacagagccttcgaggagctgttcggcatctgcatccagctgctgaacaagacctggaaggagatgagagccaccgccgaggacttcaacaaggtgagcgtgagcggcctgctgtag

SEQ ID NO: 80402 - DNA, 2199 bp, synthetic construct
  misc_feature 1..2199: note = Description of Artificial Sequence: Synthetic coding sequence
  source 1..2199: mol_type = other DNA
atgcccccccccagcgacatcgtgaaggtggccatcgagtggcccggcgccaacgcccagctgctggagatcgaccagaagagacccctggccagcatcatcaaggaggtgtgcgacggctggagcctgcccaaccccgagtactacaccctgagatacgccgacggcccccagctgtacatcaccgagcagaccagaagcgacatcaagaacggcaccatcctgcagctggccatcagccccagcagagccgccagacagctgatggagagaacccagagcagcaacatggagaccagactggacgccatgaaggagctggccaagctgagcgccgacgtgaccttcgccaccgagttcatcaacatggacggcatcatcgtgctgaccagactggtggagagcggcaccaagctgctgagccactacagcgagatgctggccttcaccctgaccgccttcctggagctgatggaccacggcatcgtgagctgggacatggtgagcatcaccttcatcaagcagatcgccggctacgtgagccagcccatggtggacgtgagcatcctgcagagaagcctggccatcctggagagcatggtgctgaacagccagagcctgtaccagaagatcgccgaggagatcaccgtgggccagctgatcagccacctgcaggtgagcaaccaggagatccagacctacgccatcgccctgatcaacgccctgttcctgaaggcccccgaggacaagagacaggacaagcacctgaaccccctggacctgcccgtgaccgacatggccaacgccttcgcccagaagcacctgagaagcatcatcctgaaccacgtgatcagaggcaacagacccatcaagaccgagatggcccaccagctgtacgtgctgcaggtgctgaccttcaacctgctggaggagagaatgatgaccaagatggaccccaacgaccaggcccagagagacatcatcttcgagctgagaagaatcgccttcgacgccgagagcgaccccagcaacgcccccggcagcggcaccgagaagagaaaggccatgtacaccaaggactacaagatgctgggcttcaccaaccacatcaaccccgccatggacttcacccagaccccccccggcatgctggccctggacaacatgctgtacctggccaaggtgcaccaggacacctacatcagaatcgtgctggagaacagcagcagagaggacaagcacgagtgccccttcggcagaagcgccatcgagctgaccaagatgctgtgcgagatcctgcaggtgggcgagctgcccaacgagggcagaaacgactaccaccccatgttcttcacccacgacagagccttcgaggagctgttcggcatctgcatccagctgctgaacaagacctggaaggagatgagagccaccgccgaggacttcaacaaggtgatgcaggtggtgagagagcagatcaccagagccctgcccagcaagcccaacagcctggaccagttcaagagcaagctgagaagcctgagctacagcgagatcctgagactgagacagagcgagagaatgagccaggacgacttccagagcccccccatcgtggagctgagagagaagatccagcccgagatcctggagctgatcaagcagcagagactgaacagactgtgcgagggcagcagcttcagaaagatcggcaacagaagaagacaggagagattctggtactgcagactggccctgaaccacaaggtgctgcactacggcgacctggacgacaacccccagggcgaggtgaccttcgagagcctgcaggagaagatccccgtggccgacatcaaggccatcgtgaccggcaaggactgcccccacatgaaggagaagagcgccctgaagcagaacaaggaggtgctggagctggccttcagcatcctgtacgaccccgacgagaccctgaacttcatcgcccccaacaagtacgagtactgcatctggatcgacggcctgagcgccctgctgggcaaggacatgagcagcgagctgaccaagagcgacctggacaccctgctgagcatggagatgaagctgagactgctggacctggagaacatccagatccccgaggcccccccccccatccccaaggagcccagcagctacgacttcgtgtaccactacggctag

SEQ ID NO: 80403 - DNA, 1614 bp, synthetic construct
  misc_feature 1..1614: note = Description of Artificial Sequence: Synthetic coding sequence
  source 1..1614: mol_type = other DNA
atggtggacgtgagcatcctgcagagaagcctggccatcctggagagcatggtgctgaacagccagagcctgtaccagaagatcgccgaggagatcaccgtgggccagctgatcagccacctgcaggtgagcaaccaggagatccagacctacgccatcgccctgatcaacgccctgttcctgaaggcccccgaggacaagagacaggacatggccaacgccttcgcccagaagcacctgagaagcatcatcctgaaccacgtgatcagaggcaacagacccatcaagaccgagatggcccaccagctgtacgtgctgcaggtgctgaccttcaacctgctggaggagagaatgatgaccaagatggaccccaacgaccaggcccagagagacatcatcttcgagctgagaagaatcgccttcgacgccgagagcgaccccagcaacgcccccggcagcggcaccgagaagagaaaggccatgtacaccaaggactacaagatgctgggcttcaccaaccacatcaaccccgccatggacttcacccagaccccccccggcatgctggccctggacaacatgctgtacctggccaaggtgcaccaggacacctacatcagaatcgtgctggagaacagcagcagagaggacaagcacgagtgccccttcggcagaagcgccatcgagctgaccaagatgctgtgcgagatcctgcaggtgggcgagctgcccaacgagggcagaaacgactaccaccccatgttcttcacccacgacagagccttcgaggagctgttcggcatctgcatccagctgctgaacaagacctggaaggagatgagagccaccgccgaggacttcaacaaggtgatgcaggtggtgagagagcagatcaccagagccctgcccagcaagcccaacagcctggaccagttcaagagcaagctgagaagcctgagctacagcgagatcctgagactgagacagagcgagagaatgagccaggacgacttccagagcccccccatcgtggagctgagagagaagatccagcccgagatcctggagctgatcaagcagcagagactgaacagactgtgcgagggcagcagcttcagaaagatcggcaacagaagaagacaggagagattctggtactgcagactggccctgaaccacaaggtgctgcactacggcgacctggacgacaacccccagggcgaggtgaccttcgagagcctgcaggagaagatccccgtggccgacatcaaggccatcgtgaccggcaaggactgcccccacatgaaggagaagagcgccctgaagcagaacaaggaggtgctggagctggccttcagcatcctgtacgaccccgacgagaccctgaacttcatcgcccccaacaagtacgagtactgcatctggatcgacggcctgagcgccctgctgggcaaggacatgagcagcgagctgaccaagagcgacctggacaccctgctgagcatggagatgaagctgagactgctggacctggagaacatccagatccccgaggcccccccccccatccccaaggagcccagcagctacgacttcgtgtaccactacggctag

SEQ ID NO: 80404 - DNA, 1017 bp, synthetic construct
  misc_feature 1..1017: note = Description of Artificial Sequence: Synthetic coding sequence
  source 1..1017: mol_type = other DNA
atgcccccccccagcgacatcgtgaaggtggccatcgagtggcccggcgccaacgcccagctgctggagatcgaccagaagagacccctggccagcatcatcaaggaggtgtgcgacggctggagcctgcccaaccccgagtactacaccctgagatacgccgacggcccccagctgtacatcaccgagcagaccagaagcgacatcaagaacggcaccatcctgcagctggccatcagccccagcagagccgccagacagctgatggagagaacccagagcagcaacatggagaccagactggacgccatgaaggagctggccaagctgagcgccgacgtgaccttcgccaccgagttcatcaacatggacggcatcatcgtgctgaccagactggtggagagcggcaccaagctgctgagccactacagcgagatgctggccttcaccctgaccgccttcctggagctgatggaccacggcatcgtgagctgggacatggtgagcatcaccttcatcaagcagatcgccggctacgtgagccagcccatggtggacgtgagcatcctgcagagaagcctggccatcctggagagcatggtgctgaacagccagagcctgtaccagaagatcgccgaggagatcaccgtgggccagctgatcagccacctgcaggtgagcaaccaggagatccagacctacgccatcgccctgatcaacgccctgttcctgaaggcccccgaggacaagagacaggacatggccaacgccttcgcccagaagcacctgagaagcatcatcctgaaccacgtgatcagaggcaacagacccatcaagaccgagatggcccaccagctgtacgtgctgcaggtgctgaccttcaacctgctggaggagagaatgatgaccaagatggaccccaacgaccaggcccagagagacatcatcttcgagctgagaagaatcgccttcgacgccgagagcgaccccagcaacgcccccggcagcggcacctag

SEQ ID NO: 80405 - DNA, 852 bp, synthetic construct
  misc_feature 1..852: note = Description of Artificial Sequence: Synthetic coding sequence
  source 1..852: mol_type = other DNA
taccaccccatgttcttcacccacgacagagccttcgaggagctgttcggcatctgcatccagctgctgaacaagacctggaaggagatgagagccaccgccgaggacttcaacaaggtgatgcaggtggtgagagagcagatcaccagagccctgcccagcaagcccaacagcctggaccagttcaagagcaagctgagaagcctgagctacagcgagatcctgagactgagacagagcgagagaatgagccaggacgacttccagagcccccccatcgtggagctgagagagaagatccagcccgagatcctggagctgatcaagcagcagagactgaacagactgtgcgagggcagcagcttcagaaagatcggcaacagaagaagacaggagagattctggtactgcagactggccctgaaccacaaggtgctgcactacggcgacctggacgacaacccccagggcgaggtgaccttcgagagcctgcaggagaagaacatcaaggccatcgtgaccggcaaggactgcccccacatgaaggagaagagcgccctgaagcagaacaaggaggtgctggagctggccttcagcatcctgtacgaccccgacgagaccctgaacttcatcgcccccaacaagtacgagtactgcatctggatcgacggcctgagcgccctgctgggcaaggacatgagcagcgagctgaccaagagcgacctggacaccctgctgagcatggagatgaagctgagactgctggacctggagaacatccagatccccgaggcccccccccccatccccaaggagcccagcagctacgacttcgtgtaccactacggctag

SEQ ID NO: 80406 - DNA, 1359 bp, synthetic construct
  misc_feature 1..1359: note = Description of Artificial Sequence: Synthetic coding sequence
  source 1..1359: mol_type = other DNA
atgcacgtgatcagaggcaacagacccatcaagaccgagatggcccaccagctgtacgtgctgcaggtgctgaccttcaacctgctggaggagagaatgatgaccaagatggaccccaacgaccaggcccagagagacatcatcttcgagctgagaagaatcgccttcgacgccgagagcgaccccagcaacgcccccggcagcggcaccgagaagagaaaggccatgtacaccaaggactacaagatgctgggcttcaccaaccacatcaaccccgccatggacttcacccagaccccccccggcatgctggccctggacaacatgctgtacctggccaaggtgcaccaggacacctacatcagaatcgtgctggagaacagcagcagagaggacaagcacgagtgccccttcggcagaagcgccatcgagctgaccaagatgctgtgcgagatcctgcaggtgggcgagctgcccaacgagggcagaaacgactaccaccccatgttcttcacccacgacagagccttcgaggagctgttcggcatctgcatccagctgctgaacaagacctggaaggagatgagagccaccgccgaggacttcaacaaggtgatgcaggtggtgagagagcagatcaccagagccctgcccagcaagcccaacagcctggaccagttcaagagcaagctgagaagcctgagctacagcgagatcctgagactgagacagagcgagagaatgagccaggacgacttccagagcccccccatcgtggagctgagagagaagatccagcccgagatcctggagctgatcaagcagcagagactgaacagactgtgcgagggcagcagcttcagaaagatcggcaacagaagaagacaggagagattctggtactgcagactggccctgaaccacaaggtgctgcactacggcgacctggacgacaacccccagggcgaggtgaccttcgagagcctgcaggagaagatccccgtggccgacatcaaggccatcgtgaccggcaaggactgcccccacatgaaggagaagagcgccctgaagcagaacaaggaggtgctggagctggccttcagcatcctgtacgaccccgacgagaccctgaacttcatcgcccccaacaagtacgagtactgcatctggatcgacggcctgagcgccctgctgggcaaggacatgagcagcgagctgaccaagagcgacctggacaccctgctgagcatggagatgaagctgagactgctggacctggagaacatccagatccccgaggcccccccccccatccccaaggagcccagcagctacgacttcgtgtaccactacggctag

SEQ ID NO: 80407 - DNA, 2322 bp, synthetic construct
  misc_feature 1..2322: note = Description of Artificial Sequence: Synthetic coding sequence
  source 1..2322: mol_type = other DNA
atggccagaagcagcagcctgggcagagagtgcggcacccccagaagcggcctgggcaagggcggcccccccagaccccagggcccccaggccagatgcaccctgggcagaagatgcaccgtgagcggcaagtgcagaagacccagacccagctggaccatggccccccccagaaacgtggtgaagatcgccatcaagatgagagacgccatcccccagctgatccagctggaccaggccaagcccctggccgccgtgctgaaggaggtgtgcgacgcctggagcctgacccacagcgagagatacgccctgcagttcgccgacggccacagaagatacatcaccgagaacaacagagccgagatcaagaacggcagcatcctgtgcctgagcaccgcccccgacctggaggccgagcagctgctgggcggcctgcagagcaacagccccgagggcagaagagaggccctgagaagactggtgcccctggccagcgacatgatcttcgccagagaggtgatcagcagaaacggcctgcagatcctgggcaccatcatcgaggacggcgacgacctgggcgaggtgctggccctgagcctgagagccttcagcgagctgatggagcacggcgtggtgagctgggagaccctgagcatccccttcgtgagaaaggtggtgtgctacgtgaacatgaacctgatggacgccagcgtgccccccctggccctgggcctgctggagagcgtgaccctgagcagccccgccctgggccagctggtgaagagcgaggtgcccctggacagactgctggtgcacctgcaggtgatgaaccagcagctgcagaccaaggccatggccctgctgaccgccctgctgcagggcgccagccccgtggagagaaagcacatgctggactacctgtggcagagaaacctgagacagttcatctacaagaacatcatccacagcgccgcccccatgggcgacgagatggcccaccacctgtacgtgctgcaggccctgatgctgggcctgctggagcccagaatgagaacccccctggacccctacagccaggagcagagagagcagctgcaggtgctgagacaggccgccttcgaggtggagggcgagagcagcggcgccggcctgagcgccgacagaagaagaagcctgtgcgccagagagttcagaaagctgggcttcagcaacagcaaccccgcccaggacctggagagagtgccccccggcctgctggccctggacaacatgctgtacttcagcagaaacgcccccagcgcctacagcagattcgtgctggagaacagcagcagagaggacaagcacgagtgccccttcgccagaggcagcatccagctgaccgtgctgctgtgcgagctgctgagagtgggcgagccctgcagcgagaccgcccaggacttcagccccatgttcttcggccaggaccagagcttccacgagctgttctgcgtgggcatccagctgctgaacaagacctggaaggagatgagagccacccaggaggacttcgacaaggtgatgcaggtggtgagagagcagctggccagaaccctggccctgaagcccaccagcctggagctgttcagaaccaaggtgaacgccctgacctacggcgaggtgctgagactgagacagaccgagagactgcaccaggagggcaccctggccccccccatcctggagctgagagagaagctgaagcccgagctgatgggcctgatcagacagcagagactgctgagactgtgcgagggcaccctgttcagaaagatcagcagcagaagaagacaggacaagctgtggttctgctgcctgagccccaaccacaagctgctgcagtacggcgacatggaggagggcgccagcccccccaccctggagagcctgcccgagcagctgcccgtggccgacatgagagccctgctgaccggcaaggactgcccccacgtgagagagaagggcagcggcaagcagaacaaggacctgtacgagctggccttcagcatcagctacgacagaggcgaggaggaggcctacctgaacttcatcgcccccagcaagagagagttctacctgtggaccgacggcctgagcgccctgctgggcagccccatgggcagcgagcagaccagactggacctggagcagctgctgaccatggagaccaagctgagactgctggagctggagaacgtgcccatccccgagagacccccccccgtgccccccccccccaccaacttcaacttctgctacgactgcagcatcgccgagccctag

SEQ ID NO: 80408 - DNA, 2511 bp, synthetic construct
  misc_feature 1..2511: note = Description of Artificial Sequence: Synthetic coding sequence
  source 1..2511: mol_type = other DNA
atgagcaagctgagcttcagagccagagccctggacgccagcaagcccctgcccgtgttcagatgcgaggacctgcccgacctgcacgagtacgccagcatcaacagagccgtgccccagatgcccaccggcatggagaaggaggaggagagcgagcaccacctgcagagagccatcagcgcccagcaggtgtacggcgagaagagagacaacatggtgatccccgtgcccgaggccgagagcaacatcgcctactacgagagcatctaccccggcgagttcaagatgcccaagcagctgatccacatccagcccttcagcctggacgccgagcagcccgactacgacctggacagcgaggacgaggtgttcgtgaacaagctgaagaagaagatggacatctgccccctgcagttcgaggagatgatcgacagactggagaagggcagcggccagcagcccgtgagcctgcaggaggccaagctgctgctgaaggaggacgacgagctgatcagagaggtgtacgagtactggatcaagaagagaaagaactgcagaggccccagcctgatccccagcgtgaagcaggagaagagagacggcagcagcaccaacgacccctacgtggccttcagaagaagaaccgagaagatgcagaccagaaagaacagaaagaacgacgaggccagctacgagaagatgctgaagctgagaagagacctgagcagagccgtgaccatcctggagatgatcaagagaagagagaagagcaagagagagctgctgcacctgaccctggagatcatggagaagagatacaacctgggcgactacaacggcgagatcatgagcgaggtgatggcccagagacagcccatgaagcccacctacgccatccccatcatccccatcaccaacagcagccagttcaagcaccaggaggccatggacgtgaaggagttcaaggtgaacaagcaggacaaggccgacctgatcagacccaagagaaagtacgagaagaagcccaaggtgctgcccagcagcgccgccgccaccccccagcagaccagccccgccgccctgcccgtgttcaacgccaaggacctgaaccagtacgacttccccagcagcgacgaggagcccctgagccaggtgctgagcggcagcagcgaggccgaggaggacaacgaccccgacggccccttcgccttcagaagaaaggccggctgccagtactacgccccccacctggaccagaccggcaactggccctggaccagccccaaggacggcggcctgggcgacgtgagatacagatactgcctgaccaccctgaccgtgccccagagatgcatcggcttcgccagaagaagagtgggcagaggcggcagagtgctgctggacagagcccacagcgactacgacagcgtgttccaccacctggacctggagatgctgagcagcccccagcacagccccgtgaaccagttcgccaacaccagcgagaccaacaccagcgacaagagcttcagcaaggacctgagccagatcctggtgaacatcaagagctgcagatggagacacttcagacccagaacccccagcctgcacgacagcgacaacgacgagctgagctgcagaaagctgtacagaagcatcaacagaaccggcaccgcccagcccggcacccagacctgcagcaccagcacccagagcaagagcagcagcggcagcgcccacttcgccttcaccgccgagcagtaccagcagcaccagcagcagctggccctgatgcagaagcagcagctggcccagatccagcagcagcaggccaacagcaacagcagcaccaacaccagccagaacctggccagcaaccagcagaagagcggcttcagactgaacatccagggcctggagagaaccctgcagggcttcgtgagcaagaccctggacagcgccagcgcccagttcgccgccagcgccctggtgaccagcgagcagctgatgggcttcaagatgaaggacgacgtggtgctgggcatcggcgtgaacggcgtgctgcccgccagcggcgtgtacaagggcctgcacctgagcagcaccacccccaccgccctggtgcacaccagccccagcaccgccggcagcgccctgctgcagcccagcaacatcacccagaccagcagcagccacagcgccctgagccaccaggtgaccgccgccaacagcgccaccacccaggtgctgatcggcaacaacatcagactgaccgtgcccagcagcgtggccaccgtgaacagcatcgcccccatcaacgccagacacatccccagaaccctgagcgccgtgcccagcagcgccctgaagctggccgccgccgccaactgccaggtgagcaaggtgcccagcagcagcagcgtggacagcgtgcccagagagaaccacgagagcgagaagcccgccctgaacaacatcgccgacaacaccgtggccatggaggtgacctag

SEQ ID NO: 80409 - DNA, 2442 bp, synthetic construct
  misc_feature 1..2442: note = Description of Artificial Sequence: Synthetic coding sequence
  source 1..2442: mol_type = other DNA
atgagcaagctgagcttcagagccagagccctggacgccagcaagcccctgcccgtgttcagatgcgaggacctgcccgacctgcacgagtacgccagcatcaacagagccgtgccccagatgcccaccggcatggagaaggaggaggagagcgagcaccacctgcagagagccatcagcgcccagcaggtgtacggcgagaagagagacaacatggtgatccccgtgcccgaggccgagagcaacatcgcctactacgagagcatctaccccggcgagttcaagatgcccaagcagctgatccacatccagcccttcagcctggacgccgagcagcccgactacgacctggacagcgaggacgaggtgttcgtgaacaagctgaagaagaagatggacatctgccccctgcagttcgaggagatgatcgacagactggagaagggcagcggccagcagcccgtgagcctgcaggaggccaagctgctgctgaaggaggacgacgagctgatcagagaggtgtacgagtactggatcaagaagagaaagaactgcagaggccccagcctgatccccagcgtgaagcaggagaagagagacggcagcagcaccaacgacccctacgtggccttcagaagaagaaccgagaagatgcagaccagaaagaacagaaagaacgacgaggccagctacgagaagatgctgaagctgagaagagacctgagcagagccgtgaccatcctggagatgatcaagagaagagagaagagcaagagagagctgctgcacctgaccctggagatcatggagaagagatacaacctgggcgactacaacggcgagatcatgagcgaggtgatggcccagagacagcccatgaagcccacctacgccatccccatcatccccatcaccaacagcagccagttcaagcaccaggaggccatggacgtgaaggagttcaaggtgaacaagcaggacaaggccgacctgatcagacccaagagaaagtacgagaagaagcccaaggtgctgcccagcagcgccgccgccaccccccagcagaccagccccgccgccctgcccgtgttcaacgccaaggacctgaaccagtacgacttccccagcagcgacgaggagcccctgagccaggtgctgagcggcagcagcgaggccgaggaggacaacgaccccgacggccccttcgccttcagaagaaaggccggctgccagtactacgccccccacctggaccagaccggcaactggccctggaccagccccaaggacggcggcctgggcgacgtgagatacagatactgcctgaccaccctgaccgtgccccagagatgcatcggcttcgccagaagaagagtgggcagaggcggcagagtgctgctggacagagcccacagcgactacgacagcgtgttccaccacctggacctggagatgctgagcagcccccagcacagccccgtgaaccagttcgccaacaccagcgagaccaacaccagcgacaagagcttcagcaaggacctgagccagatcctggtgaacatcaagagctgcagatggagacacttcagacccagaacccccagcctgcacgacagcgacaacgacgagctgagctgcagaaagctgtacagaagcatcaacagaaccggcaccgcccagcccggcacccagacctgcagcaccagcacccagagcaagagcagcagcggcagcgcccacttcgccttcaccgccgagcagtaccagcagcaccagcagcagctggccctgatgcagaagcagcagctggcccagatccagcagcagcaggccaacagcaacagcagcaccaacaccagccagggcttcgtgagcaagaccctggacagcgccagcgcccagttcgccgccagcgccctggtgaccagcgagcagctgatgggcttcaagatgaaggacgacgtggtgctgggcatcggcgtgaacggcgtgctgcccgccagcggcgtgtacaagggcctgcacctgagcagcaccacccccaccgccctggtgcacaccagccccagcaccgccggcagcgccctgctgcagcccagcaacatcacccagaccagcagcagccacagcgccctgagccaccaggtgaccgccgccaacagcgccaccacccaggtgctgatcggcaacaacatcagactgaccgtgcccagcagcgtggccaccgtgaacagcatcgcccccatcaacgccagacacatccccagaaccctgagcgccgtgcccagcagcgccctgaagctggccgccgccgccaactgccaggtgagcaaggtgcccagcagcagcagcgtggacagcgtgcccagagagaaccacgagagcgagaagcccgccctgaacaacatcgccgacaacaccgtggccatggaggtgacctag

SEQ ID NO: 80410 - DNA, 2292 bp, synthetic construct
  misc_feature 1..2292: note = Description of Artificial Sequence: Synthetic coding sequence
  source 1..2292: mol_type = other DNA
atggagcaccacctgcagagagccatcagcgcccagcaggtgtacggcgagaagagagacaacatggtgatccccgtgcccgaggccgagagcaacatcgcctactacgagagcatctaccccggcgagttcaagatgcccaagcagctgatccacatccagcccttcagcctggacgccgagcagcccgactacgacctggacagcgaggacgaggtgttcgtgaacaagctgaagaagaagatggacatctgccccctgcagttcgaggagatgatcgacagactggagaagggcagcggccagcagcccgtgagcctgcaggaggccaagctgctgctgaaggaggacgacgagctgatcagagaggtgtacgagtactggatcaagaagagaaagaactgcagaggccccagcctgatccccagcgtgaagcaggagaagagagacggcagcagcaccaacgacccctacgtggccttcagaagaagaaccgagaagatgcagaccagaaagaacagaaagaacgacgaggccagctacgagaagatgctgaagctgagaagagacctgagcagagccgtgaccatcctggagatgatcaagagaagagagaagagcaagagagagctgctgcacctgaccctggagatcatggagaagagatacaacctgggcgactacaacggcgagatcatgagcgaggtgatggcccagagacagcccatgaagcccacctacgccatccccatcatccccatcaccaacagcagccagttcaagcaccaggaggccatggacgtgaaggagttcaaggtgaacaagcaggacaaggccgacctgatcagacccaagagaaagtacgagaagaagcccaaggtgctgcccagcagcgccgccgccaccccccagcagaccagccccgccgccctgcccgtgttcaacgccaaggacctgaaccagtacgacttccccagcagcgacgaggagcccctgagccaggtgctgagcggcagcagcgaggccgaggaggacaacgaccccgacggccccttcgccttcagaagaaaggccggctgccagtactacgccccccacctggaccagaccggcaactggccctggaccagccccaaggacggcggcctgggcgacgtgagatacagatactgcctgaccaccctgaccgtgccccagagatgcatcggcttcgccagaagaagagtgggcagaggcggcagagtgctgctggacagagcccacagcgactacgacagcgtgttccaccacctggacctggagatgctgagcagcccccagcacagccccgtgaaccagttcgccaacaccagcgagaccaacaccagcgacaagagcttcagcaaggacctgagccagatcctggtgaacatcaagagctgcagatggagacacttcagacccagaacccccagcctgcacgacagcgacaacgacgagctgagctgcagaaagctgtacagaagcatcaacagaaccggcaccgcccagcccggcacccagacctgcagcaccagcacccagagcaagagcagcagcggcagcgcccacttcgccttcaccgccgagcagtaccagcagcaccagcagcagctggccctgatgcagaagcagcagctggcccagatccagcagcagcaggccaacagcaacagcagcaccaacaccagccagggcttcgtgagcaagaccctggacagcgccagcgcccagttcgccgccagcgccctggtgaccagcgagcagctgatgggcttcaagatgaaggacgacgtggtgctgggcatcggcgtgaacggcgtgctgcccgccagcggcgtgtacaagggcctgcacctgagcagcaccacccccaccgccctggtgcacaccagccccagcaccgccggcagcgccctgctgcagcccagcaacatcacccagaccagcagcagccacagcgccctgagccaccaggtgaccgccgccaacagcgccaccacccaggtgctgatcggcaacaacatcagactgaccgtgcccagcagcgtggccaccgtgaacagcatcgcccccatcaacgccagacacatccccagaaccctgagcgccgtgcccagcagcgccctgaagctggccgccgccgccaactgccaggtgagcaaggtgcccagcagcagcagcgtggacagcgtgcccagagagaaccacgagagcgagaagcccgccctgaacaacatcgccgacaacaccgtggccatggaggtgacctag

SEQ ID NO: 80411 - DNA, 2424 bp, synthetic construct
  misc_feature 1..2424: note = Description of Artificial Sequence: Synthetic coding sequence
  source 1..2424: mol_type = other DNA
atgagcaagctgagcttcagagccagagccctggacgccgccaagcccctgcccatctacagaggcaaggacatgcccgacctgaacgactgcgtgagcatcaacagagccgtgccccagatgcccaccggcatggagaaggaggaggagagcgagcaccacctgcagagagccatcagcgcccagcaggtgttcagagagaagaaggagagcatggtgatccccgtgcccgaggccgagagcaacgtgaactactacaacagactgtacaagggcgagttcaagcagcccaagcagttcatccacatccagcccttcaacctggacaacgagcagcccgactacgacatggacagcgaggacgagaccctgctgaacagactgaacagaaagatggagatcaagcccctgcagttcgagatcatgatcgacagactggagaaggccagcagcaaccagctggtgaccctgcaggaggccaagctgctgctgaacgaggacgactacctgatcaaggccgtgtacgactactgggtgagaaagagaaagaactgcagaggccccagcctgatcccccagatcaagcaggagaagagagacggcagcaccaacaacgacccctacgtggccttcagaagaagaaccgagaagatgcagaccagaaagaacagaaagaacgacgaggccagctacgagaagatgctgaagctgagaagagagttcagcagagccatcaccatcctggagatgatcaagagaagagagaagaccaagagagagctgctgcacctgaccctggaggtggtggagaagagataccacctgggcgactacggcggcgagatcctgaacgaggtgaagatcagcagaagcgagaaggagctgtacgccacccccgccaccctgcacaacggcaaccaccacaaggtgcaggagtgcaagaccaagcacccccaccacctgagcctgaaggaggaggccagcgacgtggtgagacagaagaagaagtaccccaagaagcccaaggccgaggccctgatcaccagccagcagcccacccccgagaccctgcccgtgatcaacaagagcgacatcaagcagtacgacttccacagcagcgacgaggacgagttcccccaggtgctgagccccgtgagcgagcccgaggaggagaacgaccccgacggcccctgcgccttcagaagaagagccggctgccagtactacgcccccagactggaccaggccaaccacagctgcgagaacagcgagctggccgacctggacaagctgagatacagacactgcctgaccaccctgaccgtgcccagaagatgcatcggcttcgccagaagaagaatcggcagaggcggcagagtgatcatggacagaatcagcaccgagcacgaccccgtgctgaagcagatcgaccccgagatgctgaacagcttcagcagcagcagccagaccatcgacttcagcagcaacttcagcagaaccaacgccagcagcaagcactgcgagaacagactgagcctgagcgagatcctgagcaacatcagaagctgcagactgcagtgcttccagcccagactgctgaacctgcaggacagcgacagcgaggagtgcaccagcagaaagcccggccagaccgtgaacaacaagagagtgagcgccgccagcgtggccctgctgaacaccagcaagaacggcatcagcgtgaccggcggcatcaccgaggagcagttccagacccaccagcagcagctggtgcagatgcagagacagcagctggcccagctgcagcagaagcagcagagccagcacagcagccagcagacccaccccaaggcccagggcagcagcaccagcgactgcatgagcaagaccctggacagcgccagcgcccacttcgccgccagcgccgtggtgagcgcccccgtgcccagcagaagcgaggtggccaaggagcagaacaccggccacaacaacatcaacggcgtggtgcagcccagcggcaccagcaagaccctgtacagcaccaacatggccctgagcagcagccccggcatcagcgccgtgcagctggtgagaaccgtgggccacaccaccaccaaccacctgatccccgccctgtgcaccagcagcccccagaccctgcccatgaacaacagctgcctgaccaacgccgtgcacctgaacaacgtgagcgtggtgagccccgtgaacgtgcacatcaacaccagaaccagcgcccccagccccaccgccctgaagctggccaccgtggccgccagcatggacagagtgcccaaggtgacccccagcagcgccatcagcagcatcgccagagagaaccacgagcccgagagactgggcctgaacggcatcgccgagaccaccgtggccatggaggtgacctag

SEQ ID NO: 80412 - DNA, 315 bp, synthetic construct
  misc_feature 1..315: note = Description of Artificial Sequence: Synthetic coding sequence
  source 1..315: mol_type = other DNA
atgagccacaccatcctgctggtgcagcccaccaagagacccgagggcagaacctacgccgactacgagagcgtgaacgagtgcatggagggcgtgtgcaagatgtacgaggagcacctgaagagaatgaaccccaacagccccagcatcacctacgacatcagccagctgttcgacttcatcgacgacctggccgacctgagctgcctggtgtacagagccgacacccagacctaccagccctacaacaaggactggatcaaggagaagatctacgtgctgctgagaagacaggcccagcaggccggcaagtag

SEQ ID NO: 80413 - DNA, 2253 bp, synthetic construct
  misc_feature 1..2253: note = Description of Artificial Sequence: Synthetic coding sequence
  source 1..2253: mol_type = other DNA
tacagcaagatggagatccccaacccccccaccagcaagtgcatcacctactggaagagaaaggtgaagagcgagtacatgagactgagacagctgaagagactgcaggccaacatgggcgccaaggccctgtacgtggccaacttcgccaaggtgcaggagaagacccagatcctgaacgaggagtggaagaagctgagagtgcagcccgtgcagagcatgaagcccgtgagcggccaccccttcctgaagaagtgcaccatcgagagcatcttccccggcttcgccagccagcacatgctgatgagaagcctgaacaccgtggccctggtgcccatcatgtacagctggagccccctgcagcagaacttcatggtggaggacgagaccgtgctgtgcaacatcccctacatgggcgacgaggtgaaggaggaggacgagaccttcatcgaggagctgatcaacaactacgacggcaaggtgcacggcgaggaggagatgatccccggcagcgtgctgatcagcgacgccgtgttcctggagctggtggacgccctgaaccagtacagcgacgaggaggaggagggccacaacgacaccagcgacggcaagcaggacgacagcaaggaggacctgcccgtgaccagaaagagaaagagacacgccatcgagggcaacaagaagagcagcaagaagcagttccccaacgacatgatcttcagcgccatcgccagcatgttccccgagaacggcgtgcccgacgacatgaaggagagatacagagagctgaccgagatgagcgaccccaacgccctgcccccccagtgcacccccaacatcgacggccccaacgccaagagcgtgcagagagagcagagcctgcacagcttccacaccctgttctgcagaagatgcttcaagtacgactgcttcctgcaccccttccacgccacccccaacgtgtacaagagaaagaacaaggagatcaagatcgagcccgagccctgcggcaccgactgcttcctgctgctggagggcgccaaggagtacgccatgctgcacaaccccagaagcaagtgcagcggcagaagaagaagaagacaccacatcgtgagcgccagctgcagcaacgccagcgccagcgccgtggccgagaccaaggagggcgacagcgacagagacaccggcaacgactgggccagcagcagcagcgaggccaacagcagatgccagacccccaccaagcagaaggccagccccgcccccccccagctgtgcgtggtggaggcccccagcgagcccgtggagtggaccggcgccgaggagagcctgttcagagtgttccacggcacctacttcaacaacttctgcagcatcgccagactgctgggcaccaagacctgcaagcaggtgttccagttcgccgtgaaggagagcctgatcctgaagctgcccaccgacgagctgatgaaccccagccagaagaagaagagaaagcacagactgtgggccgcccactgcagaaagatccagctgaagaaggacaacagcagcacccaggtgtacaactaccagccctgcgaccaccccgacagaccctgcgacagcacctgcccctgcatcatgacccagaacttctgcgagaagttctgccagtgcaaccccgactgccagaacagattccccggctgcagatgcaagacccagtgcaacaccaagcagtgcccctgctacctggccgtgagagagtgcgaccccgacctgtgcctgacctgcggcgccagcgagcactgggactgcaaggtggtgagctgcaagaactgcagcatccagagaggcctgaagaagcacctgctgctggcccccagcgacgtggccggctggggcaccttcatcaaggagagcgtgcagaagaacgagttcatcagcgagtactgcggcgagctgatcagccaggacgaggccgacagaagaggcaaggtgtacgacaagtacatgagcagcttcctgttcaacctgaacaacgacttcgtggtggacgccaccagaaagggcaacaagatcagattcgccaaccacagcgtgaaccccaactgctacgccaaggtggtgatggtgaacggcgaccacagaatcggcatcttcgccaagagagccatccaggccggcgaggagctgttcttcgactacagatacagccaggccgacgccctgaagtacgtgggcatcgagagagagaccgacgtgctgtag

SEQ ID NO: 80414 - DNA, 2124 bp, synthetic construct
  misc_feature 1..2124: note = Description of Artificial Sequence: Synthetic coding sequence
  source 1..2124: mol_type = other DNA
atggagatccccaacccccccaccagcaagtgcatcacctactggaagagaaaggtgaagagcgagtacatgagactgagacagctgaagagactgcaggccaacatgggcgccaaggccctgtacgtggccaacttcgccaaggtgcaggagaagacccagatcctgaacgaggagtggaagaagctgagagtgcagcccgtgcagagcatgaagcccgtgagcggccaccccttcctgaagaaggtggaggacgagaccgtgctgtgcaacatcccctacatgggcgacgaggtgaaggaggaggacgagaccttcatcgaggagctgatcaacaactacgacggcaaggtgcacggcgaggaggagatgatccccggcagcgtgctgatcagcgacgccgtgttcctggagctggtggacgccctgaaccagtacagcgacgaggaggaggagggccacaacgacaccagcgacggcaagcaggacgacagcaaggaggacctgcccgtgaccagaaagagaaagagacacgccatcgagggcaacaagaagagcagcaagaagcagttccccaacgacatgatcttcagcgccatcgccagcatgttccccgagaacggcgtgcccgacgacatgaaggagagatacagagagctgaccgagatgagcgaccccaacgccctgcccccccagtgcacccccaacatcgacggccccaacgccaagagcgtgcagagagagcagagcctgcacagcttccacaccctgttctgcagaagatgcttcaagtacgactgcttcctgcaccccttccacgccacccccaacgtgtacaagagaaagaacaaggagatcaagatcgagcccgagccctgcggcaccgactgcttcctgctgctggagggcgccaaggagtacgccatgctgcacaaccccagaagcaagtgcagcggcagaagaagaagaagacaccacatcgtgagcgccagctgcagcaacgccagcgccagcgccgtggccgagaccaaggagggcgacagcgacagagacaccggcaacgactgggccagcagcagcagcgaggccaacagcagatgccagacccccaccaagcagaaggccagccccgcccccccccagctgtgcgtggtggaggcccccagcgagcccgtggagtggaccggcgccgaggagagcctgttcagagtgttccacggcacctacttcaacaacttctgcagcatcgccagactgctgggcaccaagacctgcaagcaggtgttccagttcgccgtgaaggagagcctgatcctgaagctgcccaccgacgagctgatgaaccccagccagaagaagaagagaaagcacagactgtgggccgcccactgcagaaagatccagctgaagaaggacaacagcagcacccaggtgtacaactaccagccctgcgaccaccccgacagaccctgcgacagcacctgcccctgcatcatgacccagaacttctgcgagaagttctgccagtgcaaccccgactgccagaacagattccccggctgcagatgcaagacccagtgcaacaccaagcagtgcccctgctacctggccgtgagagagtgcgaccccgacctgtgcctgacctgcggcgccagcgagcactgggactgcaaggtggtgagctgcaagaactgcagcatccagagaggcctgaagaagcacctgctgctggcccccagcgacgtggccggctggggcaccttcatcaaggagagcgtgcagaagaacgagttcatcagcgagtactgcggcgagctgatcagccaggacgaggccgacagaagaggcaaggtgtacgacaagtacatgagcagcttcctgttcaacctgaacaacgacttcgtggtggacgccaccagaaagggcaacaagatcagattcgccaaccacagcgtgaaccccaactgctacgccaaggtggtgatggtgaacggcgaccacagaatcggcatcttcgccaagagagccatccaggccggcgaggagctgttcttcgactacagatacagccaggccgacgccctgaagtacgtgggcatcgagagagagaccgacgtgctgtag

SEQ ID NO: 80415 - DNA, 2244 bp, synthetic construct
  misc_feature 1..2244: note = Description of Artificial Sequence: Synthetic coding sequence
  source 1..2244: mol_type = other DNA
atggagatccccaacccccccaccagcaagtgcatcacctactggaagagaaaggtgaagagcgagtacatgagactgagacagctgaagagactgcaggccaacatgggcgccaaggccctgtacgtggccaacttcgccaaggtgcaggagaagacccagatcctgaacgaggagtggaagaagctgagagtgcagcccgtgcagagcatgaagcccgtgagcggccaccccttcctgaagaagtgcaccatcgagagcatcttccccggcttcgccagccagcacatgctgatgagaagcctgaacaccgtggccctggtgcccatcatgtacagctggagccccctgcagcagaacttcatggtggaggacgagaccgtgctgtgcaacatcccctacatgggcgacgaggtgaaggaggaggacgagaccttcatcgaggagctgatcaacaactacgacggcaaggtgcacggcgaggaggagatgatccccggcagcgtgctgatcagcgacgccgtgttcctggagctggtggacgccctgaaccagtacagcgacgaggaggaggagggccacaacgacaccagcgacggcaagcaggacgacagcaaggaggacctgcccgtgaccagaaagagaaagagacacgccatcgagggcaacaagaagagcagcaagaagcagttccccaacgacatgatcttcagcgccatcgccagcatgttccccgagaacggcgtgcccgacgacatgaaggagagatacagagagctgaccgagatgagcgaccccaacgccctgcccccccagtgcacccccaacatcgacggccccaacgccaagagcgtgcagagagagcagagcctgcacagcttccacaccctgttctgcagaagatgcttcaagtacgactgcttcctgcaccccttccacgccacccccaacgtgtacaagagaaagaacaaggagatcaagatcgagcccgagccctgcggcaccgactgcttcctgctgctggagggcgccaaggagtacgccatgctgcacaaccccagaagcaagtgcagcggcagaagaagaagaagacaccacatcgtgagcgccagctgcagcaacgccagcgccagcgccgtggccgagaccaaggagggcgacagcgacagagacaccggcaacgactgggccagcagcagcagcgaggccaacagcagatgccagacccccaccaagcagaaggccagccccgcccccccccagctgtgcgtggtggaggcccccagcgagcccgtggagtggaccggcgccgaggagagcctgttcagagtgttccacggcacctacttcaacaacttctgcagcatcgccagactgctgggcaccaagacctgcaagcaggtgttccagttcgccgtgaaggagagcctgatcctgaagctgcccaccgacgagctgatgaaccccagccagaagaagaagagaaagcacagactgtgggccgcccactgcagaaagatccagctgaagaaggacaacagcagcacccaggtgtacaactaccagccctgcgaccaccccgacagaccctgcgacagcacctgcccctgcatcatgacccagaacttctgcgagaagttctgccagtgcaaccccgactgccagaacagattccccggctgcagatgcaagacccagtgcaacaccaagcagtgcccctgctacctggccgtgagagagtgcgaccccgacctgtgcctgacctgcggcgccagcgagcactgggactgcaaggtggtgagctgcaagaactgcagcatccagagaggcctgaagaagcacctgctgctggcccccagcgacgtggccggctggggcaccttcatcaaggagagcgtgcagaagaacgagttcatcagcgagtactgcggcgagctgatcagccaggacgaggccgacagaagaggcaaggtgtacgacaagtacatgagcagcttcctgttcaacctgaacaacgacttcgtggtggacgccaccagaaagggcaacaagatcagattcgccaaccacagcgtgaaccccaactgctacgccaaggtggtgatggtgaacggcgaccacagaatcggcatcttcgccaagagagccatccaggccggcgaggagctgttcttcgactacagatacagccaggccgacgccctgaagtacgtgggcatcgagagagagaccgacgtgctgtag

SEQ ID NO: 80416 - DNA, 1827 bp, synthetic construct
  misc_feature 1..1827: note = Description of Artificial Sequence: Synthetic coding sequence
  source 1..1827: mol_type = other DNA
atggaggaggccagctgccccacctgcagcgtgaacgaggcctgcgagtggacccccttcagccagaaggagatgatccccggcagcgtgctgatcagcgacgccgtgttcctggagctggtggacgccctgaaccagtacagcgacgaggaggaggagggccacaacgacaccagcgacggcaagcaggacgacagcaaggaggacctgcccgtgaccagaaagagaaagagacacgccatcgagggcaacaagaagagcagcaagaagcagttccccaacgacatgatcttcagcgccatcgccagcatgttccccgagaacggcgtgcccgacgacatgaaggagagatacagagagctgaccgagatgagcgaccccaacgccctgcccccccagtgcacccccaacatcgacggccccaacgccaagagcgtgcagagagagcagagcctgcacagcttccacaccctgttctgcagaagatgcttcaagtacgactgcttcctgcaccccttccacgccacccccaacgtgtacaagagaaagaacaaggagatcaagatcgagcccgagccctgcggcaccgactgcttcctgctgctggagggcgccaaggagtacgccatgctgcacaaccccagaagcaagtgcagcggcagaagaagaagaagacaccacatcgtgagcgccagctgcagcaacgccagcgccagcgccgtggccgagaccaaggagggcgacagcgacagagacaccggcaacgactgggccagcagcagcagcgaggccaacagcagatgccagacccccaccaagcagaaggccagccccgcccccccccagctgtgcgtggtggaggcccccagcgagcccgtggagtggaccggcgccgaggagagcctgttcagagtgttccacggcacctacttcaacaacttctgcagcatcgccagactgctgggcaccaagacctgcaagcaggtgttccagttcgccgtgaaggagagcctgatcctgaagctgcccaccgacgagctgatgaaccccagccagaagaagaagagaaagcacagactgtgggccgcccactgcagaaagatccagctgaagaaggacaacagcagcacccaggtgtacaactaccagccctgcgaccaccccgacagaccctgcgacagcacctgcccctgcatcatgacccagaacttctgcgagaagttctgccagtgcaaccccgactgccagaacagattccccggctgcagatgcaagacccagtgcaacaccaagcagtgcccctgctacctggccgtgagagagtgcgaccccgacctgtgcctgacctgcggcgccagcgagcactgggactgcaaggtggtgagctgcaagaactgcagcatccagagaggcctgaagaagcacctgctgctggcccccagcgacgtggccggctggggcaccttcatcaaggagagcgtgcagaagaacgagttcatcagcgagtactgcggcgagctgatcagccaggacgaggccgacagaagaggcaaggtgtacgacaagtacatgagcagcttcctgttcaacctgaacaacgacttcgtggtggacgccaccagaaagggcaacaagatcagattcgccaaccacagcgtgaaccccaactgctacgccaaggtggtgatggtgaacggcgaccacagaatcggcatcttcgccaagagagccatccaggccggcgaggagctgttcttcgactacagatacagccaggccgacgccctgaagtacgtgggcatcgagagagagaccgacgtgctgtag

SEQ ID NO: 80417 - DNA, 2256 bp, synthetic construct
  misc_feature 1..2256: note = Description of Artificial Sequence: Synthetic coding sequence
  source 1..2256: mol_type = other DNA
atgggccagaccggcaagaagagcgagaagggccccgtgtgctggagaaagagagtgaagagcgagtacatgagactgagacagctgaagagattcagaagagccgacgaggtgaagagcatgttcagcagcaacagacagaagatcctggagagaaccgagatcctgaaccaggagtggaagcagagaagaatccagcccgtgcacatcctgaccagcgtgagcagcctgagaggcaccagagagtgcagcgtgaccagcgacctggacttccccacccaggtgatccccctgaagaccctgaacgccgtggccagcgtgcccatcatgtacagctggagccccctgcagcagaacttcatggtggaggacgagaccgtgctgcacaacatcccctacatgggcgacgaggtgctggaccaggacggcaccttcatcgaggagctgatcaagaactacgacggcaaggtgcacggcgacagagagtgcggcttcatcaacgacgagatcttcgtggagctggtgaacgccctgggccagtacaacgacgacgacgacgacgacgacggcgacgaccccgaggagagagaggagaagcagaaggacctggaggaccacagagacgacaaggagagcagaccccccagaaagttccccagcgacaagatcttcgaggccatcagcagcatgttccccgacaagggcaccgccgaggagctgaaggagaagtacaaggagctgaccgagcagcagctgcccggcgccctgccccccgagtgcacccccaacatcgacggccccaacgccaagagcgtgcagagagagcagagcctgcacagcttccacaccctgttctgcagaagatgcttcaagtacgactgcttcctgcacagaaagtgcaactacagcttccacgccacccccaacacctacaagagaaagaacaccgagaccgccctggacaacaagccctgcggcccccagtgctaccagcacctggagggcgccaaggagttcgccgccgccctgaccgccgagagaatcaagaccccccccaagagacccggcggcagaagaagaggcagactgcccaacaacagcagcagacccagcacccccaccatcaacgtgctggagagcaaggacaccgacagcgacagagaggccggcaccgagaccggcggcgagaacaacgacaaggaggaggaggagaagaaggacgagaccagcagcagcagcgaggccaacagcagatgccagacccccatcaagatgaagcccaacatcgagccccccgagaacgtggagtggagcggcgccgaggccagcatgttcagagtgctgatcggcacctactacgacaacttctgcgccatcgccagactgatcggcaccaagacctgcagacaggtgtacgagttcagagtgaaggagagcagcatcatcgcccccgcccccgccgaggacgtggacaccccccccagaaagaagaagagaaagcacagactgtgggccgcccactgcagaaagatccagctgaagaaggacggcagcagcaaccacgtgtacaactaccagccctgcgaccaccccagacagccctgcgacagcagctgcccctgcgtgatcgcccagaacttctgcgagaagttctgccagtgcagcagcgagtgccagaacagattccccggctgcagatgcaaggcccagtgcaacaccaagcagtgcccctgctacctggccgtgagagagtgcgaccccgacctgtgcctgacctgcggcgccgccgaccactgggacagcaagaacgtgagctgcaagaactgcagcatccagagaggcagcaagaagcacctgctgctggcccccagcgacgtggccggctggggcatcttcatcaaggaccccgtgcagaagaacgagttcatcagcgagtactgcggcgagatcatcagccaggacgaggccgacagaagaggcaaggtgtacgacaagtacatgtgcagcttcctgttcaacctgaacaacgacttcgtggtggacgccaccagaaagggcaacaagatcagattcgccaaccacagcgtgaaccccaactgctacgccaaggtgatgatggtgaacggcgaccacagaatcggcatcttcgccaagagagccatccagaccggcgaggagctgttcttcgactacagatacagccaggccgacgccctgaagtacgtgggcatcgagagagagatggagatcccctag

SEQ ID NO: 80418 - DNA, 2124 bp, synthetic construct
  misc_feature 1..2124: note = Description of Artificial Sequence: Synthetic coding sequence
  source 1..2124: mol_type = other DNA
atgggccagaccggcaagaagagcgagaagggccccgtgtgctggagaaagagagtgaagagcgagtacatgagactgagacagctgaagagattcagaagagccgacgaggtgaagagcatgttcagcagcaacagacagaagatcctggagagaaccgagatcctgaaccaggagtggaagcagagaagaatccagcccgtgcacatcctgaccagcgtgagcagcctgagaggcaccagagaggtggaggacgagaccgtgctgcacaacatcccctacatgggcgacgaggtgctggaccaggacggcaccttcatcgaggagctgatcaagaactacgacggcaaggtgcacggcgacagagagtgcggcttcatcaacgacgagatcttcgtggagctggtgaacgccctgggccagtacaacgacgacgacgacgacgacgacggcgacgaccccgaggagagagaggagaagcagaaggacctggaggaccacagagacgacaaggagagcagaccccccagaaagttccccagcgacaagatcttcgaggccatcagcagcatgttccccgacaagggcaccgccgaggagctgaaggagaagtacaaggagctgaccgagcagcagctgcccggcgccctgccccccgagtgcacccccaacatcgacggccccaacgccaagagcgtgcagagagagcagagcctgcacagcttccacaccctgttctgcagaagatgcttcaagtacgactgcttcctgcaccccttccacgccacccccaacacctacaagagaaagaacaccgagaccgccctggacaacaagccctgcggcccccagtgctaccagcacctggagggcgccaaggagttcgccgccgccctgaccgccgagagaatcaagaccccccccaagagacccggcggcagaagaagaggcagactgcccaacaacagcagcagacccagcacccccaccatcaacgtgctggagagcaaggacaccgacagcgacagagaggccggcaccgagaccggcggcgagaacaacgacaaggaggaggaggagaagaaggacgagaccagcagcagcagcgaggccaacagcagatgccagacccccatcaagatgaagcccaacatcgagccccccgagaacgtggagtggagcggcgccgaggccagcatgttcagagtgctgatcggcacctactacgacaacttctgcgccatcgccagactgatcggcaccaagacctgcagacaggtgtacgagttcagagtgaaggagagcagcatcatcgcccccgcccccgccgaggacgtggacaccccccccagaaagaagaagagaaagcacagactgtgggccgcccactgcagaaagatccagctgaagaaggacggcagcagcaaccacgtgtacaactaccagccctgcgaccaccccagacagccctgcgacagcagctgcccctgcgtgatcgcccagaacttctgcgagaagttctgccagtgcagcagcgagtgccagaacagattccccggctgcagatgcaaggcccagtgcaacaccaagcagtgcccctgctacctggccgtgagagagtgcgaccccgacctgtgcctgacctgcggcgccgccgaccactgggacagcaagaacgtgagctgcaagaactgcagcatccagagaggcagcaagaagcacctgctgctggcccccagcgacgtggccggctggggcatcttcatcaaggaccccgtgcagaagaacgagttcatcagcgagtactgcggcgagatcatcagccaggacgaggccgacagaagaggcaaggtgtacgacaagtacatgtgcagcttcctgttcaacctgaacaacgacttcgtggtggacgccaccagaaagggcaacaagatcagattcgccaaccacagcgtgaaccccaactgctacgccaaggtgatgatggtgaacggcgaccacagaatcggcatcttcgccaagagagccatccagaccggcgaggagctgttcttcgactacagatacagccaggccgacgccctgaagtacgtgggcatcgagagagagatggagatcccctag

SEQ ID NO: 80419 - DNA, 2241 bp, synthetic construct
  misc_feature 1..2241: note = Description of Artificial Sequence: Synthetic coding sequence
  source 1..2241: mol_type = other DNA
atgggccagaccggcaagaagagcgagaagggccccgtgtgctggagaaagagagtgaagagcgagtacatgagactgagacagctgaagagattcagaagagccgacgaggtgaagagcatgttcagcagcaacagacagaagatcctggagagaaccgagatcctgaaccaggagtggaagcagagaagaatccagcccgtgcacatcctgaccagcgtgagcagcctgagaggcaccagagagtgcagcgtgaccagcgacctggacttccccacccaggtgatccccctgaagaccctgaacgccgtggccagcgtgcccatcatgtacagctggagccccctgcagcagaacttcatggtggaggacgagaccgtgctgcacaacatcccctacatgggcgacgaggtgctggaccaggacggcaccttcatcgaggagctgatcaagaactacgacggcaaggtgcacggcgacagagagtgcggcttcatcaacgacgagatcttcgtggagctggtgaacgccctgggccagtacaacgacgacgacgacgacgacgacggcgacgaccccgaggagagagaggagaagcagaaggacctggaggaccacagagacgacaaggagagcagaccccccagaaagttccccagcgacaagatcttcgaggccatcagcagcatgttccccgacaagggcaccgccgaggagctgaaggagaagtacaaggagctgaccgagcagcagctgcccggcgccctgccccccgagtgcacccccaacatcgacggccccaacgccaagagcgtgcagagagagcagagcctgcacagcttccacaccctgttctgcagaagatgcttcaagtacgactgcttcctgcaccccttccacgccacccccaacacctacaagagaaagaacaccgagaccgccctggacaacaagccctgcggcccccagtgctaccagcacctggagggcgccaaggagttcgccgccgccctgaccgccgagagaatcaagaccccccccaagagacccggcggcagaagaagaggcagactgcccaacaacagcagcagacccagcacccccaccatcaacgtgctggagagcaaggacaccgacagcgacagagaggccggcaccgagaccggcggcgagaacaacgacaaggaggaggaggagaagaaggacgagaccagcagcagcagcgaggccaacagcagatgccagacccccatcaagatgaagcccaacatcgagccccccgagaacgtggagtggagcggcgccgaggccagcatgttcagagtgctgatcggcacctactacgacaacttctgcgccatcgccagactgatcggcaccaagacctgcagacaggtgtacgagttcagagtgaaggagagcagcatcatcgcccccgcccccgccgaggacgtggacaccccccccagaaagaagaagagaaagcacagactgtgggccgcccactgcagaaagatccagctgaagaaggacggcagcagcaaccacgtgtacaactaccagccctgcgaccaccccagacagccctgcgacagcagctgcccctgcgtgatcgcccagaacttctgcgagaagttctgccagtgcagcagcgagtgccagaacagattccccggctgcagatgcaaggcccagtgcaacaccaagcagtgcccctgctacctggccgtgagagagtgcgaccccgacctgtgcctgacctgcggcgccgccgaccactgggacagcaagaacgtgagctgcaagaactgcagcatccagagaggcagcaagaagcacctgctgctggcccccagcgacgtggccggctggggcatcttcatcaaggaccccgtgcagaagaacgagttcatcagcgagtactgcggcgagatcatcagccaggacgaggccgacagaagaggcaaggtgtacgacaagtacatgtgcagcttcctgttcaacctgaacaacgacttcgtggtggacgccaccagaaagggcaacaagatcagattcgccaaccacagcgtgaaccccaactgctacgccaaggtgatgatggtgaacggcgaccacagaatcggcatcttcgccaagagagccatccagaccggcgaggagctgttcttcgactacagatacagccaggccgacgccctgaagtacgtgggcatcgagagagagatggagatcccctag

SEQ ID NO: 80420 - DNA, 678 bp, synthetic construct
  misc_feature 1..678: note = Description of Artificial Sequence: Synthetic coding sequence
  source 1..678: mol_type = other DNA
atgtacagctggagccccctgcagcagaacttcatggtggaggacgagaccgtgctgcacaacatcccctacatgggcgacgaggtgctggaccaggacggcaccttcatcgaggagctgatcaagaactacgacggcaaggtgcacggcgacagagagtgcggcttcatcaacgacgagatcttcgtggagctggtgaacgccctgggccagtacaacgacgacgacgacgacgacgacggcgacgaccccgaggagagagaggagaagcagaaggacctggaggaccacagagacgacaaggagagcagaccccccagaaagttccccagcgacaagatcttcgaggccatcagcagcatgttccccgacaagggcaccgccgaggagctgaaggagaagtacaaggagctgaccgagcagcagctgcccggcgccctgccccccgagtgcacccccaacatcgacggccccaacgccaagagcgtgcagagagagcagagcctgcacagcttccacaccctgttctgcagaagatgcttcaagtacgactgcttcctgcaccccttccacgccacccccaacacctacaagagaaagaacaccgagaccgccctggacaacaagccctgcggcccccagtgctaccagcacctgcccctgctgcccagaaactag

SEQ ID NO: 80421 - DNA, 2088 bp, synthetic construct
  misc_feature 1..2088: note = Description of Artificial Sequence: Synthetic coding sequence
  source 1..2088: mol_type = other DNA
atgggccagaccggcaagaagagcgagaagggccccgtgtgctggagaaagagagtgaagagcgagtacatgagactgagacagctgaagagattcagaagagccgacgaggtgaagagcatgttcagcagcaacagacagaagatcctggagagaaccgagatcctgaaccaggagtggaagcagagaagaatccagcccgtgcacatcctgaccagctgcagcgtgaccagcgacctggacttccccacccaggtgatccccctgaagaccctgaacgccgtggccagcgtgcccatcatgtacagctggagccccctgcagcagaacttcatggtggaggacgagaccgtgctgcacaacatcccctacatgggcgacgaggtgctggaccaggacggcaccttcatcgaggagctgatcaagaactacgacggcaaggtgcacggcgacagagagtgcggcttcatcaacgacgagatcttcgtggagctggtgaacgccctgggccagtacaacgacgacgacgacgacgacgacggcgacgaccccgaggagagagaggagaagcagaaggacctggaggaccacagagacgacaaggagagcagaccccccagaaagttccccagcgacaagatcttcgaggccatcagcagcatgttccccgacaagggcaccgccgaggagctgaaggagaagtacaaggagctgaccgagcagcagctgcccggcgccctgccccccgagtgcacccccaacatcgacggccccaacgccaagagcgtgcagagagagcagagcctgcacagcttccacaccctgttctgcagaagatgcttcaagtacgactgcttcctgcaccccttccacgccacccccaacacctacaagagaaagaacaccgagaccgccctggacaacaagccctgcggcccccagtgctaccagcacctggagggcgccaaggagttcgccgccgccctgaccgccgagagaatcaagaccccccccaagagacccggcggcagaagaagaggcagactgcccaacaacagcagcagacccagcacccccaccatcaacgtgctggagagcaaggacaccgacagcgacagagaggccggcaccgagaccggcggcgagaacaacgacaaggaggaggaggagaagaaggacgagaccagcagcagcagcgaggccaacagcagatgccagacccccatcaagatgaagcccaacatcgagccccccgagaacgtggagtggagcggcgccgaggccagcatgttcagagtgctgatcggcacctactacgacaacttctgcgccatcgccagactgatcggcaccaagacctgcagacaggtgtacgagttcagagtgaaggagagcagcatcatcgcccccgcccccgccgaggacgtggacaccccccccagaaagaagaagagaaagcacagactgtgggccgcccactgcagaaagatccagctgaagaagggccagaacagattccccggctgcagatgcaaggcccagtgcaacaccaagcagtgcccctgctacctggccgtgagagagtgcgaccccgacctgtgcctgacctgcggcgccgccgaccactgggacagcaagaacgtgagctgcaagaactgcagcatccagagaggcagcaagaagcacctgctgctggcccccagcgacgtggccggctggggcatcttcatcaaggaccccgtgcagaagaacgagttcatcagcgagtactgcggcgagatcatcagccaggacgaggccgacagaagaggcaaggtgtacgacaagtacatgtgcagcttcctgttcaacctgaacaacgacttcgtggtggacgccaccagaaagggcaacaagatcagattcgccaaccacagcgtgaaccccaactgctacgccaaggtgatgatggtgaacggcgaccacagaatcggcatcttcgccaagagagccatccagaccggcgaggagctgttcttcgactacagatacagccaggccgacgccctgaagtacgtgggcatcgagagagagatggagatcccctag

SEQ ID NO: 80422 - DNA, 2088 bp, synthetic construct; identical to SEQ ID NO: 80421
  misc_feature 1..2088: note = Description of Artificial Sequence: Synthetic coding sequence
  source 1..2088: mol_type = other DNA

SEQ ID NO: 80423 - DNA, 2214 bp, synthetic construct
  misc_feature 1..2214: note = Description of Artificial Sequence: Synthetic coding sequence
  source 1..2214: mol_type = other DNA
atgggccagaccggcaagaagagcgagaagggccccgtgtgctggagaaagagagtgaagagcgagtacatgagactgagacagctgaagagattcagaagagccgacgaggtgaagagcatgttcagcagcaacagacagaagatcctggagagaaccgagatcctgaaccaggagtggaagcagagaagaatccagcccgtgcacatcctgaccagctgcagcgtgaccagcgacctggacttccccacccaggtgatccccctgaagaccctgaacgccgtggccagcgtgcccatcatgtacagctggagccccctgcagcagaacttcatggtggaggacgagaccgtgctgcacaacatcccctacatgggcgacgaggtgctggaccaggacggcaccttcatcgaggagctgatcaagaactacgacggcaaggtgcacggcgacagagagtgcggcttcatcaacgacgagatcttcgtggagctggtgaacgccctgggccagtacaacgacgacgacgacgacgacgacggcgacgaccccgaggagagagaggagaagcagaaggacctggaggaccacagagacgacaaggagagcagaccccccagaaagttccccagcgacaagatcttcgaggccatcagcagcatgttccccgacaagggcaccgccgaggagctgaaggagaagtacaaggagctgaccgagcagcagctgcccggcgccctgccccccgagtgcacccccaacatcgacggccccaacgccaagagcgtgcagagagagcagagcctgcacagcttccacaccctgttctgcagaagatgcttcaagtacgactgcttcctgcaccccttccacgccacccccaacacctacaagagaaagaacaccgagaccgccctggacaacaagccctgcggcccccagtgctaccagcacctggagggcgccaaggagttcgccgccgccctgaccgccgagagaatcaagaccccccccaagagacccggcggcagaagaagaggcagactgcccaacaacagcagcagacccagcacccccaccatcaacgtgctggagagcaaggacaccgacagcgacagagaggccggcaccgagaccggcggcgagaacaacgacaaggaggaggaggagaagaaggacgagaccagcagcagcagcgaggccaacagcagatgccagacccccatcaagatgaagcccaacatcgagccccccgagaacgtggagtggagcggcgccgaggccagcatgttcagagtgctgatcggcacctactacgacaacttctgcgccatcgccagactgatcggcaccaagacctgcagacaggtgtacgagttcagagtgaaggagagcagcatcatcgcccccgcccccgccgaggacgtggacaccccccccagaaagaagaagagaaagcacagactgtgggccgcccactgcagaaagatccagctgaagaaggacggcagcagcaaccacgtgtacaactaccagccctgcgaccaccccagacagccctgcgacagcagctgcccctgcgtgatcgcccagaacttctgcgagaagttctgccagtgcagcagcgagtgccagaacagattccccggctgcagatgcaaggcccagtgcaacaccaagcagtgcccctgctacctggccgtgagagagtgcgaccccgacctgtgcctgacctgcggcgccgccgaccactgggacagcaagaacgtgagctgcaagaactgcagcatccagagaggcagcaagaagcacctgctgctggcccccagcgacgtggccggctggggcatcttcatcaaggaccccgtgcagaagaacgagttcatcagcgagtactgcggcgagatcatcagccaggacgaggccgacagaagaggcaaggtgtacgacaagtacatgtgcagcttcctgttcaacctgaacaacgacttcgtggtggacgccaccagaaagggcaacaagatcagattcgccaaccacagcgtgaaccccaactgctacgccaaggtgatgatggtgaacggcgaccacagaatcggcatcttcgccaagagagccatccagaccggcgaggagctgttcttcgactacagatacagccaggccgacgccctgaagtacgtgggcatcgagagagagatggagatcccctag

SEQ ID NO: 80424 - DNA, 939 bp, synthetic construct
  misc_feature 1..939: note = Description of Artificial Sequence: Synthetic coding sequence
  source 1..939: mol_type = other DNA
atggccgccctgtacgcctgcaccaagtgccaccagagattccccttcgaggccctgagccagggccagcagctgtgcaaggagtgcagaatcgcccaccccgtggtgaagtgcacctactgcagaaccgagtaccagcaggagagactggagtgcaacggcaccatcagcgcccactgcaacctgcacctgcccggcagcagcgacagccccgccagcagcagcagagtggccggcatcaccggcatcaagaccaacaccatctgcaagaagtgcgcccagaacgtgcagctgtacggcacccccaagccctgccagtactgcaacatcatcgccgccttcatcggcaacaagtgccagagatgcaccaacagcgagaagaagtacggccccccctacagctgcgagcagtgcaagcagcagtgcgccttcgacagaaaggacgacagaaagaaggtggacggcaagctgctgtgctggctgtgcaccctgagctacaagagagtgctgcagaagaccaaggagcagagaaagcacctgagcagcagcagcagagccggccaccaggagaaggagcagtacagcagactgagcggcggcggccactacaacagcttcagccccgacctggccctggacagccccggcaccgaccacttcgtgatcatcgcccagctgaaggaggaggtggccaccctgaagaagatgctgcaccagaaggaccagatgatcctggagaaggagaagaagatcaccgagctgaaggccgacttccagtaccaggagagccagatgagagccaagatgaaccagatggagaagacccacaaggaggtgaccgagcagctgcaggccaagaacagagagctgctgaagcaggccgccgccctgagcaagagcaagaagagcgagaagagcggcgccatcaccagcccctag

SEQ ID NO: 80425 - DNA, 861 bp, synthetic construct
  misc_feature 1..861: note = Description of Artificial Sequence: Synthetic coding sequence
  source 1..861: mol_type = other DNA
atggccgaggacggcgaggaggccgagttccacttcgccgccctgtacatcagcggccagtggcccagactgagagccgacaccgacctgcagagactgggcagcagcgccatggcccccagcagaaagttcttcgtgggcggcaactggaagatgaacggcagaaagcagagcctgggcgagctgatcggcaccctgaacgccgccaaggtgcccgccgacaccgaggtggtgtgcgccccccccaccgcctacatcgacttcgccagacagaagctggaccccaagatcgccgtggccgcccagaactgctacaaggtgaccaacggcgccttcaccggcgagatcagccccggcatgatcaaggactgcggcgccacctgggtggtgctgggccacagcgagagaagacacgtgttcggcgagagcgacgagctgatcggccagaaggtggcccacgccctggccgagggcctgggcgtgatcgcctgcatcggcgagaagctggacgagagagaggccggcatcaccgagaaggtggtgttcgagcagaccaaggtgatcgccgacaacgtgaaggactggagcaaggtggtgctggcctacgagcccgtgtgggccatcggcaccggcaagaccgccaccccccagcaggcccaggaggtgcacgagaagctgagaggctggctgaagagcaacgtgagcgacgccgtggcccagagcaccagaatcatctacggcggcagcgtgaccggcgccacctgcaaggagctggccagccagcccgacgtggacggcttcctggtgggcggcgccagcctgaagcccgagttcgtggacatcatcaacgccaagcagtag

SEQ ID NO: 80426 - DNA, 1305 bp, synthetic construct; identical to SEQ ID NO: 73914
  misc_feature 1..1305: note = Description of Artificial Sequence: Synthetic coding sequence
  source 1..1305: mol_type = other DNA

SEQ ID NO: 80427 - DNA, 1176 bp, synthetic construct
  misc_feature 1..1176: note = Description of Artificial Sequence: Synthetic coding sequence
  source 1..1176: mol_type = other DNA
atgagcatcgagaagatctgggccagagagatcctggacagcagaggcaaccccaccgtggaggtggacctgtacaccgccaagggcctgttcagagccgccgtgcccagcggcgccagcaccggcatctacgaggccctggagctgagagacggcgacaagcagagatacctgggcaaggccaagttcggcgccaacgccatcctgggcgtgagcctggccgtgtgcaaggccggcgccgccgagagagagctgcccctgtacagacacatcgcccagctggccggcaacagcgacctgatcctgcccgtgcccgccttcaacgtgatcaacggcggcagccacgccggcaacaagctggccatgcaggagttcatgatcctgcccgtgggcgccgagagcttcagagacgccatgagactgggcgccgaggtgtaccacaccctgaagggcgtgatcaaggacaagtacggcaaggacgccaccaacgtgggcgacgagggcggcttcgcccccaacatcctggagaacagcgaggccctggagctggtgaaggaggccatcgacaaggccggctacaccgagaagatcgtgatcggcatggacgtggccgccagcgagttctacagagacggcaagtacgacctggacttcaagagccccaccgaccccagcagatacatcaccggcgaccagctgggcgccctgtaccaggacttcgtgagagactaccccgtggtgagcatcgaggaccccttcgaccaggacgactgggccgcctggagcaagttcaccgccaacgtgggcatccagatcgtgggcgacgacctgaccgtgaccaaccccaagagaatcgagagagccgtggaggagaaggcctgcaactgcctgctgctgaaggtgaaccagatcggcagcgtgaccgaggccatccaggcctgcaagctggcccaggagaacggctggggcgtgatggtgagccacagaagcggcgagaccgaggacaccttcatcgccgacctggtggtgggcctgtgcaccggccagatcaagaccggcgccccctgcagaagcgagagactggccaagtacaaccagctgatgagaatcgaggaggagctgggcgacgaggccagattcgccggccacaacttcagaaaccccagcgtgctgtag

SEQ ID NO: 80428 - DNA, 1305 bp, synthetic construct; identical to SEQ ID NO: 73914
  misc_feature 1..1305: note = Description of Artificial Sequence: Synthetic coding sequence
  source 1..1305: mol_type = other DNA

SEQ ID NO: 80429 - DNA, 1176 bp, synthetic construct; identical to SEQ ID NO: 80427
  misc_feature 1..1176: note = Description of Artificial Sequence: Synthetic coding sequence
  source 1..1176: mol_type = other DNA

SEQ ID NO: 80430 - DNA, 1176 bp, synthetic construct
  misc_feature 1..1176: note = Description of Artificial Sequence: Synthetic coding sequence
  source 1..1176: mol_type = other DNA
atggccatgcagaagatcttcgccagagagatcctggacagcagaggcaaccccaccgtggaggtggacctgcacaccgccaagggcagattcagagccgccgtgcccagcggcgccagcaccggcatctacgaggccctggagctgagagacggcgacaagggcagatacctgggcaaggccaagttcggcgccaacgccatcctgggcgtgagcctggccgtgtgcaaggccggcgccgccgagaagggcgtgcccctgtacagacacatcgccgacctggccggcaaccccgacctgatcctgcccgtgcccgccttcaacgtgatcaacggcggcagccacgccggcaacaagctggccatgcaggagttcatgatcctgcccgtgggcgccagcagcttcaaggaggccatgagaatcggcgccgaggtgtaccaccacctgaagggcgtgatcaaggccaagtacggcaaggacgccaccaacgtgggcgacgagggcggcttcgcccccaacatcctggagaacaacgaggccctggagctgctgaagaccgccatccaggccgccggctaccccgacaaggtggtgatcggcatggacgtggccgccagcgagttctacagaaacggcaagtacgacctggacttcaagagccccgacgaccccgccagacacatcaccggcgagaagctgggcgagctgtacaagagcttcatcaagaactaccccgtggtgagcatcgaggaccccttcgaccaggacgactgggccacctggaccagcttcctgagcggcgtgaacatccagatcgtgggcgacgacctgaccgtgaccaaccccaagagaatcgcccaggccgtggagaagaaggcctgcaactgcctgctgctgaaggtgaaccagatcggcagcgtgaccgagagcatccaggcctgcaagctggcccagagcaacggctggggcgtgatggtgagccacagaagcggcgagaccgaggacaccttcatcgccgacctggtggtgggcctgtgcaccggccagatcaagaccggcgccccctgcagaagcgagagactggccaagtacaaccagctgatgagaatcgaggaggccctgggcgacaaggccatcttcgccggcagaaagttcagaaaccccaaggccaagtag

SEQ ID NO: 80431 - DNA, 1305 bp, synthetic construct
  misc_feature 1..1305: note = Description of Artificial Sequence: Synthetic coding sequence
  source 1..1305: mol_type = other DNA
atggccatgcagaagatcttcgccagagagatcctggacagcagaggcaaccccaccgtggaggtggacctgcacaccgccaagggcagattcagagccgccgtgcccagcggcgccagcaccggcatctacgaggccctggagctgagagacggcgacaagggcagatacctgggcaagggcgtgctgaaggccgtggagaacatcaacaacaccctgggccccgccctgctgcagaagaagctgagcgtggtggaccaggagaaggtggacaagttcatgatcgagctggacggcaccgagaacaagagcaagttcggcgccaacgccatcctgggcgtgagcctggccgtgtgcaaggccggcgccgccgagaagggcgtgcccctgtacagacacatcgccgacctggccggcaaccccgacctgatcctgcccgtgcccgccttcaacgtgatcaacggcggcagccacgccggcaacaagctggccatgcaggagttcatgatcctgcccgtgggcgccagcagcttcaaggaggccatgagaatcggcgccgaggtgtaccaccacctgaagggcgtgatcaaggccaagtacggcaaggacgccaccaacgtgggcgacgagggcggcttcgcccccaacatcctggagaacaacgaggccctggagctgctgaagaccgccatccaggccgccggctaccccgacaaggtggtgatcggcatggacgtggccgccagcgagttctacagaaacggcaagtacgacctggacttcaagagccccgacgaccccgccagacacatcaccggcgagaagctgggcgagctgtacaagagcttcatcaagaactaccccgtggtgagcatcgaggaccccttcgaccaggacgactgggccacctggaccagcttcctgagcggcgtgaacatccagatcgtgggcgacgacctgaccgtgaccaaccccaagagaatcgcccaggccgtggagaagaaggcctgcaactgcctgctgctgaaggtgaaccagatcggcagcgtgaccgagagcatccaggcctgcaagctggcccagagcaacggctggggcgtgatggtgagccacagaagcggcgagaccgaggacaccttcatcgccgacctggtggtgggcctgtgcaccggccagatcaagaccggcgccccctgcagaagcgagagactggccaagtacaaccagctgatgagaatcgaggaggccctgggcgacaaggccatcttcgccggcagaaagttcagaaaccccaaggccaagtag

SEQ ID NO: 80432 - DNA, 1305 bp, synthetic construct; identical to SEQ ID NO: 80431
  misc_feature 1..1305: note = Description of Artificial Sequence: Synthetic coding sequence
  source 1..1305: mol_type = other DNA

SEQ ID NO: 80433 - DNA, 852 bp, synthetic construct
  misc_feature 1..852: note = Description of Artificial Sequence: Synthetic coding sequence
  source 1..852: mol_type = other DNA
atggccatgcagaagatcttcgccagagagatcctggacagcagaggcaaccccaccgtggaggtggacctgcacaccgccaagggcagattcagagccgccgtgcccagcggcgccagcaccggcatctacgaggccctggagctgagagacggcgacaagggcagatacctgggcaagggcgtgctgaaggccgtggagaacatcaacaacaccctgggccccgccctgctgcagaagaagctgagcgtggtggaccaggagaaggtggacaagttcatgatcgagctggacggcaccgagaacaagagcaagttcggcgccaacgccatcctgggcgtgagcctggccgtgtgcaaggccggcgccgccgagaagggcgtgcccctgtacagacacatcgccgacctggccggcaaccccgacctgatcctgcccgtgcccgccttcaacgtgatcaacggcggcagccacgccggcaacaagctggccatgcaggagttcatgatcctgcccgtgggcgccagcagcttcaaggaggccatgagaatcggcgccgaggtgtaccaccacctgaagggcgtgatcaaggccaagtacggcaaggacgccaccaacgtgggcgacgagggcggcttcgcccccaacatcctggagaacaacgaggccctggagctgctgaagaccgccatccaggccgccggctaccccgacaaggtggtgatcggcatggacgtggccgccagcgagttctacagaaacggcaagtacgacctggacttcaagagccccgacgaccccgccagacacatcaccggcgagaagctgggcgagctgtacaagagcttctag

SEQ ID NO: 80434 - DNA, 465 bp, synthetic construct
  misc_feature 1..465: note = Description of Artificial Sequence: Synthetic coding sequence
  source 1..465: mol_type = other DNA
atggccatgcagaagatcttcgccagagagatcctggacagcagaggcaaccccaccgtggaggtggacctgcacaccgccaagggcagattcagagccgccgtgcccagcggcgccagcaccggcatctacgaggccctggagctgagagacggcgacaagggcagatacctgggcaagggcgtgctgaaggccgtggagaacatcaacaacaccctgggccccgccctgctgcagaagaagctgagcgtggtggaccaggagaaggtggacaagttcatgatcgagctggacggcaccgagaacaagagcaagttcggcgccaacgccatcctgggcgtgagcctggccgtgtgcaaggccggcgccgccgagaagggcgtgcccctgtacagacacatcgccgacctggccggcaaccccgacctgatcctgcccgtgcccgccttcaacgtgatcaactag

SEQ ID NO: 80435 - DNA, 447 bp, synthetic construct
  misc_feature 1..447: note = Description of Artificial Sequence: Synthetic coding sequence
  source 1..447: mol_type = other DNA
atggccatgcagaagatcttcgccagagagatcctggacagcagaggcaaccccaccgtggaggtggacctgcacaccgccaagggcagattcagagccgccgtgcccagcggcgccagcaccggcatctacgaggccctggagctgagagacggcgacaagggcagatacctgggcaagggcgtgctgaaggccgtggagaacatcaacaacaccctgggccccgccctgctgcagaagaagctgagcgtggtggaccaggagaaggtggacaagttcatgatcgagctggacggcaccgagaacaagagcaagttcggcgccaacgccatcctgggcgtgagcctggccgtgtgcaaggccggcgccgccgagaagggcgtgcccctgtacagacacatcgccgacctggccggcaaccccgacctgatcctgcccgtgccctag

SEQ ID NO: 80436 - DNA, 1332 bp, synthetic construct
  misc_feature 1..1332: note = Description of Artificial Sequence: Synthetic coding sequence
  source 1..1332: mol_type = other DNA
atggtgagaggcagaatcagcagactgagcgtgagagacgtgagattccccaccagcctgggcggccacggcgccgacgccatgcacaccgaccccgactacagcgccgcctacgtggtgatcgagaccgacgccgaggacggcatcaagggctgcggcatcaccttcaccctgggcaagggcaccgaggtggtggtgtgcgccgtgaacgccctggcccaccacgtgctgaacaaggacctgaaggacatcgtgggcgacttcagaggcttctacagacagctgaccagcgacggccagctgagatggatcggccccgagaagggcgtggtgcacctggccaccgccgccgtgctgaacgccgtgtgggacctgtgggccaagcaggagggcaagcccgtgtggaagctgctggtggacatggaccccagaatgctggtgagctgcatcgacttcagatacatcaccgacgtgctgaccgaggaggacgccctggagatcctgcagaagggccagatcggcaagaaggagagagagaagcagatgctggcccagggctaccccgcctacaccaccagctgcgcctggctgggctacagcgacgacaccctgaagcagctgtgcgcccaggccctgaaggacggctggaccagattcaaggtgaaggtgggcgccgacctgcaggacgacatgagaagatgccagatcatcagagacatgatcggccccgagaagaccctgatgatggacgccaaccagagatgggacgtgcccgaggccgtggagtggatgagcaagctggccaagttcaagcccctgtggatcgaggagcccaccagccccgacgacatcctgggccacgccaccatcagcaaggccctggtgcccctgggcatcggcatcgccaccggcgagcagtgccacaacagagtgatcttcaagcagctgctgcaggccaaggccctgcagttcctgcagatcgacagctgcagactgggcagcgtgaacgagaacctgagcgtgctgctgatggccaagaagttcgagatccccgtgtgcccccacgccggcggcgtgggcctgtgcgagctggtgcagcacctgatcatcttcgactacatcagcgtgagcgccagcctggagaacagagtgtgcgagtacgtggaccacctgcacgagcacttcaagtaccccgtgatgatccagagagccagctacatgccccccaaggaccccggctacagcaccgagatgaaggaggagagcgtgaagaagcaccagtaccccgacggcgaggtgtggaagaagctgctgcccgcccaggagaactag

SEQ ID NO: 80437 - DNA, 642 bp, synthetic construct
  misc_feature 1..642: note = Description of Artificial Sequence: Synthetic coding sequence
  source 1..642: mol_type = other DNA
atgagaagatgccagatcatcagagacatgatcggccccgagaagaccctgatgatggacgccaaccagagatgggacgtgcccgaggccgtggagtggatgagcaagctggccaagttcaagcccctgtggatcgaggagcccaccagccccgacgacatcctgggccacgccaccatcagcaaggccctggtgcccctgggcatcggcatcgccaccggcgagcagtgccacaacagagtgatcttcaagcagctgctgcaggccaaggccctgcagttcctgcagatcgacagctgcagactgggcagcgtgaacgagaacctgagcgtgctgctgatggccaagaagttcgagatccccgtgtgcccccacgccggcggcgtgggcctgtgcgagctggtgcagcacctgatcatcttcgactacatcagcgtgagcgccagcctggagaacagagtgtgcgagtacgtggaccacctgcacgagcacttcaagtaccccgtgatgatccagagagccagctacatgccccccaaggaccccggctacagcaccgagatgaaggaggagagcgtgaagaagcaccagtaccccgacggcgaggtgtggaagaagctgctgcccgcccaggagaactag

SEQ ID NO: 80438 - DNA, 1353 bp, synthetic construct
  misc_feature 1..1353: note = Description of Artificial Sequence: Synthetic coding sequence
  source 1..1353: mol_type = other DNA
atggtgagcgccgacgccatggtgagcgccgacgccatggtgagcgccgacgccatggtgagcgccgacgccatggtgagcgccgacgccatggtgagcgccgacgccatggtgagcgccgacgccatggtgagcgccgacgccatgcacaccgaccccgactacagcgccgcctacgtggtgatcgagaccgacgccgaggacggcatcaagggctgcggcatcaccttcaccctgggcaagggcaccgaggtggtggtgtgcgccgtgaacgccctggcccaccacgtgctgaacaaggacctgaaggacatcgtgggcgacttcagaggcttctacagacagctgaccagcgacggccagctgagatggatcggccccgagaagggcgtggtgcacctggccaccgccgccgtgctgaacgccgtgtgggacctgtgggccaagcaggagggcaagcccgtgtggaagctgctggtggacatggaccccagaatgctggtgagctgcatcgacttcagatacatcaccgacgtgctgaccgaggaggacgccctggagatcctgcagaagggccagatcggcaagaaggagagagagaagcagatgctggcccagggctaccccgcctacaccaccagctgcgcctggctgggctacagcgacgacaccctgaagcagctgtgcgcccaggccctgaaggacggctggaccagattcaaggtgaaggtgggcgccgacctgcaggacgacatgagaagatgccagatcatcagagacatgatcggccccgagaagaccctgatgatggacgccaaccagagatgggacgtgcccgaggccgtggagtggatgagcaagctggccaagttcaagcccctgtggatcgaggagcccaccagccccgacgacatcctgggccacgccaccatcagcaagtgccacaacagagtgatcttcaagcagctgctgcaggccaaggccctgcagttcctgcagatcgacagctgcagactgggcagcgtgaacgagaacctgagcgtgctgctgatggccaagaagttcgagatccccgtgtgcccccacgccggcggcgtgggcctgtgcgagctggtgcagcacctgatcatcttcgactacatcagcgtgagcgccagcctggagaacagagtgtgcgagtacgtggaccacctgcacgagcacttcaagtaccccgtgatgatccagagagccagctacatgccccccaaggaccccggctacagcaccgagatgaaggaggagagcgtgaagaagcaccagtaccccgacggcgaggtgtggaagaagctgctgcccgcccaggagaactag

SEQ ID NO: 80439 - DNA, 1086 bp, synthetic construct
  misc_feature 1..1086: note = Description of Artificial Sequence: Synthetic coding sequence
  source 1..1086: mol_type = other DNA
atgcagaagatggagagcagaggcgtggagctgcccagcctgtgggagaaggccctgaagctgatcggccccgagaagggcgtggtgcacctggccaccgccgccgtgctgaacgccgtgtgggacctgtgggccaagcaggagggcaagcccgtgtggaagctgctggtggacatggaccccagaatgctggtgagctgcatcgacttcagatacatcaccgacgtgctgaccgaggaggacgccctggagatcctgcagaagggccagatcggcaagaaggagagagagaagcagatgctggcccagggctaccccgcctacaccaccagctgcgcctggctgggctacagcgacgacaccctgaagcagctgtgcgcccaggccctgaaggacggctggaccagattcaaggtgaaggtgggcgccgacctgcaggacgacatgagaagatgccagatcatcagagacatgatcggccccgagaagaccctgatgatggacgccaaccagagatgggacgtgcccgaggccgtggagtggatgagcaagctggccaagttcaagcccctgtggatcgaggagcccaccagccccgacgacatcctgggccacgccaccatcagcaaggccctggtgcccctgggcatcggcatcgccaccggcgagcagtgccacaacagagtgatcttcaagcagctgctgcaggccaaggccctgcagttcctgcagatcgacagctgcagactgggcagcgtgaacgagaacctgagcgtgctgctgatggccaagaagttcgagatccccgtgtgcccccacgccggcggcgtgggcctgtgcgagctggtgcagcacctgatcatcttcgactacatcagcgtgagcgccagcctggagaacagagtgtgcgagtacgtggaccacctgcacgagcacttcaagtaccccgtgatgatccagagagccagctacatgccccccaaggaccccggctacagcaccgagatgaaggaggagagcgtgaagaagcaccagtaccccgacggcgaggtgtggaagaagctgctgcccgcccaggagaactag

SEQ ID NO: 80440 - DNA, 429 bp, synthetic construct
  misc_feature 1..429: note = Description of Artificial Sequence: Synthetic coding sequence
  source 1..429: mol_type = other DNA
atggtgagaggcagaatcagcagactgagcgtgagagacgtgagattccccaccagcctgggcggccacggcgccgacgccatgcacaccgaccccgactacagcgccgcctacgtggtgatcgagaccgacgccgaggacggcatcaagggctgcggcatcaccttcaccctgggcaagggcaccgaggtggtggtgtgcgccgtgaacgccctggcccaccacgtgctgaacaaggacctgaaggacatcgtgggcgacttcagaggcttctacagacagctgaccagcgacggccagctgagatggatcggccccgagaagggcgtggtgcacctggccaccgccgccgtgctgaacgccgtgtgggacctgtgggccaagcaggagggcaagcccgtgtggaagctgctggtggacatgggctag

SEQ ID NO: 80441 - DNA, 1392 bp, synthetic construct
  misc_feature 1..1392: note = Description of Artificial Sequence: Synthetic coding sequence
  source 1..1392: mol_type = other DNA
atggccaccgtgaccgccaccaccaaggtgcccgagatcagagacgtgaccagaatcgagagaatcggcgcccacagccacatcagaggcctgggcctggacgacgccctggagcccagacaggccagccagggcatggtgggccagctggccgccagaagagccgccggcgtggtgctggagatgatcagagagggcaagatcgccggcagagccgtgctgatcgccggccagcccggcaccggcaagaccgccatcgccatgggcatggcccaggccctgggccccgacacccccttcaccgccatcgccggcagcgagatcttcagcctggagatgagcaagaccgaggccctgacccaggccttcagaagaagcatcggcgtgagaatcaaggaggagaccgagatcatcgagggcgaggtggtggagatccagatcgacagacccgccaccggcaccggcagcaaggtgggcaagctgaccctgaagaccaccgagatggagaccatctacgacctgggcaccaagatgatcgagagcctgaccaaggacaaggtgcaggccggcgacgtgatcaccatcgacaaggccaccggcaagatcagcaagctgggcagaagcttcaccagagccagagactacgacgccatgggcagccagaccaagttcgtgcagtgccccgacggcgagctgcagaagagaaaggaggtggtgcacaccgtgagcctgcacgagatcgacgtgatcaacagcagaacccagggcttcctggccctgttcagcggcgacaccggcgagatcaagagcgaggtgagagagcagatcaacgccaaggtggccgagtggagagaggagggcaaggccgagatcatccccggcgtgctgttcatcgacgaggtgcacatgctggacatcgagagcttcagcttcctgaacagagccctggagagcgacatggcccccgtgctgatcatggccaccaacagaggcatcaccagaatcagaggcaccagctaccagagcccccacggcatccccatcgacctgctggacagactgctgatcgtgagcaccaccccctacagcgagaaggacaccaagcagatcctgagaatcagatgcgaggaggaggacgtggagatgagcgaggacgcctacaccgtgctgaccagaatcggcctggagaccagcctgagatacgccatccagctgatcaccgccgccagcctggtgtgcagaaagagaaagggcaccgaggtgcaggtggacgacatcaagagagtgtacagcctgttcctggacgagagcagaagcacccagtacatgaaggagtaccaggacgccttcctgttcaacgagctgaagggcgagaccatggacaccagctag

SEQ ID NO: 80442 - DNA, 855 bp, synthetic construct
  misc_feature 1..855: note = Description of Artificial Sequence: Synthetic coding sequence
  source 1..855: mol_type = other DNA
atggccaagagcctgctgaagaccgccagcctgagcggcagaaccaagctgctgcaccagaccggcctgagcctgtacagcaccagccacggcttctacgaggaggaggtgaagaagaccctgcagcagttccccggcggcagcatcgacctgcagaaggaggacaacggcatcggcatcctgaccctgaacaaccccagcagaatgaacgccttcagcggcgtgatgatgctgcagctgctggagaaggtgatcgagctggagaactggaccgagggcaagggcctgatcgtgagaggcgccaagaacaccttcagcagcggcagcgacctgaacgccgtgaagagcctgggcctgcagagaagactgcccctgatcagcgtggccctggtgcagggctgggccctgggcggcggcgccgagttcaccaccgcctgcgacttcagactgatgacccccgagagcaagatcagattcgtgcacaaggagatgggcatcatccccagctggggcggcaccaccagactggtggagatcatcggcagcagacaggccctgaaggtgctgagcggcgccctgaagctggacagcaagaacgccctgaacatcggcatggtggaggaggtgctgcagagcagcgacgagaccaagagcctggaggaggcccaggagtggctgaagcagttcatccagggcccccccgaggtgatcagagccctgaagaagagcgtgtgcagcggcagagagctgtacctggaggaggccctgcagaacgagagagacctgctgggcaccgtgtggggcggccccgccaacctggaggccatcgccaagaagggcaagttcaacaagtag

SEQ ID NO: 80443 - DNA, 438 bp, synthetic construct
  misc_feature 1..438: note = Description of Artificial Sequence: Synthetic coding sequence
  source 1..438: mol_type = other DNA
atggccaagagcctgctgaagaccgccagcctgagcggcagaaccaagctgctgcaccagaccggcctgagcctgtacagcaccagccacggcttctacgaggaggaggtgaagaagaccctgcagcagttccccggcggcagcatcgacctgcagaaggaggacaacggcatcggcatcctgaccctgaacaaccccagcagaatgaacgccttcagcggcgtgatgatgctgcagctgctggagaaggtgatcgagctggagaactggaccgagggcaagggcctgatcgtgagaggcgccaagaacaccttcagcagcggcagcgacctgaacgccgtgaagagcctgggcacccccgagaccagcttcaacaagtgctgcgccggcagcagactgggcatcggctggagaagcagaatctactacagcatgtag

SEQ ID NO: 80444 - DNA, 441 bp, synthetic construct
  misc_feature 1..441: note = Description of Artificial Sequence: Synthetic coding sequence
  source 1..441: mol_type = other DNA
atggccaagagcctgctgaagaccgccagcctgagcggcagaaccaagctgctgcaccagaccggcctgagcctgtacagcaccagccacggcttctacgaggaggaggtgaagaagaccctgcagcagttccccggcggcagcatcgacctgcagaaggaggacaacggcatcggcatcctgaccctgaacaaccccagcagaatgaacgccttcagcggcgtgatgatgctgcagctgctggagaaggtgatcgagctggagaactggaccgagggcaagggcctgatcgtgagaggcgccaagaacaccttcagcagcggcagcgacctgaacgccgtgaagagcctgggcacccccgaggagaccagcttcaacaagtgctgcgccggcagcagactgggcatcggctggagaagcagaatctactacagcatgtag

SEQ ID NO: 80445 - DNA, 438 bp, synthetic construct; identical to SEQ ID NO: 80443
  misc_feature 1..438: note = Description of Artificial Sequence: Synthetic coding sequence
  source 1..438: mol_type = other DNA

SEQ ID NO: 80446 - DNA, 642 bp, synthetic construct
  misc_feature 1..642: note = Description of Artificial Sequence: Synthetic coding sequence
  source 1..642: mol_type = other DNA
atgaacgccttcagcggcgtgatgatgctgcagctgctggagaaggtgatcgagctggagaactggaccgagggcaagggcctgatcgtgagaggcgccaagaacaccttcagcagcggcagcgacctgaacgccgtgaagagcctgggcacccccgaggagagctgcagatggaacaccgagttcctgtacaccctgcaccccgtgagccccttcatcaacatcctgtacagctacggctggaacggcagaatgcacgtgcacgccaagcacctgaacaagatctacgaggtgaagaagcagagaggcaagatcctgctgggcctgagcagactgcccctgatcagcgtggccctggtgcagggctgggccctgggcggcggcgccgagttcaccaccgcctgcgacttcagactgatgacccccgagagcaagatcagattcgtgcacaaggagatgggcatcatccccagctggggcggcaccaccagactggtggagatcatcggcagcagacaggccctgaaggtgctgagcggcgccctgaagctggacagcaagaacgccctgaacatcggcatggtggaggaggtgctgcagagcagcgacgagaccaagagcctggaggaggcccaggagtag

SEQ ID NO: 80447 - DNA, 906 bp, synthetic construct
  misc_feature 1..906: note = Description of Artificial Sequence: Synthetic coding sequence
  source 1..906: mol_type = other DNA
atggccaagagcctgctgaagaccgccagcctgagcggcagaaccaagctgctgcaccagaccggcctgagcctgtacagcaccagccacggcttctacgaggaggaggtgaagaagaccctgcagcagttccccggcggcagcatcgacctgcagaaggaggacaacggcatcggcatcctgaccctgaacaaccccagcagaatgaacgccttcagcggcgtgatgatgctgcagctgctggagaaggtgatcgagctggagaactggaccgagggcaagggcctgatcgtgagaggcgccaagaacaccttcagcagcggcagcgacctgaacgccgtgaagagcctgggcacccccgaggacggcatggccgtgtgcatgttcatgcagaacaccctgaccagattcatgagactgcccctgatcagcgtggccctggtgcagggctgggccctgggcggcggcgccgagttcaccaccgcctgcgacttcagactgatgacccccgagagcaagatcagattcgtgcacaaggagatgggcatcatccccagctggggcggcaccaccagactggtggagatcatcggcagcagacaggccctgaaggtgctgagcggcgccctgaagctggacagcaagaacgccctgaacatcggcatggtggaggaggtgctgcagagcagcgacgagaccaagagcctggaggaggcccaggagtggctgaagcagttcatccagggcccccccgaggtgatcagagccctgaagaagagcgtgtgcagcggcagagagctgtacctggaggaggccctgcagaacgagagagacctgctgggcaccgtgtggggcggccccgccaacctggaggccatcgccaagaagggcaagttcaacaagtag

SEQ ID NO: 80448 - DNA, 681 bp, synthetic construct
  misc_feature 1..681: note = Description of Artificial Sequence: Synthetic coding sequence
  source 1..681: mol_type = other DNA
atgatgctgcagctgctggagaaggtgatcgagctggagaactggaccgagggcaagggcctgatcgtgagaggcgccaagaacaccttcagcagcggcagcgacctgaacgccgtgaagagcctgggcacccccgaggacggcatggccgtgtgcatgttcatgcagaacaccctgaccagattcatgagactgcccctgatcagcgtggccctggtgcagggctgggccctgggcggcggcgccgagttcaccaccgcctgcgacttcagactgatgacccccgagagcaagatcagattcgtgcacaaggagatgggcatcatccccagctggggcggcaccaccagactggtggagatcatcggcagcagacaggccctgaaggtgctgagcggcgccctgaagctggacagcaagaacgccctgaacatcggcatggtggaggaggtgctgcagagcagcgacgagaccaagagcctggaggaggcccaggagtggctgaagcagttcatccagggcccccccgaggtgatcagagccctgaagaagagcgtgtgcagcggcagagagctgtacctggaggaggccctgcagaacgagagagacctgctgggcaccgtgtggggcggccccgccaacctggaggccatcgccaagaagggcaagttcaacaagtag

SEQ ID NO: 80449 - DNA, 906 bp, synthetic construct; identical to SEQ ID NO: 80447
  misc_feature 1..906: note = Description of Artificial Sequence: Synthetic coding sequence
  source 1..906: mol_type = other DNA

SEQ ID NO: 80450 - DNA, 906 bp, synthetic construct; identical to SEQ ID NO: 80447
  misc_feature 1..906: note = Description of Artificial Sequence: Synthetic coding sequence
  source 1..906: mol_type = other DNA

SEQ ID NO: 80451 - DNA, 408 bp, synthetic construct
  misc_feature 1..408: note = Description of Artificial Sequence: Synthetic coding sequence
  source 1..408: mol_type = other DNA
atggccaagagcctgctgaagaccgccagcctgagcggcagaaccaagctgctgcaccagaccggcctgagcctgtacagcaccagccacggcttctacgaggaggaggtgaagaagaccctgcagcagttccccggcggcagcatcgacctgcagaaggaggacaacggcatcggcatcctgaccctgaacaaccccagcagaatgaacgccttcagcggcgtgatgatgctgcagctgctggagaaggtgatcgagctggagaactggaccgagggcaagggcctgatcgtgagaggcgccaagaacaccttcagcagcggcagcgacctgaacgccgtgaagagcctgggcacccccgaggacggcatggccgtgtgcatgttcatgcagaacaccctgacctag

SEQ ID NO: 80452 - DNA, 924 bp, synthetic construct
  misc_feature 1..924: note = Description of Artificial Sequence: Synthetic coding sequence
  source 1..924: mol_type = other DNA
atggccctgaagcaggagatggccaagagcctgctgaagaccgccagcctgagcggcagaaccaagctgctgcaccagaccggcctgagcctgtacagcaccagccacggcttctacgaggaggaggtgaagaagaccctgcagcagttccccggcggcagcatcgacctgcagaaggaggacaacggcatcggcatcctgaccctgaacaaccccagcagaatgaacgccttcagcggcgtgatgatgctgcagctgctggagaaggtgatcgagctggagaactggaccgagggcaagggcctgatcgtgagaggcgccaagaacaccttcagcagcggcagcgacctgaacgccgtgaagagcctgggcacccccgaggacggcatggccgtgtgcatgttcatgcagaacaccctgaccagattcatgagactgcccctgatcagcgtggccctggtgcagggctgggccctgggcggcggcgccgagttcaccaccgcctgcgacttcagactgatgacccccgagagcaagatcagattcgtgcacaaggagatgggcatcatccccagctggggcggcaccaccagactggtggagatcatcggcagcagacaggccctgaaggtgctgagcggcgccctgaagctggacagcaagaacgccctgaacatcggcatggtggaggaggtgctgcagagcagcgacgagaccaagagcctggaggaggcccaggagtggctgaagcagttcatccagggcccccccgaggtgatcagagccctgaagaagagcgtgtgcagcggcagagagctgtacctggaggaggccctgcagaacgagagagacctgctgggcaccgtgtggggcggccccgccaacctggaggccatcgccaagaagggcaagttcaacaagtag

SEQ ID NO: 80453 - DNA, 456 bp, synthetic construct
  misc_feature 1..456: note = Description of Artificial Sequence: Synthetic coding sequence
  source 1..456: mol_type = other DNA
atggccaagagcctgctgaagaccgccagcctgagcggcagaaccaagctgctgcaccagaccggcctgagcctgtacagcaccagccacggcttctacgaggaggaggtgaagaagaccctgcagcagttccccggcggcagcatcgacctgcagaaggaggacaacggcatcggcatcctgaccctgaacaaccccagcagaatgaacgccttcagcggcgtgatgatgctgcagctgctggagaaggtgatcgagctggagaactggaccgagggcaagggcctgatcgtgagaggcgccaagaacaccttcagcagcggcagcgacctgaacgccgtgaagagcctgggcacccccgaggacggcatggccgtgtgcatgttcatgcagaacaccctgaccagattcatgagactgcccctgatcagcgtggccctggtgcagggctggtag

SEQ ID NO: 80454 - DNA, 378 bp, synthetic construct
  misc_feature 1..378: note = Description of Artificial Sequence: Synthetic coding sequence
  source 1..378: mol_type = other DNA
atggccaagagcctgctgaagaccgccagcctgagcggcagaaccaagctgctgcaccagaccggcctgagcctgtacagcaccagccacggcttctacgaggaggaggtgaagaagaccctgcagcagttccccggcggcagcatcgacctgcagaaggaggacaacggcatcggcatcctgaccctgaacaaccccagcagaatgaacgccttcagcggcgtgatgatgctgcagctgctggagaaggtgatcgagctggagaactggaccgagggcaagggcctgatcgtgagaggcgccaagaacaccttcagcagcggcagcgacctgaacgccgtgaagagcctgggcacccccgaggccaacttcctgtag

SEQ ID NO: 80455 - DNA, 213 bp, synthetic construct
  misc_feature 1..213: note = Description of Artificial Sequence: Synthetic coding sequence
  source 1..213: mol_type = other DNA
atgatgctgcagctgctggagaaggtgatcgagctggagaactggaccgagggcaagggcctgatcgtgagaggcgccaagaacaccttcagcagcggcagcgacctgaacgccgtgaagagcctgggcacccccgagaccagcttcaacaagtgctgcgccggcagcagactgggcatcggctggagaagcagaatctactacagcatgtag

SEQ ID NO: 80456 - DNA, 873 bp, synthetic construct
  misc_feature 1..873: note = Description of Artificial Sequence: Synthetic coding sequence
  source 1..873: mol_type = other DNA
atggccgccctgagagtgctgctgagctgcgtgagaggccccctgagaccccccgtgagatgccccgcctggagacccttcgccagcggcgccaacttcgagtacatcatcgccgagaagagaggcaagaacaacaccgtgggcctgatccagctgaacagacccaaggccctgaacgccctgtgcgacggcctgatcgacgagctgaaccaggccctgaagaccttcgaggaggaccccgccgtgggcgccatcgtgctgaccggcggcgacaaggccttcgccgccggcgccgacatcaaggagatgcagaacctgagcttccaggactgctacagcagcaagttcctgaagcactgggaccacctgacccaggtgaagaagcccgtgatcgccgccgtgaacggctacgccttcggcggcggctgcgagctggccatgatgtgcgacatcatctacgccggcgagaaggcccagttcgcccagcccgagatcctgatcggcaccatccccggcgccggcggcacccagagactgaccagagccgtgggcaagagcctggccatggagatggtgctgaccggcgacagaatcagcgcccaggacgccaagcaggccggcctggtgagcaagatctgccccgtggagaccctggtggaggaggccatccagtgcgccgagaagatcgccagcaacagcaagatcgtggtggccatggccaaggagagcgtgaacgccgccttcgagatgaccctgaccgagggcagcaagctggagaagaagctgttctacagcaccttcgccaccgacgacagaaaggagggcatgaccgccttcgtggagaagagaaaggccaacttcaaggaccagtag

SEQ ID NO: 80457 - DNA, 2271 bp, synthetic construct
  misc_feature 1..2271: note = Description of Artificial Sequence: Synthetic coding sequence
  source 1..2271: mol_type = other DNA
atgagcttcgtggccggcgtgatcagaagactggacgagaccgtggtgaacagaatcgccgccggcgaggtgatccagagacccgccaacgccatcaaggagatgatcgagaactgcctggacgccaagagcaccagcatccaggtgatcgtgaaggagggcggcctgaagctgatccagatccaggacaacggcaccggcatcagaaaggaggacctggacatcgtgtgcgagagattcaccaccagcaagctgcagagcttcgaggacctggccagcatcagcacctacggcttcagaggcgaggccctggccagcatcagccacgtggcccacgtgaccatcaccaccaagaccgccgacggcaagtgcgcctacagagccagctacagcgacggcaagctgaaggccccccccaagccctgcgccggcaaccagggcacccagatcaccgtggaggacctgttctacaacatcgccaccagaagaaaggccctgaagaaccccagcgaggagtacggcaagatcctggaggtggtgggcagatacagcgtgcacaacgccggcatcagcttcagcgtgaagaagcagggcgagaccgtggccgacgtgagaaccctgcccaacgccagcaccgtggacaacatcagaagcatcttcggcaacgccgtgagcagagagctgatcgagatcggctgcgaggacaagaccctggccttcaagatgaacggctacatcagcaacgccaactacagcgtgaagaagtgcatcttcctgctgttcatcaaccacagactggtggagagcaccagcctgagaaaggccatcgagaccgtgtacgccgcctacctgcccaagaacacccaccccttcctgtacctgagcctggagatcagcccccagaacgtggacgtgaacgtgcaccccaccaagcacgaggtgcacttcctgcacgaggagagcatcctggagagagtgcagcagcacatcgagagcaagctgctgggcagcaacagcagcagaatgtacttcacccagaccctgctgcccggcctggccggccccagcggcgagatggtgaagagcaccaccagcctgaccagcagcagcaccagcggcagcagcgacaaggtgtacgcccaccagatggtgagaaccgacagcagagagcagaagctggacgccttcctgcagcccctgagcaagcccctgagcagccagccccaggccatcgtgaccgaggacaagaccgacatcagcagcggcagagccagacagcaggacgaggagatgctggagctgcccgcccccgccgaggtggccgccaagaaccagagcctggagggcgacaccaccaagggcaccagcgagatgagcgagaagagaggccccaccagcagcaaccccagaaagagacacagagaggacagcgacgtggagatggtggaggacgacagcagaaaggagatgaccgccgcctgcacccccagaagaagaatcatcaacctgaccagcgtgctgagcctgcaggaggagatcaacgagcagggccacgaggtgctgagagagatgctgcacaaccacagcttcgtgggctgcgtgaacccccagtgggccctggcccagcaccagaccaagctgtacctgctgaacaccaccaagctgagcgaggagctgttctaccagatcctgatctacgacttcgccaacttcggcgtgctgagactgagcgagcccgcccccctgttcgacctggccatgctggccctggacagccccgagagcggctggaccgaggaggacggccccaaggagggcctggccgagtacatcgtggagttcctgaagaagaaggccgagatgctggccgactacttcagcctggagatcgacgaggagggcaacctgatcggcctgcccctgctgatcgacaactacgtgccccccctggagggcctgcccatcttcatcctgagactggccaccgaggtgaactgggacgaggagaaggagtgcttcgagagcctgagcaaggagtgcgccatgttctacagcatcagaaagcagtacatcagcgaggagagcaccctgagcggccagcagagcgaggtgcccggcagcatccccaacagctggaagtggaccgtggagcacatcgtgtacaaggccctgagaagccacatcctgccccccaagcacttcaccgaggacggcaacatcctgcagctggccaacctgcccgacctgtacaaggtgttcgagagatgctag

SEQ ID NO: 80458 - DNA, 1884 bp, synthetic construct
  misc_feature 1..1884: note = Description of Artificial Sequence: Synthetic coding sequence
  source 1..1884: mol_type = other DNA
atggccttcggcggcggcctggagctggccctgggctgccactacagaatcgcccacgccgaggcccaggtgggcctgcccgaggtgaccctgggcctgctgcccggcgccagaggcacccagctgctgcccagactgaccggcgtgcccgccgccctggacctgatcaccagcggcagaagaatcctggccgacgaggccctgaagctgggcatcctggacaaggtggtgaacagcgaccccgtggaggaggccatcagattcgcccagagagtgagcgaccagcccctggagagcagaagactgtgcaacaagcccatccagagcctgcccaacatggacagcatcttcagcgaggccctgctgaagatgagaagacagcaccccggctgcctggcccaggaggcctgcgtgagagccgtgcaggccgccgtgcagtacccctacgaggtgggcatcaagaaggaggaggagctgttcctgtacctgctgcagagcggccaggccagagccctgcagtacgccttcttcgccgagagaaaggccaacaagtggagcacccccagcggcgccagctggaagaccgccagcgccagacccgtgagcagcgtgggcgtggtgggcctgggcaccatgggcagaggcatcgtgatcagcttcgccagagccagaatccccgtgatcgccgtggacagcgacaagaaccagctggccaccgccaacaagatgatcaccagcgtgctggagaaggaggccagcaagatgcagcagagcggccacccctggagcggccccaagcccagactgaccagcagcgtgaaggagctgggcggcgtggacctggtgatcgaggccgtgttcgaggagatgagcctgaagaagcaggtgttcgccgagctgagcgccgtgtgcaagcccgaggccttcctgtgcaccaacaccagcgccctggacgtggacgagatcgccagcagcaccgacagaccccacctggtgatcggcacccacttcttcagccccgcccacgtgatgaagctgctggaggtgatccccagccagtacagcagccccaccaccatcgccaccgtgatgaacctgagcaagaagatcaagaagatcggcgtggtggtgggcaactgcttcggcttcgtgggcaacagaatgctgaacccctactacaaccaggcctacttcctgctggaggagggcagcaagcccgaggaggtggaccaggtgctggaggagttcggcttcaagatgggccccttcagagtgagcgacctggccggcctggacgtgggctggaagagcagaaagggccagggcctgaccggccccaccctgctgcccggcacccccgccagaaagagaggcaacagaagatactgccccatccccgacgtgctgtgcgagctgggcagattcggccagaagaccggcaagggctggtaccagtacgacaagcccctgggcagaatccacaagcccgacccctggctgagcaagttcctgagcagatacagaaagacccaccacatcgagcccagaaccatcagccaggacgagatcctggagagatgcctgtacagcctgatcaacgaggccttcagaatcctgggcgagggcatcgccgccagccccgagcacatcgacgtggtgtacctgcacggctacggctggcccagacacaagggcggccccatgttctacgccagcaccgtgggcctgcccaccgtgctggagaagctgcagaagtactacagacagaaccccgacatcccccagctggagcccagcgactacctgaagaagctggccagccagggcaacccccccctgaaggagtggcagagcctggccggcagccccagcagcaagctgtag

SEQ ID NO: 80459 - DNA, 1464 bp, synthetic construct
  misc_feature 1..1464: note = Description of Artificial Sequence: Synthetic coding sequence
  source 1..1464: mol_type = other DNA
atggccgagtacaccagactgcacaacgccctggccctgatcagactgagaaacccccccgtgaacgccatcagcaccaccctgctgagagacatcaaggagggcctgcagaaggccgtgatcgaccacaccatcaaggccatcgtgatctgcggcgccgagggcaagttcagcgccggcgccgacatcagaggcttcagcgcccccagaaccttcggcctgaccctgggccacgtggtggacgagatccagagaaacgagaagcccgtggtggccgccatccagggcatggccttcggcggcggcctggagctggccctgggctgccactacagaatcgcccacgccgaggcccaggtgggcctgcccgaggtgaccctgggcctgctgcccggcgccagaggcacccagctgctgcccagactgaccggcgtgcccgccgccctggacctgatcaccagcggcagaagaatcctggccgacgaggccctgaagctgggcatcctggacaaggtggtgaacagcgaccccgtggaggaggccatcagattcgcccagagagtgagcgaccagcccctggagagcagaagactgtgcaacaagcccatccagagcctgcccaacatggacagcatcttcagcgaggccctgctgaagatgagaagacagcaccccggctgcctggcccaggaggcctgcgtgagagccgtgcaggccgccgtgcagtacccctacgaggtgggcatcaagaaggaggaggagctgttcctgtacctgctgcagagcggccaggccagagccctgcagtacgccttcttcgccgagagaaaggccaacaagtggagcacccccagcggcgccagctggaagaccgccagcgccagacccgtgagcagcgtgggcgtggtgggcctgggcaccatgggcagaggcatcgtgatcagcttcgccagagccagaatccccgtgatcgccgtggacagcgacaagaaccagctggccaccgccaacaagatgatcaccagcgtgctggagaaggaggccagcaagatgcagcagagcggccacccctggagcggccccaagcccagactgaccagcagcgtgaaggagctgggcggcgtggacctggtgatcgaggccgtgttcgaggagatgagcctgaagaagcaggtgttcgccgagctgagcgccgtgtgcaagcccgaggccttcctgtgcaccaacaccagcgccctggacgtggacgagatcgccagcagcaccgacagaccccacctggtgatcggcacccacttcttcagccccgcccacgtgatgaagctgctggaggtgatccccagccagtacagcagccccaccaccatcgccaccgtgatgaacctgagcaagaagatcaagaagatcggcgtggtggtgggcaactacagcgtgagcaagaagaagaagaagaagaagaagtag

SEQ ID NO: 80460 - DNA, 6102 bp, synthetic construct
  misc_feature 1..6102: note = Description of Artificial Sequence: Synthetic coding sequence
  source 1..6102: mol_type = other DNA
atgttcaagggcctgagcaagggcagccagggcaagggcagccccaagggcagccccgccaagggcagccccaagggcagccccagcagacacagcagagccgccacccaggagctggccctgctgatcagcagaatgcaggccaacgccgaccaggtggagagagacatcctggagacccagaagagactgcagcaggacagactgaacagcgagcagagccaggccctgcagcaccagcaggagaccggcagaagcctgaaggaggccgaggtgctgctgaaggacctgttcctggacgtggacaaggccagaagactgaagcacccccaggccgaggagatcgagaaggacatcaagcagctgcacgagagagtgacccaggagtgcgccgagtacagagccctgtacgagaagatggtgctgccccccgacgtgggccccagagtggactgggccagagtgctggagcagaagcagaagcaggtgtgcgccggccagtacggccccggcatggccgagctggagcagcagatcgccgagcacaacatcctgcagaaggagatcgacgcctacggccagcagctgagaagcctggtgggccccgacgccgccaccatcagaagccagtacagagacctgctgaaggccgccagctggagaggccagagcctgggcagcctgtacacccacctgcagggctgcaccagacagctgagcgccctggccgagcagcagagaagaatcctgcagcaggactggagcgacctgatggccgaccccgccggcgtgagaagagagtacgagcacttcaagcagcacgagctgctgagccaggagcagagcgtgaaccagctggaggacgacggcgagagaatggtggagctgagacaccccgccgtgggccccatccaggcccaccaggaggccctgaagatggagtggcagaacttcctgaacctgtgcatctgccaggagacccagctgcagcacgtggaggactacagaagattccaggaggaggccgacagcgtgagccagaccctggccaagctgaacagcaacctggacgccaagtacagccccgcccccggcggcccccccggcgcccccaccgagctgctgcagcagctggaggccgaggagaagagactggccgtgaccgagagagccaccggcgacctgcagagaagaagcagagacgtggcccccctgccccagagaagaaaccccccccagcagcccctgcacgtggacagcatctgcgactgggacagcggcgaggtgcagctgctgcagggcgagagatacaagctggtggacaacaccgacccccacgcctgggtggtgcagggccccggcggcgagaccaagagagcccccgccgcctgcttctgcatccccgcccccgaccccgacgccgtggccagagccagcagactggccagcgagctgcaggccctgaagcagaagctggccaccgtgcagagcagactgaaggccagcgccgtggagagcctgagacccagccagcaggcccccagcggcagcgacctggccaacccccaggcccagaagctgctgacccagatgaccagactggacggcgacctgggccagatcgagagacaggtgctggcctgggccagagcccccctgagcagacccacccccctggaggacctggagggcagaatccacagccacgagggcaccgcccagagactgcagagcctgggcaccgagaaggagaccgcccagaaggagtgcgaggccttcctgagcaccagacccgtgggccccgccgccctgcagctgcccgtggccctgaacagcgtgaagaacaagttcagcgacgtgcaggtgctgtgcagcctgtacggcgagaaggccaaggccgccctggacctggagagacagatccaggacgccgacagagtgatcagaggcttcgaggccaccctggtgcaggaggcccccatccccgccgagcccggcgccctgcaggagagagtgagcgagctgcagagacagagaagagagctgctggagcagcagacctgcgtgctgagactgcacagagccctgaaggccagcgagcacgcctgcgccgccctgcagaacaacttccaggagttctgccaggacctgcccagacagcagagacaggtgagagccctgaccgacagataccacgccgtgggcgaccagctggacctgagagagaaggtggtgcaggacgccgccctgacctaccagcagttcaagaactgcaaggacaacctgagcagctggctggagcacctgcccagaagccaggtgagacccagcgacggccccagccagatcgcctacaagctgcaggcccagaagagactgacccaggagatccagagcagagagagagacagagccaccgccagccacctgagccaggccctgcaggccgccctgcaggactacgagctgcaggccgacacctacagatgcagcctggagcccaccctggccgtgagcgcccccaagagacccagagtggcccccctgcaggagagcatccaggcccaggagaagaacctggccaaggcctacaccgaggtggccgccgcccagcagcagctgctgcagcagctggagttcgccagaaagatgctggagaagaaggagctgagcgaggacatcagaagaacccacgacgccaagcagggcagcgagagccccgcccaggccggcagagagagcgaggccctgaaggcccagctggaggaggagagaaagagagtggccagagtgcagcacgagctggaggcccagagaagccagctgctgcagctgagaacccagagacccctggagagactggaggagaaggaggtggtggagttctacagagacccccagctggagggcagcctgagcagagtgaaggcccaggtggaggaggagggcaagagaagagccggcctgcaggccgacctggaggtggccgcccagaaggtggtgcagctggagagcaagagaaagaccatgcagccccacctgctgaccaaggaggtgacccaggtggagagagaccccggcctggacagccaggccgcccagctgagaatccagatccagcagctgagaggcgaggacgccgtgatcagcgccagactggagggcctgaagaaggagctgctggccctggagaagagagaggtggacgtgaaggagaaggtggtggtgaaggaggtggtgaaggtggagaagaacctggagatggtgaaggccgcccaggccctgagactgcagatggaggaggacgccgccagaagaaagcaggccgaggaggccgtggccaagctgcaggccagaatcgaggacctggagagagccatcagcagcgtggagcccaaggtgatcgtgaaggaggtgaagaaggtggagcaggaccccggcctgctgcaggagagcagcagactgagaagcctgctggaggaggagagaaccaagaacgccaccctggccagagagctgagcgacctgcacagcaagtacagcgtggtggagaagcagagacccaaggtgcagctgcaggagagagtgcacgagatcttccaggtggaccccgagaccgagcaggagatcaccagactgaaggccaagctgcaggagatggccggcaagagaagcggcgtggagaaggaggtggagaagctgctgcccgacctggaggtgctgagagcccagaagcccaccgtggagtacaaggaggtgacccaggaggtggtgagacacgagagaagccccgaggtgctgagagagatcgacagactgaaggcccagctgaacgagctggtgaacagccacggcagaagccaggagcagctgatcagactgcagggcgagagagacgagtggagaagagagagagccaaggtggagaccaagaccgtgagcaaggaggtggtgagacacgagaaggaccccgtgctggagaaggaggccgagagactgagacaggaggtgagagaggccgcccagaagagaagagccgccgaggacgccgtgtacgagctgcagagcaagagactgctgctggagagaagaaagcccgaggagaaggtggtggtgcaggaggtggtggtgacccagaaggaccccaagctgagagaggagcacagcagactgagcggcagcctggacgaggaggtgggcagaagaagacagctggagctggaggtgcagcagctgagagccggcgtggaggagcaggagggcctgctgagcttccaggaggacagaagcaagaagctggccgtggagagagagctgagacagctgaccctgagaatccaggagctggagaagagaccccccaccgtgcaggagaagatcatcatggaggaggtggtgaagctggagaaggaccccgacctggagaagagcaccgaggccctgagatgggacctggaccaggagaagacccaggtgaccgagctgaacagagagtgcaagaacctgcaggtgcagatcgacgtgctgcagaaggccaagagccaggagaagaccatctacaaggaggtgatcagagtgcagaaggacagagtgctggaggacgagagagccagagtgtgggagatgctgaacagagagagaaccgccagacaggccagagaggaggaggccagaagactgagagagagaatcgacagagccgagaccctgggcagaacctggagcagagaggagagcgagctgcagagagccagagaccaggccgaccaggagtgcggcagactgcagcaggagctgagagccctggagagacagaagcagcagcagaccctgcagctgcaggaggagagcaagctgctgagccagaagaccgagagcgagagacagaaggccgcccagagaggccaggagctgagcagactggaggccgccatcctgagagagaaggaccagatctacgagaaggagagaaccctgagagacctgcacgccaaggtgagcagagaggagctgagccaggagacccagaccagagagaccaacctgagcaccaagatcagcatcctggagcccgagaccggcaaggacatgagcccctacgaggcctacaagagaggcatcatcgacagaggccagtacctgcagctgcaggagctggagtgcgactgggaggaggtgaccaccagcggcccctgcggcgaggagagcgtgctgctggacagaaagagcggcaagcagtacagcatcgaggccgccctgagatgcagaagaatcagcaaggaggagtaccacctgtacaaggacggccacctgcccatcagcgagttcgccctgctggtggccggcgagaccaagcccagcagcagcctgagcatcggcagcatcatcagcaagagccccctggccagccccgccccccagagcaccagcttcttcagccccagcttcagcctgggcctgggcgacgacagcttccccatcgccggcatctacgacaccaccaccgacaacaagtgcagcatcaagaccgccgtggccaagaacatgctggaccccatcaccggccagaagctgctggaggcccaggccgccaccggcggcatcgtggacctgctgagcagagagagatacagcgtgcacaaggccatggagagaggcctgatcgagaacaccagcacccagagactgctgaacgcccagaaggccttcaccggcatcgaggaccccgtgaccaagaagagactgagcgtgggcgaggccgtgcagaagggctggatgcccagagagagcgtgctgccccacctgcaggtgcagcacctgaccggcggcctgatcgaccccaagagaaccggcagaatccccatccagcaggccctgctgagcggcatgatcagcgaggagctggcccagctgctgcaggacgagagcagctacgagaaggacctgaccgaccccatcagcaaggagagactgagctacaaggaggccatgggcagatgcagaaaggaccccctgagcggcctgctgctgctgcccgccgccctggagggctacagatgctacagaagcgccagccccaccgtgcccagaagcctgagatag

SEQ ID NO: 80461 - DNA, 2061 bp, synthetic construct
  misc_feature 1..2061: note = Description of Artificial Sequence: Synthetic coding sequence
  source 1..2061: mol_type = other DNA
atgcagctgggcgagcagctgctggtgagcagcgtgaacctgcccggcgcccacttctaccccctggagagcgccagaggcggcagcggcggcagcgccggccacctgcccagcgccgcccccagcccccagaagctggacctggacaaggccagcaagaagttcagcggcagcctgagctgcgaggccgtgagcggcgagcccgccgccgccagcgccggcgcccccgccgccatgctgagcgacaccgacgccggcgacgccttcgccagcgccgccgccgtggccaagcccggcccccccgacggcagaaagggcagcccctgcggcgaggaggagctgcccagcgccgccgccgccgccgccgccgccgccgccgccgccgccgccaccgccagatacagcatggacagcctgagcagcgagagatactacctgcagagccccggcccccagggcagcgagctggccgccccctgcagcctgttcccctaccaggccgccgccggcgccccccacggccccgtgtaccccgcccccaacggcgccagatacccctacggcagcatgctgccccccggcggcttccccgccgccgtgtgcccccccggcagagcccagttcggccccggcgccggcgccggcagcggcgccggcggcagcagcggcggcggcggcggccccggcacctaccagtacagccagggcgcccccctgtacggcccctaccccggcgccgccgccgccggcagctgcggcggcctgggcggcctgggcgtgcccggcagcggcttcagagcccacgtgtacctgtgcaacagacccctgtggctgaagttccacagacaccagaccgagatgatcatcaccaagcagggcagaagaatgttccccttcctgagcttcaacatcaacggcctgaaccccaccgcccactacaacgtgttcgtggaggtggtgctggccgaccccaaccactggagattccagggcggcaagtgggtgacctgcggcaaggccgacaacaacatgcagggcaacaagatgtacgtgcaccccgagagccccaacaccggcagccactggatgagacaggagatcagcttcggcaagctgaagctgaccaacaacaagggcgccaacaacaacaacacccagatgatcgtgctgcagagcctgcacaagtaccagcccagactgcacatcgtggaggtgaccgaggacggcgtggaggacctgaacgagcccagcaagacccagaccttcaccttcagcgagacccagttcatcgccgtgaccgcctaccagaacaccgacatcacccagctgaagatcgaccacaaccccttcgccaagggcttcagagacaactacgacagcagccaccagatcgtgcccggcggcagatacggcgtgcagagcttcttccccgagcccttcgtgaacaccctgccccaggccagatactacaacggcgagagaaccgtgccccagaccaacggcctgctgagcccccagcagagcgaggaggtggccaaccccccccagagatggctggtgacccccgtgcagcagcccggcaccaacaagctggacatcagcagctacgagagcgagtacaccagcagcaccctgctgccctacggcatcaagagcctgcccctgcagaccagccacgccctgggctactaccccgaccccaccttccccgccatggccggctggggcggcagaggcagctaccagagaaagatggccgccggcctgccctggaccagcagaaccagccccaccgtgttcagcgaggaccagctgagcaaggagaaggtgaaggaggagatcggcagcagctggatcgagaccccccccagcatcaagagcctggacagcaacgacagcggcgtgtacaccagcgcctgcaagagaagaagactgagccccagcaacagcagcaacgagaacagccccagcatcaagtgcgaggacatcaacgccgaggagtacagcaaggacaccagcaagggcatgggcggctactacgccttctacaccaccccctag

SEQ ID NO: 80462 - DNA, 2118 bp, synthetic construct
  misc_feature 1..2118: note = Description of Artificial Sequence: Synthetic coding sequence
  source 1..2118: mol_type = other DNA
atgcagctgggcgagcagctgctggtgagcagcgtgaacctgcccggcgcccacttctaccccctggagagcgccagaggcggcagcggcggcagcgccggccacctgcccagcgccgcccccagcccccagaagctggacctggacaaggccagcaagaagttcagcggcagcctgagctgcgaggccgtgagcggcgagcccgccgccgccagcgccggcgcccccgccgccatgctgagcgacaccgacgccggcgacgccttcgccagcgccgccgccgtggccaagcccggcccccccgacggcagaaagggcagcccctgcggcgaggaggagctgcccagcgccgccgccgccgccgccgccgccgccgccgccgccgccgccaccgccagatacagcatggacagcctgagcagcgagagatactacctgcagagccccggcccccagggcagcgagctggccgccccctgcagcctgttcccctaccaggccgccgccggcgccccccacggccccgtgtaccccgcccccaacggcgccagatacccctacggcagcatgctgccccccggcggcttccccgccgccgtgtgcccccccggcagagcccagttcggccccggcgccggcgccggcagcggcgccggcggcagcagcggcggcggcggcggccccggcacctaccagtacagccagggcgcccccctgtacggcccctaccccggcgccgccgccgccggcagctgcggcggcctgggcggcctgggcgtgcccggcagcggcttcagagcccacgtgtacctgtgcaacagacccctgtggctgaagttccacagacaccagaccgagatgatcatcaccaagcagggcagaagaatgttccccttcctgagcttcaacatcaacggcctgaaccccaccgcccactacaacgtgttcgtggaggtggtgctggccgaccccaaccactggagattccagggcggcaagtgggtgacctgcggcaaggccgacaacaacatgcagggcaacaagatgtacgtgcaccccgagagccccaacaccggcagccactggatgagacaggagatcagcttcggcaagctgaagctgaccaacaacaagggcgccaacaacaacaacacccagatgatcgtgctgcagagcctgcacaagtaccagcccagactgcacatcgtggaggtgaccgaggacggcgtggaggacctgaacgagcccagcaagacccagaccttcaccttcagcgagacccagttcatcgccgtgaccgcctaccagaacaccgacatcacccagctgaagatcgaccacaaccccttcgccaagggcttcagagacaactacgacagcatgtacaccgccagcgagaacgacagactgacccccagccccaccgacagccccagaagccaccagatcgtgcccggcggcagatacggcgtgcagagcttcttccccgagcccttcgtgaacaccctgccccaggccagatactacaacggcgagagaaccgtgccccagaccaacggcctgctgagcccccagcagagcgaggaggtggccaaccccccccagagatggctggtgacccccgtgcagcagcccggcaccaacaagctggacatcagcagctacgagagcgagtacaccagcagcaccctgctgccctacggcatcaagagcctgcccctgcagaccagccacgccctgggctactaccccgaccccaccttccccgccatggccggctggggcggcagaggcagctaccagagaaagatggccgccggcctgccctggaccagcagaaccagccccaccgtgttcagcgaggaccagctgagcaaggagaaggtgaaggaggagatcggcagcagctggatcgagaccccccccagcatcaagagcctggacagcaacgacagcggcgtgtacaccagcgcctgcaagagaagaagactgagccccagcaacagcagcaacgagaacagccccagcatcaagtgcgaggacatcaacgccgaggagtacagcaaggacaccagcaagggcatgggcggctactacgccttctacaccaccccctag

SEQ ID NO: 80463 - DNA, 1713 bp, synthetic construct
  misc_feature 1..1713: note = Description of Artificial Sequence: Synthetic coding sequence
  source 1..1713: mol_type = other DNA
atggacagcctgagcagcgagagatactacctgcagagccccggcccccagggcagcgagctggccgccccctgcagcctgttcccctaccaggccgccgccggcgccccccacggccccgtgtaccccgcccccaacggcgccagatacccctacggcagcatgctgccccccggcggcttccccgccgccgtgtgcccccccggcagagcccagttcggccccggcgccggcgccggcagcggcgccggcggcagcagcggcggcggcggcggccccggcacctaccagtacagccagggcgcccccctgtacggcccctaccccggcgccgccgccgccggcagctgcggcggcctgggcggcctgggcgtgcccggcagcggcttcagagcccacgtgtacctgtgcaacagacccctgtggctgaagttccacagacaccagaccgagatgatcatcaccaagcagggcagaagaatgttccccttcctgagcttcaacatcaacggcctgaaccccaccgcccactacaacgtgttcgtggaggtggtgctggccgaccccaaccactggagattccagggcggcaagtgggtgacctgcggcaaggccgacaacaacatgcagggcaacaagatgtacgtgcaccccgagagccccaacaccggcagccactggatgagacaggagatcagcttcggcaagctgaagctgaccaacaacaagggcgccaacaacaacaacacccagatgatcgtgctgcagagcctgcacaagtaccagcccagactgcacatcgtggaggtgaccgaggacggcgtggaggacctgaacgagcccagcaagacccagaccttcaccttcagcgagacccagttcatcgccgtgaccgcctaccagaacaccgacatcacccagctgaagatcgaccacaaccccttcgccaagggcttcagagacaactacgacagcatgtacaccgccagcgagaacgacagactgacccccagccccaccgacagccccagaagccaccagatcgtgcccggcggcagatacggcgtgcagagcttcttccccgagcccttcgtgaacaccctgccccaggccagatactacaacggcgagagaaccgtgccccagaccaacggcctgctgagcccccagcagagcgaggaggtggccaaccccccccagagatggctggtgacccccgtgcagcagcccggcaccaacaagctggacatcagcagctacgagagcgagtacaccagcagcaccctgctgccctacggcatcaagagcctgcccctgcagaccagccacgccctgggctactaccccgaccccaccttccccgccatggccggctggggcggcagaggcagctaccagagaaagatggccgccggcctgccctggaccagcagaaccagccccaccgtgttcagcgaggaccagctgagcaaggagaaggtgaaggaggagatcggcagcagctggatcgagaccccccccagcatcaagagcctggacagcaacgacagcggcgtgtacaccagcgcctgcaagagaagaagactgagccccagcaacagcagcaacgagaacagccccagcatcaagtgcgaggacatcaacgccgaggagtacagcaaggacaccagcaagggcatgggcggctactacgccttctacaccaccccctag

SEQ ID NO: 80464 - DNA, 1233 bp, synthetic construct
  misc_feature 1..1233: note = Description of Artificial Sequence: Synthetic coding sequence
  source 1..1233: mol_type = other DNA
atgttccccttcctgagcttcaacatcaacggcctgaaccccaccgcccactacaacgtgttcgtggaggtggtgctggccgaccccaaccactggagattccagggcggcaagtgggtgacctgcggcaaggccgacaacaacatgcagggcaacaagatgtacgtgcaccccgagagccccaacaccggcagccactggatgagacaggagatcagcttcggcaagctgaagctgaccaacaacaagggcgccaacaacaacaacacccagatgatcgtgctgcagagcctgcacaagtaccagcccagactgcacatcgtggaggtgaccgaggacggcgtggaggacctgaacgagcccagcaagacccagaccttcaccttcagcgagacccagttcatcgccgtgaccgcctaccagaacaccgacatcacccagctgaagatcgaccacaaccccttcgccaagggcttcagagacaactacgacagcatgtacaccgccagcgagaacgacagactgacccccagccccaccgacagccccagaagccaccagatcgtgcccggcggcagatacggcgtgcagagcttcttccccgagcccttcgtgaacaccctgccccaggccagatactacaacggcgagagaaccgtgccccagaccaacggcctgctgagcccccagcagagcgaggaggtggccaaccccccccagagatggctggtgacccccgtgcagcagcccggcaccaacaagctggacatcagcagctacgagagcgagtacaccagcagcaccctgctgccctacggcatcaagagcctgcccctgcagaccagccacgccctgggctactaccccgaccccaccttccccgccatggccggctggggcggcagaggcagctaccagagaaagatggccgccggcctgccctggaccagcagaaccagccccaccgtgttcagcgaggaccagctgagcaaggagaaggtgaaggaggagatcggcagcagctggatcgagaccccccccagcatcaagagcctggacagcaacgacagcggcgtgtacaccagcgcctgcaagagaagaagactgagccccagcaacagcagcaacgagaacagccccagcatcaagtgcgaggacatcaacgccgaggagtacagcaaggacaccagcaagggcatgggcggctactacgccttctacaccaccccctag

SEQ ID NO: 80465 - DNA, 1269 bp, synthetic construct
  misc_feature 1..1269: note = Description of Artificial Sequence: Synthetic coding sequence
  source 1..1269: mol_type = other DNA
atgggccaggccggctgcaagggcctgtgcctgagcctgttcgactacaagaccgagaagtacgtgatcgccaagaacaagaaggtgggcctgctgtacagactgctgcaggccagcatcctggcctacctggtggtgtgggtgttcctgatcaagaagggctaccaggacgtggacaccagcctgcagagcgccgtgatcaccaaggtgaagggcgtggccttcaccaacaccagcgacctgggccagagaatctgggacgtggccgactacgtgatccccgcccagggcgagaacgtgttcttcgtggtgaccaacctgatcgtgacccccaaccagagacagaacgtgtgcgccgagaacgagggcatccccgacggcgcctgcagcaaggacagcgactgccacgccggcgaggccgtgaccgccggcaacggcgtgaagaccggcagatgcctgagaagagagaacctggccagaggcacctgcgagatcttcgcctggtgccccctggagaccagcagcagacccgaggagcccttcctgaaggaggccgaggacttcaccatcttcatcaagaaccacatcagattccccaagttcaacttcagcaagagcaacgtgatggacgtgaaggacagaagcttcctgaagagctgccacttcggccccaagaaccactactgccccatcttcagactgggcagcgtgatcagatgggccggcagcgacttccaggacatcgccctggagggcggcgtgatcggcatcaacatcgagtggaactgcgacctggacaaggccgccagcgagtgccacccccactacagcttcagcagactggacaacaagctgagcaagagcgtgagcagcggctacaacttcagattcgccagatactacagagacgccgccggcgtggagttcagaaccctgatgaaggcctacggcatcagattcgacgtgatggtgaacggcaagggcgccttcttctgcgacctggtgctgatctacctgatcaagaagagagagttctacagagacaagaagtacgaggaggtgagaggcctggaggacagcagccaggaggccgaggacgaggccagcggcctgggcctgagcgagcagctgaccagcggccccggcctgctgggcatgcccgagcagcaggagctgcaggagccccccgaggccaagagaggcagcagcagccagaagggcaacggcagcgtgtgcccccagctgctggagccccacagaagcacctag

SEQ ID NO: 80466 - DNA, 564 bp, synthetic construct
  misc_feature 1..564: note = Description of Artificial Sequence: Synthetic coding sequence
  source 1..564: mol_type = other DNA
atgagcgagatggccgagctgagcgagctgtacgaggagagcagcgacctgcagatggacgtgatgcccggcgagggcgacctgccccagatggaggtgggcagcggcagcagagagctgagcctgagacccagcagaagcggcgcccagcagctggaggaggagggccccatggaggaggaggaggcccagcccatggccgcccccgagggcaagagaagcctggccaacggccccaacgccggcgagcagcccggccaggtggccggcgccgacttcgagagcgaggacgagggcgaggagttcgacgactgggaggacgactacgactaccccgaggaggagcagctgagcggcgccggctacagagtgagcgccgccctggaggaggccgacaagatgttcctgagaaccagagagcccgccctggacggcggcttccagatgcactacgagaagacccccttcgaccagctggccttcatcgaggagctgttcagcctgatggtggtgaacagactgaccgaggagctgggctgcgacgagatcatcgacagagagtag

SEQ ID NO: 80467 - DNA, 711 bp, synthetic construct
  misc_feature 1..711: note = Description of Artificial Sequence: Synthetic coding sequence
  source 1..711: mol_type = other DNA
atgagcaagctgcccgccgacagcagcgtgccccagaccggcgccgccaacggcgacagagacgtgccccaggccgaggtgggcagaggcagaagagagcccgcccccgcccagcccgaggaggccggcgagggcgccatggccgccgccagaggcggccccgtgcccgccgccagagagggcagaatggccgccgccagagccgcccccgccgccgccgccagaggcgcccccgtggccgccgccgccctggccagagccgccgccgccggcagagagagccccgccgccgccgccgccagagaggccagaatggccgaggtggccagactgctgggcgagcccgtggacgaggagggccccgagggcagacccagaagcagacacggcaacggcggcctggccgccctgccctacctgagactgagacaccccctgagcgtgctgggcatcaactaccagcagttcctgagacactacctggagaactaccccatcgcccccggcagaatccaggagctggaggagagaagaagaagattcgtggaggcctgcagagccagagaggccgccttcgacgccgagtaccagagaaacccccacagagtggacctggacatcctgaccttcaccatcgccctgaccgccagcgaggtgatcaaccccctgatcgaggagctgggctgcgacaagttcatcaacagagagtag

SEQ ID NO: 80468 - DNA, 564 bp, synthetic construct
  misc_feature 1..564: note = Description of Artificial Sequence: Synthetic coding sequence
  source 1..564: mol_type = other DNA
atgagcaagctgcccgccgacagcagcgtgccccagaccggcgccgccaacggcgacagagacgtgccccaggccgaggtgggcagaggcagaagagagcccgcccccgcccagcccgaggaggccggcgagagccccgccgccgccgccgccagagaggccagaatggccgaggtggccagactgctgggcgagcccgtggacgaggagggccccgagggcagacccagaagcagacacggcaacggcggcctggccgccctgccctacctgagactgagacaccccctgagcgtgctgggcatcaactaccagcagttcctgagacactacctggagaactaccccatcgcccccggcagaatccaggagctggaggagagaagaagaagattcgtggaggcctgcagagccagagaggccgccttcgacgccgagtaccagagaaacccccacagagtggacctggacatcctgaccttcaccatcgccctgaccgccagcgaggtgatcaaccccctgatcgaggagctgggctgcgacaagttcatcaacagagagtag

SEQ ID NO: 80469 - DNA, 1002 bp, synthetic construct
  misc_feature 1..1002: note = Description of Artificial Sequence: Synthetic coding sequence
  source 1..1002: mol_type = other DNA
atgaagatggacgtgagcgtgagagccgccggctgcagcgacgacctgagcagcggcgaggccgacgtggaccccaagctgctggagctgaccgccgacgaggagaagtgcagaagcatcagaagacagtacagacagctgatgtactgcgtgagacagaacagagaggacatcgtgagcagcgccaacaacagcctgaccgaggccctggaggaggccaacgtgctgttcgacggcgtgagcagaaccagagaggccgccctggacgccagattcctggtgatggccagcgacctgggcaaggagaaggccaagcagctgaacagcgacatgaacttcttcaaccagctggccttctgcgacttcctgttcctgttcgtgggcctgaactggatggagggcgaccccgacaagctgagcgactgcgacgacagcatcgccctgagcttctggaaggccatcgagaaggaggccaccagctggatggtgaaggccgagaccttccacttcgtgttcggcagcttcaagctggagagaagcgcccccaagcccagactggagcaccagaagaaggtgagaaagatggaggagaacggcaacatgcccaccaagctgcagaagctggacctgagcagctaccccgaggccaccgagaagaacgtggagagaatcctgggcctgctgcagacctacttcagaaagtaccccgacacccccgtgagctacttcgagttcgtgatcgaccccaacagcttcagcagaaccgtggagaacatcttctacgtgagcttcatcgtgagagacggcttcgccagaatcagactggacgaggacagactgcccatcctggagcccatgaacgtgaaccagatgggcgagggcaacgacagcagctgccacggcagaaagcagggcgtgatcagcctgaccctgcaggagtggaagaacatcgtggccgccttcgagatcagcgaggccatgatcacctacagcagctactag

SEQ ID NO: 80470 - DNA, 2931 bp, synthetic construct
  misc_feature 1..2931: note = Description of Artificial Sequence: Synthetic coding sequence
  source 1..2931: mol_type = other DNA
atggagagaagatggcccctgggcctgggcctggtgctgctgctgtgcgcccccctgccccccggcgccagagccaaggaggtgaccctgatggacaccagcaaggcccagggcgagctgggctggctgctggacccccccaaggacggctggagcgagcagcagcagatcctgaacggcacccccctgtacatgtaccaggactgccccatgcagggcagaagagacaccgaccactggctgagaagcaactggatctacagaggcgaggaggccagcagagtgcacgtggagctgcagttcaccgtgagagactgcaagagcttccccggcggcgccggccccctgggctgcaaggagaccttcaacctgctgtacatggagagcgaccaggacgtgggcatccagctgagaagacccctgttccagaaggtgaccaccgtggccgccgaccagagcttcaccatcagagacctggtgagcggcagcgtgaagctgaacgtggagagatgcagcctgggcagactgaccagaagaggcctgtacctggccttccacaaccccggcgcctgcgtggccctggtgagcgtgagagtgttctaccagagatgccccgagaccctgaacggcctggcccagttccccgacaccctgcccggccccgccggcctggtggaggtggccggcacctgcctgccccacgccagagccagccccagacccagcggcgcccccagaatgcactgcagccccgacggcgagtggctggtgcccgtgggcagatgccactgcgagcccggctacgaggagggcggcagcggcgaggcctgcgtggcctgccccagcggcagctacagaatggacatggacaccccccactgcctgacctgcccccagcagagcaccgccgagagcgagggcgccaccatctgcacctgcgagagcggccactacagagcccccggcgagggcccccaggtggcctgcaccggcccccccagcgcccccagaaacctgagcttcagcgccagcggcacccagctgagcctgagatgggagccccccgccgacaccggcggcagacaggacgtgagatacagcgtgagatgcagccagtgccagggcaccgcccaggacggcggcccctgccagccctgcggcgtgggcgtgcacttcagccccggcgccagaggcctgaccacccccgccgtgcacgtgaacggcctggagccctacgccaactacaccttcaacgtggaggcccagaacggcgtgagcggcctgggcagcagcggccacgccagcaccagcgtgagcatcagcatgggccacgccgagagcctgagcggcctgagcctgagactggtgaagaaggagcccagacagctggagctgacctgggccggcagcagacccagaagccccggcgccaacctgacctacgagctgcacgtgctgaaccaggacgaggagagataccagatggtgctggagcccagagtgctgctgaccgagctgcagcccgacaccacctacatcgtgagagtgagaatgctgacccccctgggccccggccccttcagccccgaccacgagttcagaaccagcccccccgtgagcagaggcctgaccggcggcgagatcgtggccgtgatcttcggcctgctgctgggcgccgccctgctgctgggcatcctggtgttcagaagcagaagagcccagagacagagacagcagagacagagagacagagccaccgacgtggacagagaggacaagctgtggctgaagccctacgtggacctgcaggcctacgaggaccccgcccagggcgccctggacttcaccagagagctggaccccgcctggctgatggtggacaccgtgatcggcgagggcgagttcggcgaggtgtacagaggcaccctgagactgcccagccaggactgcaagaccgtggccatcaagaccctgaaggacaccagccccggcggccagtggtggaacttcctgagagaggccaccatcatgggccagttcagccacccccacatcctgcacctggagggcgtggtgaccaagagaaagcccatcatgatcatcaccgagttcatggagaacggcgccctggacgccttcctgagagagagagaggaccagctggtgcccggccagctggtggccatgctgcagggcatcgccagcggcatgaactacctgagcaaccacaactacgtgcacagagacctggccgccagaaacatcctggtgaaccagaacctgtgctgcaaggtgagcgacttcggcctgaccagactgctggacgacttcgacggcacctacgagacccagggcggcaagatccccatcagatggaccgcccccgaggccatcgcccacagaatcttcaccaccgccagcgacgtgtggagcttcggcatcgtgatgtgggaggtgctgagcttcggcgacaagccctacggcgagatgagcaaccaggaggtgatgaagagcatcgaggacggctacagactgcccccccccgtggactgccccgcccccctgtacgagctgatgaagaactgctgggcctacgacagagccagaagaccccacttccagaagctgcaggcccacctggagcagctgctggccaacccccacagcctgagaaccatcgccaacttcgaccccagaatgaccctgagactgcccagcctgagcggcagcgacggcatcccctacagaaccgtgagcgagtggctggagagcatcagaatgaagagatacatcctgcacttccacagcgccggcctggacaccatggagtgcgtgctggagctgaccgccgaggacctgacccagatgggcatcaccctgcccggccaccagaagagaatcctgtgcagcatccagggcttcaaggactag

SEQ ID NO: 80471 - DNA, 888 bp, synthetic construct
  misc_feature 1..888: note = Description of Artificial Sequence: Synthetic coding sequence
  source 1..888: mol_type = other DNA
atggagacctgcgccggcccccaccccctgagactgttcctgtgcagaatgcagctgtgcctggccctgctgctgggcccctggagacccggcaccgccgaggaggtgatcctgctggacagcaaggccagccaggccgagctgggctggaccgccctgcccagcaacggctgggaggagatcagcggcgtggacgagcacgacagacccatcagaacctaccaggtgtgcaacgtgctggagcccaaccaggacaactggctgcagaccggctggatcagcagaggcagaggccagagaatcttcgtggagctgcagttcaccctgagagactgcagcagcatccccggcgccgccggcacctgcaaggagaccttcaacgtgtactacctggagaccgaggccgacctgggcagaggcagacccagactgggcggcagcagacccagaaagatcgacaccatcgccgccgacgagagcttcacccagggcgacctgggcgagagaaagatgaagctgaacaccgaggtgagagagatcggccccctgagcagaagaggcttccacctggccttccaggacgtgggcgcctgcgtggccctggtgagcgtgagagtgtactacaagcagtgcagagccaccgtgagaggcctggccaccttccccgccaccgccgccgagagcgccttcagcaccctggtggaggtggccggcacctgcgtggcccacagcgagggcgagcccggcagcccccccagaatgcactgcggcgccgacggcgagtggctggtgcccgtgggcagatgcagctgcagcgccggcttccaggagagaggcgacttctgcgagggcatccagctggccggcggcagaggcgtgggcgtgtag

SEQ ID NO: 80472 - DNA, 1632 bp, synthetic construct
  misc_feature 1..1632: note = Description of Artificial Sequence: Synthetic coding sequence
  source 1..1632: mol_type = other DNA
atggtgaagaccggcgcccccaccgtgaccgtgaccaacctgaagcccgccaccagatacgtgttccagatcagagccgccagccccggccccagctgggaggcccagagcttcaaccccagcatcgaggtgcagaccctgggcgaggccgccagcggcagcagagaccagagccccgccatcgtggtgaccgtggtgaccatcagcgccctgctggtgctgggcagcgtgatgagcgtgctggccatctggagaagaccctgcagctacggcaagggcggcggcgacgcccacgacgaggaggagctgtacttccacttcaaggtgcccaccagaagaaccttcctggacccccagagctgcggcgacctgctgcaggccgtgcacctgttcgccaaggagctggacgccaagagcgtgaccctggagagaagcctgggcggcggcagattcggcgagctgtgctgcggctgcctgcagctgcccggcagacaggagctgctggtggccgtgcacatgctgagagacagcgccagcgacagccagagactgggcttcctggccgaggccctgaccctgggccagttcgaccacagccacatcgtgagactggagggcgtggtgaccagaggcagcaccctgatgatcgtgaccgagtacatgagccacggcgccctggacggcttcctgagaagacacgagggccagctggtggccggccagctgatgggcctgctgcccggcctggccagcgccatgaagtacctgagcgagatgggctacgtgcacagaggcctggccgccagacacgtgctggtgagcagcgacctggtgtgcaagatcagcggcttcggcagaggccccagagacagaagcgaggccgtgtacaccaccatgagcggcagaagccccgccctgtgggccgcccccgagaccctgcagttcggccacttcagcagcgccagcgacgtgtggagcttcggcatcatcatgtgggaggtgatggccttcggcgagagaccctactgggacatgagcggccaggacgtgatcaaggccgtggaggacggcttcagactgcccccccccagaaactgccccaacctgctgcacagactgatgctggactgctggcagaaggaccccggcgagagacccagattcagccagatccacagcatcctgagcaagatggtgcaggaccccgagccccccaagtgcgccctgaccacctgccccagaccccccacccccctggccgacagagccttcagcaccttccccagcttcggcagcgtgggcgcctggctggaggccctggacctgtgcagatacaaggacagcttcgccgccgccggctacggcagcctggaggccgtggccgagatgaccgcccaggacctggtgagcctgggcatcagcctggccgagcacagagaggccctgctgagcggcatcagcgccctgcaggccagagtgctgcagctgcagggccagggcgtgcaggacaacaagaacctgagcgtgatctggtgcctgttcgagtggcagctgctggaccactgcatcgccggcgtggagggcctgctgccccccagcagcagaaccggcgtgagcagaatctgcgtgtag

SEQ ID NO: 80473 - DNA, 3027 bp, synthetic construct
  misc_feature 1..3027: note = Description of Artificial Sequence: Synthetic coding sequence
  source 1..3027: mol_type = other DNA
atggagacctgcgccggcccccaccccctgagactgttcctgtgcagaatgcagctgtgcctggccctgctgctgggcccctggagacccggcaccgccgaggaggtgatcctgctggacagcaaggccagccaggccgagctgggctggaccgccctgcccagcaacggctgggaggagatcagcggcgtggacgagcacgacagacccatcagaacctaccaggtgtgcaacgtgctggagcccaaccaggacaactggctgcagaccggctggatcagcagaggcagaggccagagaatcttcgtggagctgcagttcaccctgagagactgcagcagcatccccggcgccgccggcacctgcaaggagaccttcaacgtgtactacctggagaccgaggccgacctgggcagaggcagacccagactgggcggcagcagacccagaaagatcgacaccatcgccgccgacgagagcttcacccagggcgacctgggcgagagaaagatgaagctgaacaccgaggtgagagagatcggccccctgagcagaagaggcttccacctggccttccaggacgtgggcgcctgcgtggccctggtgagcgtgagagtgtactacaagcagtgcagagccaccgtgagaggcctggccaccttccccgccaccgccgccgagagcgccttcagcaccctggtggaggtggccggcacctgcgtggcccacagcgagggcgagcccggcagcccccccagaatgcactgcggcgccgacggcgagtggctggtgcccgtgggcagatgcagctgcagcgccggcttccaggagagaggcgacttctgcgaggcctgcccccccggcttctacaaggtgagccccagaagacccctgtgcagcccctgccccgagcacagcagagccctggagaacgccagcaccttctgcgtgtgccaggacagctacgccagaagccccaccgacccccccagcgccagctgcaccagaccccccagcgcccccagagacctgcagtacagcctgagcagaagccccctggtgctgagactgagatggctgccccccgccgacagcggcggcagaagcgacgtgacctacagcctgctgtgcctgagatgcggcagagagggccccgccggcgcctgcgagccctgcggccccagagtggccttcctgcccagacaggccggcctgagagagagagccgccaccctgctgcacctgagacccggcgccagatacaccgtgagagtggccgccctgaacggcgtgagcggccccgccgccgccgccggcaccacctacgcccaggtgaccgtgagcaccggccccggcgccccctgggaggaggacgagatcagaagagacagagtggagccccagagcgtgagcctgagctggagagagcccatccccgccggcgcccccggcgccaacgacaccgagtacgagatcagatactacgagaagggccagagcgagcagacctacagcatggtgaagaccggcgcccccaccgtgaccgtgaccaacctgaagcccgccaccagatacgtgttccagatcagagccgccagccccggccccagctgggaggcccagagcttcaaccccagcatcgaggtgcagaccctgggcgaggccgccagcggcagcagagaccagagccccgccatcgtggtgaccgtggtgaccatcagcgccctgctggtgctgggcagcgtgatgagcgtgctggccatctggagaagaccctgcagctacggcaagggcggcggcgacgcccacgacgaggaggagctgtacttccacttcaaggtgcccaccagaagaaccttcctggacccccagagctgcggcgacctgctgcaggccgtgcacctgttcgccaaggagctggacgccaagagcgtgaccctggagagaagcctgggcggcggcagattcggcgagctgtgctgcggctgcctgcagctgcccggcagacaggagctgctggtggccgtgcacatgctgagagacagcgccagcgacagccagagactgggcttcctggccgaggccctgaccctgggccagttcgaccacagccacatcgtgagactggagggcgtggtgaccagaggcagcaccctgatgatcgtgaccgagtacatgagccacggcgccctggacggcttcctgagaagacacgagggccagctggtggccggccagctgatgggcctgctgcccggcctggccagcgccatgaagtacctgagcgagatgggctacgtgcacagaggcctggccgccagacacgtgctggtgagcagcgacctggtgtgcaagatcagcggcttcggcagaggccccagagacagaagcgaggccgtgtacaccaccatgagcggcagaagccccgccctgtgggccgcccccgagaccctgcagttcggccacttcagcagcgccagcgacgtgtggagcttcggcatcatcatgtgggaggtgatggccttcggcgagagaccctactgggacatgagcggccaggacgtgatcaaggccgtggaggacggcttcagactgcccccccccagaaactgccccaacctgctgcacagactgatgctggactgctggcagaaggaccccggcgagagacccagattcagccagatccacagcatcctgagcaagatggtgcaggaccccgagccccccaagtgcgccctgaccacctgccccagaccccccacccccctggccgacagagccttcagcaccttccccagcttcggcagcgtgggcgcctggctggaggccctggacctgtgcagatacaaggacagcttcgccgccgccggctacggcagcctggaggccgtggccgagatgaccgcccaggacctggtgagcctgggcatcagcctggccgagcacagagaggccctgctgagcggcatcagcgccctgcaggccagagtgctgcagctgcagggccagggcgtgcaggtgtag

SEQ ID NO: 80474 - DNA, 3045 bp, synthetic construct
  misc_feature 1..3045: note = Description of Artificial Sequence: Synthetic coding sequence
  source 1..3045: mol_type = other DNA
atggagacctgcgccggcccccaccccctgagactgttcctgtgcagaatgcagctgtgcctggccctgctgctgggcccctggagacccggcaccgccgaggaggtgatcctgctggacagcaaggccagccaggccgagctgggctggaccgccctgcccagcaacggctgggaggagatcagcggcgtggacgagcacgacagacccatcagaacctaccaggtgtgcaacgtgctggagcccaaccaggacaactggctgcagaccggctggatcagcagaggcagaggccagagaatcttcgtggagctgcagttcaccctgagagactgcagcagcatccccggcgccgccggcacctgcaaggagaccttcaacgtgtactacctggagaccgaggccgacctgggcagaggcagacccagactgggcggcagcagacccagaaagatcgacaccatcgccgccgacgagagcttcacccagggcgacctgggcgagagaaagatgaagctgaacaccgaggtgagagagatcggccccctgagcagaagaggcttccacctggccttccaggacgtgggcgcctgcgtggccctggtgagcgtgagagtgtactacaagcagtgcagagccaccgtgagaggcctggccaccttccccgccaccgccgccgagagcgccttcagcaccctggtggaggtggccggcacctgcgtggcccacagcgagggcgagcccggcagcccccccagaatgcactgcggcgccgacggcgagtggctggtgcccgtgggcagatgcagctgcagcgccggcttccaggagagaggcgacttctgcgaggcctgcccccccggcttctacaaggtgagccccagaagacccctgtgcagcccctgccccgagcacagcagagccctggagaacgccagcaccttctgcgtgtgccaggacagctacgccagaagccccaccgacccccccagcgccagctgcaccagaccccccagcgcccccagagacctgcagtacagcctgagcagaagccccctggtgctgagactgagatggctgccccccgccgacagcggcggcagaagcgacgtgacctacagcctgctgtgcctgagatgcggcagagagggccccgccggcgcctgcgagccctgcggccccagagtggccttcctgcccagacaggccggcctgagagagagagccgccaccctgctgcacctgagacccggcgccagatacaccgtgagagtggccgccctgaacggcgtgagcggccccgccgccgccgccggcaccacctacgcccaggtgaccgtgagcaccggccccggcgccccctgggaggaggacgagatcagaagagacagagtggagccccagagcgtgagcctgagctggagagagcccatccccgccggcgcccccggcgccaacgacaccgagtacgagatcagatactacgagaagggccagagcgagcagacctacagcatggtgaagaccggcgcccccaccgtgaccgtgaccaacctgaagcccgccaccagatacgtgttccagatcagagccgccagccccggccccagctgggaggcccagagcttcaaccccagcatcgaggtgcagaccctgggcgaggccgccagcggcagcagagaccagagccccgccatcgtggtgaccgtggtgaccatcagcgccctgctggtgctgggcagcgtgatgagcgtgctggccatctggagaagaccctgcagctacggcaagggcggcggcgacgcccacgacgaggaggagctgtacttccacttcaaggtgcccaccagaagaaccttcctggacccccagagctgcggcgacctgctgcaggccgtgcacctgttcgccaaggagctggacgccaagagcgtgaccctggagagaagcctgggcggcggcagattcggcgagctgtgctgcggctgcctgcagctgcccggcagacaggagctgctggtggccgtgcacatgctgagagacagcgccagcgacagccagagactgggcttcctggccgaggccctgaccctgggccagttcgaccacagccacatcgtgagactggagggcgtggtgaccagaggcagcaccctgatgatcgtgaccgagtacatgagccacggcgccctggacggcttcctgagaagacacgagggccagctggtggccggccagctgatgggcctgctgcccggcctggccagcgccatgaagtacctgagcgagatgggctacgtgcacagaggcctggccgccagacacgtgctggtgagcagcgacctggtgtgcaagatcagcggcttcggcagaggccccagagacagaagcgaggccgtgtacaccaccatgagcggcagaagccccgccctgtgggccgcccccgagaccctgcagttcggccacttcagcagcgccagcgacgtgtggagcttcggcatcatcatgtgggaggtgatggccttcggcgagagaccctactgggacatgagcggccaggacgtgatcaaggccgtggaggacggcttcagactgcccccccccagaaactgccccaacctgctgcacagactgatgctggactgctggcagaaggaccccggcgagagacccagattcagccagatccacagcatcctgagcaagatggtgcaggaccccgagccccccaagtgcgccctgaccacctgccccagaccccccacccccctggccgacagagccttcagcaccttccccagcttcggcagcgtgggcgcctggctggaggccctggacctgtgcagatacaaggacagcttcgccgccgccggctacggcagcctggaggccgtggccgagatgaccgcccaggacctggtgagcctgggcatcagcctggccgagcacagagaggccctgctgagcggcatcagcgccctgcaggccagagtgctgcagctgcagggccagggcgtgcaggtgatcatcaagacctgcctgtag

SEQ ID NO: 80475 - DNA, 468 bp, synthetic construct
  misc_feature 1..468: note = Description of Artificial Sequence: Synthetic coding sequence
  source 1..468: mol_type = other DNA
atggtgaagaccggcgcccccaccgtgaccgtgaccaacctgaagcccgccaccagatacgtgttccagatcagagccgccagccccggccccagctgggaggcccagagcttcaaccccagcatcgaggtgcagaccctgggcgaggccgccagcggcagcagagaccagagccccgccatcgtggtgaccgtggtgaccatcagcgccctgctggtgctgggcagcgtgatgagcgtgctggccatctggagaagaccctgcagctacggcaagggcggcggcgacgcccacgacgaggaggagctgtacttccacttcaaggtgcccaccagaagaaccttcctggacccccagagctgcggcgacctgctgcaggccgtgcacctgttcgccaaggagctggacgccaagagcgtgaccctggagagaagcctgggcggcggcctggagaccagcccccactag

SEQ ID NO: 80476 - DNA, 2931 bp, synthetic construct
  misc_feature 1..2931: note = Description of Artificial Sequence: Synthetic coding sequence
  source 1..2931: mol_type = other DNA
atggagctgcaggccgccagagcctgcttcgccctgctgtggggctgcgccctggccgccgccgccgccgcccagggcaaggaggtggtgctgctggacttcgccgccgccggcggcgagctgggctggctgacccacccctacggcaagggctgggacctgatgcagaacatcatgaacgacatgcccatctacatgtacagcgtgtgcaacgtgatgagcggcgaccaggacaactggctgagaaccaactgggtgtacagaggcgaggccgagagaatcttcatcgagctgaagttcaccgtgagagactgcaacagcttccccggcggcgccagcagctgcaaggagaccttcaacctgtactacgccgagagcgacctggactacggcaccaacttccagaagagactgttcaccaagatcgacaccatcgcccccgacgagatcaccgtgagcagcgacttcgaggccagacacgtgaagctgaacgtggaggagagaagcgtgggccccctgaccagaaagggcttctacctggccttccaggacatcggcgcctgcgtggccctgctgagcgtgagagtgtactacaagaagtgccccgagctgctgcagggcctggcccacttccccgagaccatcgccggcagcgacgcccccagcctggccaccgtggccggcacctgcgtggaccacgccgtggtgccccccggcggcgaggagcccagaatgcactgcgccgtggacggcgagtggctggtgcccatcggccagtgcctgtgccaggccggctacgagaaggtggaggacgcctgccaggcctgcagccccggcttcttcaagttcgaggccagcgagagcccctgcctggagtgccccgagcacaccctgcccagccccgagggcgccaccagctgcgagtgcgaggagggcttcttcagagccccccaggaccccgccagcatgccctgcaccagaccccccagcgccccccactacctgaccgccgtgggcatgggcgccaaggtggagctgagatggacccccccccaggacagcggcggcagagaggacatcgtgtacagcgtgacctgcgagcagtgctggcccgagagcggcgagtgcggcccctgcgaggccagcgtgagatacagcgagcccccccacggcctgaccagaaccagcgtgaccgtgagcgacctggagccccacatgaactacaccttcaccgtggaggccagaaacggcgtgagcggcctggtgaccagcagaagcttcagaaccgccagcgtgagcatcaaccagaccgagccccccaaggtgagactggagggcagaagcaccaccagcctgagcgtgagctggagcatcccccccccccagcagagcagagtgtggaagtacgaggtgacctacagaaagaagggcgacagcaacagctacaacgtgagaagaaccgagggcttcagcgtgaccctggacgacctggcccccgacaccacctacctggtgcaggtgcaggccctgacccaggagggccagggcgccggcagcaaggtgcacgagttccagaccctgagccccgagggcagcggcaacctggccgtgatcggcggcgtggccgtgggcgtggtgctgctgctggtgctggccggcgtgggcttcttcatccacagaagaagaaagaaccagagagccagacagagccccgaggacgtgtacttcagcaagagcgagcagctgaagcccctgaagacctacgtggacccccacacctacgaggaccccaaccaggccgtgctgaagttcaccaccgagatccaccccagctgcgtgaccagacagaaggtgatcggcgccggcgagttcggcgaggtgtacaagggcatgctgaagaccagcagcggcaagaaggaggtgcccgtggccatcaagaccctgaaggccggctacaccgagaagcagagagtggacttcctgggcgaggccggcatcatgggccagttcagccaccacaacatcatcagactggagggcgtgatcagcaagtacaagcccatgatgatcatcaccgagtacatggagaacggcgccctggacaagttcctgagagagaaggacggcgagttcagcgtgctgcagctggtgggcatgctgagaggcatcgccgccggcatgaagtacctggccaacatgaactacgtgcacagagacctggccgccagaaacatcctggtgaacagcaacctggtgtgcaaggtgagcgacttcggcctgagcagagtgctggaggacgaccccgaggccacctacaccaccagcggcggcaagatccccatcagatggaccgcccccgaggccatcagctacagaaagttcaccagcgccagcgacgtgtggagcttcggcatcgtgatgtgggaggtgatgacctacggcgagagaccctactgggagctgagcaaccacgaggtgatgaaggccatcaacgacggcttcagactgcccacccccatggactgccccagcgccatctaccagctgatgatgcagtgctggcagcaggagagagccagaagacccaagttcgccgacatcgtgagcatcctggacaagctgatcagagcccccgacagcctgaagaccctggccgacttcgaccccagagtgagcatcagactgcccagcaccagcggcagcgagggcgtgcccttcagaaccgtgagcgagtggctggagagcatcaagatgcagcagtacaccgagcacttcatggccgccggctacaccgccatcgagaaggtggtgcagatgaccaacgacgacatcaagagaatcggcgtgagactgcccggccaccagaagagaatcgcctacagcctgctgggcctgaaggaccaggtgaacaccgtgggcatccccatctag

SEQ ID NO: 80477 - DNA, 2952 bp, synthetic construct
  misc_feature 1..2952: note = Description of Artificial Sequence: Synthetic coding sequence
  source 1..2952: mol_type = other DNA
atggactgccagctgagcatcctgctgctgctgagctgcagcgtgctggacagcttcggcgagctgatcccccagcccagcaacgaggtgaacctgctggacagcaagaccatccagggcgagctgggctggatcagctaccccagccacggctgggaggagatcagcggcgtggacgagcactacacccccatcagaacctaccaggtgtgcaacgtgatggaccacagccagaacaactggctgagaaccaactgggtgcccagaaacagcgcccagaagatctacgtggagctgaagttcaccctgagagactgcaacagcatccccctggtgctgggcacctgcaaggagaccttcaacctgtactacatggagagcgacgacgaccacggcgtgaagttcagagagcaccagttcaccaagatcgacaccatcgccgccgacgagagcttcacccagatggacctgggcgacagaatcctgaagctgaacaccgagatcagagaggtgggccccgtgaacaagaagggcttctacctggccttccaggacgtgggcgcctgcgtggccctggtgagcgtgagagtgtacttcaagaagtgccccttcaccgtgaagaacctggccatgttccccgacaccgtgcccatggacagccagagcctggtggaggtgagaggcagctgcgtgaacaacagcaaggaggaggacccccccagaatgtactgcagcaccgagggcgagtggctggtgcccatcggcaagtgcagctgcaacgccggctacgaggagagaggcttcatgtgccaggcctgcagacccggcttctacaaggccctggacggcaacatgaagtgcgccaagtgccccccccacagcagcacccaggaggacggcagcatgaactgcagatgcgagaacaactacttcagagccgacaaggacccccccagcatggcctgcaccagaccccccagcagccccagaaacgtgatcagcaacatcaacgagaccagcgtgatcctggactggagctggcccctggacaccggcggcagaaaggacgtgaccttcaacatcatctgcaagaagtgcggctggaacatcaagcagtgcgagccctgcagccccaacgtgagattcctgcccagacagttcggcctgaccaacaccaccgtgaccgtgaccgacctgctggcccacaccaactacaccttcgagatcgacgccgtgaacggcgtgagcgagctgagcagcccccccagacagttcgccgccgtgagcatcaccaccaaccaggccgcccccagccccgtgctgaccatcaagaaggacagaaccagcagaaacagcatcagcctgagctggcaggagcccgagcaccccaacggcatcatcctggactacgaggtgaagtactacgagaagcaggagcaggagaccagctacaccatcctgagagccagaggcaccaacgtgaccatcagcagcctgaagcccgacaccatctacgtgttccagatcagagccagaaccgccgccggctacggcaccaacagcagaaagttcgagttcgagaccagccccgacagcttcagcatcagcggcgagagcagccaggtggtgatgatcgccatcagcgccgccgtggccatcatcctgctgaccgtggtgatctacgtgctgatcggcagattctgcggctacaagagcaagcacggcgccgacgagaagagactgcacttcggcaacggccacctgaagctgcccggcctgagaacctacgtggacccccacacctacgaggaccccacccaggccgtgcacgagttcgccaaggagctggacgccaccaacatcagcatcgacaaggtggtgggcgccggcgagttcggcgaggtgtgcagcggcagactgaagctgcccagcaagaaggagatcagcgtggccatcaagaccctgaaggtgggctacaccgagaagcagagaagagacttcctgggcgaggccagcatcatgggccagttcgaccaccccaacatcatcagactggagggcgtggtgaccaagagcaagcccgtgatgatcgtgaccgagtacatggagaacggcagcctggacagcttcctgagaaagcacgacgcccagttcaccgtgatccagctggtgggcatgctgagaggcatcgccagcggcatgaagtacctgagcgacatgggctacgtgcacagagacctggccgccagaaacatcctgatcaacagcaacctggtgtgcaaggtgagcgacttcggcctgagcagagtgctggaggacgaccccgaggccgcctacaccaccagaggcggcaagatccccatcagatggaccagccccgaggccatcgcctacagaaagttcaccagcgccagcgacgtgtggagctacggcatcgtgctgtgggaggtgatgagctacggcgagagaccctactgggagatgagcaaccaggacgtgatcaaggccgtggacgagggctacagactgcccccccccatggactgccccgccgccctgtaccagctgatgctggactgctggcagaaggacagaaacaacagacccaagttcgagcagatcgtgagcatcctggacaagctgatcagaaaccccggcagcctgaagatcatcaccagcgccgccgccagacccagcaacctgctgctggaccagagcaacgtggacatcaccaccttcagaaccaccggcgactggctgaacggcgtgtggaccgcccactgcaaggagatcttcaccggcgtggagtacagcagctgcgacaccatcgccaagatcagcaccgacgacatgaagaaggtgggcgtgaccgtggtgggcccccagaagaagatcatcagcagcatcaaggccctggagacccagagcaagaacggccccgtgcccgtgtag

SEQ ID NO: 80478 - DNA, 1620 bp, synthetic construct
  misc_feature 1..1620: note = Description of Artificial Sequence: Synthetic coding sequence
  source 1..1620: mol_type = other DNA
atggactgccagctgagcatcctgctgctgctgagctgcagcgtgctggacagcttcggcgagctgatcccccagcccagcaacgaggtgaacctgctggacagcaagaccatccagggcgagctgggctggatcagctaccccagccacggctgggaggagatcagcggcgtggacgagcactacacccccatcagaacctaccaggtgtgcaacgtgatggaccacagccagaacaactggctgagaaccaactgggtgcccagaaacagcgcccagaagatctacgtggagctgaagttcaccctgagagactgcaacagcatccccctggtgctgggcacctgcaaggagaccttcaacctgtactacatggagagcgacgacgaccacggcgtgaagttcagagagcaccagttcaccaagatcgacaccatcgccgccgacgagagcttcacccagatggacctgggcgacagaatcctgaagctgaacaccgagatcagagaggtgggccccgtgaacaagaagggcttctacctggccttccaggacgtgggcgcctgcgtggccctggtgagcgtgagagtgtacttcaagaagtgccccttcaccgtgaagaacctggccatgttccccgacaccgtgcccatggacagccagagcctggtggaggtgagaggcagctgcgtgaacaacagcaaggaggaggacccccccagaatgtactgcagcaccgagggcgagtggctggtgcccatcggcaagtgcagctgcaacgccggctacgaggagagaggcttcatgtgccaggcctgcagacccggcttctacaaggccctggacggcaacatgaagtgcgccaagtgccccccccacagcagcacccaggaggacggcagcatgaactgcagatgcgagaacaactacttcagagccgacaaggacccccccagcatggcctgcaccagaccccccagcagccccagaaacgtgatcagcaacatcaacgagaccagcgtgatcctggactggagctggcccctggacaccggcggcagaaaggacgtgaccttcaacatcatctgcaagaagtgcggctggaacatcaagcagtgcgagccctgcagccccaacgtgagattcctgcccagacagttcggcctgaccaacaccaccgtgaccgtgaccgacctgctggcccacaccaactacaccttcgagatcgacgccgtgaacggcgtgagcgagctgagcagcccccccagacagttcgccgccgtgagcatcaccaccaaccaggccgcccccagccccgtgctgaccatcaagaaggacagaaccagcagaaacagcatcagcctgagctggcaggagcccgagcaccccaacggcatcatcctggactacgaggtgaagtactacgagaagcaggagcaggagaccagctacaccatcctgagagccagaggcaccaacgtgaccatcagcagcctgaagcccgacaccatctacgtgttccagatcagagccagaaccgccgccggctacggcaccaacagcagaaagttcgagttcgagaccagccccgactgcatgtactacttcaacgccgtgtag

SEQ ID NO: 80479 - DNA, 3114 bp, synthetic construct
  misc_feature 1..3114: note = Description of Artificial Sequence: Synthetic coding sequence
  source 1..3114: mol_type = other DNA
atgagaggcagcggccccagaggcgccggcagaagaagaccccccagcggcggcggcgacacccccatcacccccgccagcctggccggctgctacagcgcccccagaagagcccccctgtggacctgcctgctgctgtgcgccgccctgagaaccctgctggccagccccagcaacgaggtgaacctgctggacagcagaaccgtgatgggcgacctgggctggatcgccttccccaagaacggctgggaggagatcggcgaggtggacgagaactacgcccccatccacacctaccaggtgtgcaaggtgatggagcagaaccagaacaactggctgctgaccagctggatcagcaacgagggcgccagcagaatcttcatcgagctgaagttcaccctgagagactgcaacagcctgcccggcggcctgggcacctgcaaggagaccttcaacatgtactacttcgagagcgacgaccagaacggcagaaacatcaaggagaaccagtacatcaagatcgacaccatcgccgccgacgagagcttcaccgagctggacctgggcgacagagtgatgaagctgaacaccgaggtgagagacgtgggccccctgagcaagaagggcttctacctggccttccaggacgtgggcgcctgcatcgccctggtgagcgtgagagtgtactacaagaagtgccccagcgtggtgagacacctggccgtgttccccgacaccatcaccggcgccgacagcagccagctgctggaggtgagcggcagctgcgtgaaccacagcgtgaccgacgagccccccaagatgcactgcagcgccgagggcgagtggctggtgcccatcggcaagtgcatgtgcaaggccggctacgaggagaagaacggcacctgccaggtgtgcagacccggcttcttcaaggccagcccccacatccagagctgcggcaagtgccccccccacagctacacccacgaggaggccagcaccagctgcgtgtgcgagaaggactacttcagaagagagagcgacccccccaccatggcctgcaccagaccccccagcgcccccagaaacgccatcagcaacgtgaacgagaccagcgtgttcctggagtggatcccccccgccgacaccggcggcagaaaggacgtgagctactacatcgcctgcaagaagtgcaacagccacgccggcgtgtgcgaggagtgcggcggccacgtgagatacctgcccagacagagcggcctgaagaacaccagcgtgatgatggtggacctgctggcccacaccaactacaccttcgagatcgaggccgtgaacggcgtgagcgacctgagccccggcgccagacagtacgtgagcgtgaacgtgaccaccaaccaggccgcccccagccccgtgaccaacgtgaagaagggcaagatcgccaagaacagcatcagcctgagctggcaggagcccgacagacccaacggcatcatcctggagtacgagatcaagtacttcgagaaggaccaggagaccagctacaccatcatcaagagcaaggagaccaccatcaccgccgagggcctgaagcccgccagcgtgtacgtgttccagatcagagccagaaccgccgccggctacggcgtgttcagcagaagattcgagttcgagaccacccccgtgttcgccgccagcagcgaccagagccagatccccgtgatcgccgtgagcgtgaccgtgggcgtgatcctgctggccgtggtgatcggcgtgctgctgagcggcagctgctgcgagtgcggctgcggcagagccagcagcctgtgcgccgtggcccaccccagcctgatctggagatgcggctacagcaaggccaagcaggaccccgaggaggagaagatgcacttccacaacggccacatcaagctgcccggcgtgagaacctacatcgacccccacacctacgaggaccccaaccaggccgtgcacgagttcgccaaggagatcgaggccagctgcatcaccatcgagagagtgatcggcgccggcgagttcggcgaggtgtgcagcggcagactgaagctgcccggcaagagagagctgcccgtggccatcaagaccctgaaggtgggctacaccgagaagcagagaagagacttcctgggcgaggccagcatcatgggccagttcgaccaccccaacatcatccacctggagggcgtggtgaccaagagcaagcccgtgatgatcgtgaccgagtacatggagaacggcagcctggacaccttcctgaagaagaacgacggccagttcaccgtgatccagctggtgggcatgctgagaggcatcagcgccggcatgaagtacctgagcgacatgggctacgtgcacagagacctggccgccagaaacatcctgatcaacagcaacctggtgtgcaaggtgagcgacttcggcctgagcagagtgctggaggacgaccccgaggccgcctacaccaccagaggcggcaagatccccatcagatggaccgcccccgaggccatcgccttcagaaagttcaccagcgccagcgacgtgtggagctacggcatcgtgatgtgggaggtggtgagctacggcgagagaccctactgggagatgaccaaccaggacgtgatcaaggccgtggaggagggctacagactgcccagccccatggactgccccgccgccctgtaccagctgatgctggactgctggcagaaggagagaaacagcagacccaagttcgacgagatcgtgaacatgctggacaagctgatcagaaaccccagcagcctgaagaccctggtgaacgccagctgcagagtgagcaacctgctggccgagcacagccccctgggcagcggcgcctacagaagcgtgggcgagtggctggaggccatcaagatgggcagatacaccgagatcttcatggagaacggctacagcagcatggacgccgtggcccaggtgaccctggaggacctgagaagactgggcgtgaccctggtgggccaccagaagaagatcatgaacagcctgcaggagatgaaggtgcagctggtgaacggcatggtgcccctgtag

SEQ ID NO: 80480 - DNA, 3048 bp, synthetic construct
  misc_feature 1..3048: note = Description of Artificial Sequence: Synthetic coding sequence
  source 1..3048: mol_type = other DNA
atgagaggcagcggccccagaggcgccggcagaagaagaccccccagcggcggcggcgacacccccatcacccccgccagcctggccggctgctacagcgcccccagaagagcccccctgtggacctgcctgctgctgtgcgccgccctgagaaccctgctggccagccccagcaacgaggtgaacctgctggacagcagaaccgtgatgggcgacctgggctggatcgccttccccaagaacggctgggaggagatcggcgaggtggacgagaactacgcccccatccacacctaccaggtgtgcaaggtgatggagcagaaccagaacaactggctgctgaccagctggatcagcaacgagggcgccagcagaatcttcatcgagctgaagttcaccctgagagactgcaacagcctgcccggcggcctgggcacctgcaaggagaccttcaacatgtactacttcgagagcgacgaccagaacggcagaaacatcaaggagaaccagtacatcaagatcgacaccatcgccgccgacgagagcttcaccgagctggacctgggcgacagagtgatgaagctgaacaccgaggtgagagacgtgggccccctgagcaagaagggcttctacctggccttccaggacgtgggcgcctgcatcgccctggtgagcgtgagagtgtactacaagaagtgccccagcgtggtgagacacctggccgtgttccccgacaccatcaccggcgccgacagcagccagctgctggaggtgagcggcagctgcgtgaaccacagcgtgaccgacgagccccccaagatgcactgcagcgccgagggcgagtggctggtgcccatcggcaagtgcatgtgcaaggccggctacgaggagaagaacggcacctgccaggtgtgcagacccggcttcttcaaggccagcccccacatccagagctgcggcaagtgccccccccacagctacacccacgaggaggccagcaccagctgcgtgtgcgagaaggactacttcagaagagagagcgacccccccaccatggcctgcaccagaccccccagcgcccccagaaacgccatcagcaacgtgaacgagaccagcgtgttcctggagtggatcccccccgccgacaccggcggcagaaaggacgtgagctactacatcgcctgcaagaagtgcaacagccacgccggcgtgtgcgaggagtgcggcggccacgtgagatacctgcccagacagagcggcctgaagaacaccagcgtgatgatggtggacctgctggcccacaccaactacaccttcgagatcgaggccgtgaacggcgtgagcgacctgagccccggcgccagacagtacgtgagcgtgaacgtgaccaccaaccaggccgcccccagccccgtgaccaacgtgaagaagggcaagatcgccaagaacagcatcagcctgagctggcaggagcccgacagacccaacggcatcatcctggagtacgagatcaagtacttcgagaaggaccaggagaccagctacaccatcatcaagagcaaggagaccaccatcaccgccgagggcctgaagcccgccagcgtgtacgtgttccagatcagagccagaaccgccgccggctacggcgtgttcagcagaagattcgagttcgagaccacccccgtgttcgccgccagcagcgaccagagccagatccccgtgatcgccgtgagcgtgaccgtgggcgtgatcctgctggccgtggtgatcggcgtgctgctgagcggcagaagatgcggctacagcaaggccaagcaggaccccgaggaggagaagatgcacttccacaacggccacatcaagctgcccggcgtgagaacctacatcgacccccacacctacgaggaccccaaccaggccgtgcacgagttcgccaaggagatcgaggccagctgcatcaccatcgagagagtgatcggcgccggcgagttcggcgaggtgtgcagcggcagactgaagctgcccggcaagagagagctgcccgtggccatcaagaccctgaaggtgggctacaccgagaagcagagaagagacttcctgggcgaggccagcatcatgggccagttcgaccaccccaacatcatccacctggagggcgtggtgaccaagagcaagcccgtgatgatcgtgaccgagtacatggagaacggcagcctggacaccttcctgaagaagaacgacggccagttcaccgtgatccagctggtgggcatgctgagaggcatcagcgccggcatgaagtacctgagcgacatgggctacgtgcacagagacctggccgccagaaacatcctgatcaacagcaacctggtgtgcaaggtgagcgacttcggcctgagcagagtgctggaggacgaccccgaggccgcctacaccaccagaggcggcaagatccccatcagatggaccgcccccgaggccatcgccttcagaaagttcaccagcgccagcgacgtgtggagctacggcatcgtgatgtgggaggtggtgagctacggcgagagaccctactgggagatgaccaaccaggacgtgatcaaggccgtggaggagggctacagactgcccagccccatggactgccccgccgccctgtaccagctgatgctggactgctggcagaaggagagaaacagcagacccaagttcgacgagatcgtgaacatgctggacaagctgatcagaaaccccagcagcctgaagaccctggtgaacgccagctgcagagtgagcaacctgctggccgagcacagccccctgggcagcggcgcctacagaagcgtgggcgagtggctggaggccatcaagatgggcagatacaccgagatcttcatggagaacggctacagcagcatggacgccgtggcccaggtgaccctggaggacctgagaagactgggcgtgaccctggtgggccaccagaagaagatcatgaacagcctgcaggagatgaaggtgcagctggtgaacggcatggtgcccctgtag

SEQ ID NO: 80481 - DNA, 3015 bp, synthetic construct
  misc_feature 1..3015: note = Description of Artificial Sequence: Synthetic coding sequence
  source 1..3015: mol_type = other DNA
atgagaggcagcggccccagaggcgccggcagaagaagaccccccagcggcggcggcgacacccccatcacccccgccagcctggccggctgctacagcgcccccagaagagcccccctgtggacctgcctgctgctgtgcgccgccctgagaaccctgctggccagccccagcaacgaggtgaacctgctggacagcagaaccgtgatgggcgacctgggctggatcgccttccccaagaacggctgggaggagatcggcgaggtggacgagaactacgcccccatccacacctaccaggtgtgcaaggtgatggagcagaaccagaacaactggctgctgaccagctggatcagcaacgagggcgccagcagaatcttcatcgagctgaagttcaccctgagagactgcaacagcctgcccggcggcctgggcacctgcaaggagaccttcaacatgtactacttcgagagcgacgaccagaacggcagaaacatcaaggagaaccagtacatcaagatcgacaccatcgccgccgacgagagcttcaccgagctggacctgggcgacagagtgatgaagctgaacaccgaggtgagagacgtgggccccctgagcaagaagggcttctacctggccttccaggacgtgggcgcctgcatcgccctggtgagcgtgagagtgtactacaagaagtgccccagcgtggtgagacacctggccgtgttccccgacaccatcaccggcgccgacagcagccagctgctggaggtgagcggcagctgcgtgaaccacagcgtgaccgacgagccccccaagatgcactgcagcgccgagggcgagtggctggtgcccatcggcaagtgcatgtgcaaggccggctacgaggagaagaacggcacctgccaggtgtgcagacccggcttcttcaaggccagcccccacatccagagctgcggcaagtgccccccccacagctacacccacgaggaggccagcaccagctgcgtgtgcgagaaggactacttcagaagagagagcgacccccccaccatggcctgcaccagaccccccagcgcccccagaaacgccatcagcaacgtgaacgagaccagcgtgttcctggagtggatcccccccgccgacaccggcggcagaaaggacgtgagctactacatcgcctgcaagaagtgcaacagccacgccggcgtgtgcgaggagtgcggcggccacgtgagatacctgcccagacagagcggcctgaagaacaccagcgtgatgatggtggacctgctggcccacaccaactacaccttcgagatcgaggccgtgaacggcgtgagcgacctgagccccggcgccagacagtacgtgagcgtgaacgtgaccaccaaccaggccgcccccagccccgtgaccaacgtgaagaagggcaagatcgccaagaacagcatcagcctgagctggcaggagcccgacagacccaacggcatcatcctggagtacgagatcaagtacttcgagaaggaccaggagaccagctacaccatcatcaagagcaaggagaccaccatcaccgccgagggcctgaagcccgccagcgtgtacgtgttccagatcagagccagaaccgccgccggctacggcgtgttcagcagaagattcgagttcgagaccacccccgtgagcgtggccgccagcagcgaccagagccagatccccgtgatcgccgtgagcgtgaccgtgggcgtgatcctgctggccgtggtgatcggcgtgctgctgagcggcagctgctgcgagtgcggctgcggcagagccagcagcctgtgcgccgtggcccaccccagcctgatctggagatgcggctacagcaaggccaagcaggaccccgaggaggagaagatgcacttccacaacggccacatcaagctgcccggcgtgagaacctacatcgacccccacacctacgaggaccccaaccaggccgtgcacgagttcgccaaggagatcgaggccagctgcatcaccatcgagagagtgatcggcgccggcgagttcggcgaggtgtgcagcggcagactgaagctgcccggcaagagagagctgcccgtggccatcaagaccctgaaggtgggctacaccgagaagcagagaagagacttcctgggcgaggccagcatcatgggccagttcgaccaccccaacatcatccacctggagggcgtggtgaccaagagcaagcccgtgatgatcgtgaccgagtacatggagaacggcagcctggacaccttcctgaagaagaacgacggccagttcaccgtgatccagctggtgggcatgctgagaggcatcagcgccggcatgaagtacctgagcgacatgggctacgtgcacagagacctggccgccagaaacatcctgatcaacagcaacctggtgtgcaaggtgagcgacttcggcctgagcagagtgctggaggacgaccccgaggccgcctacaccaccagaggcggcaagatccccatcagatggaccgcccccgaggccatcgccttcagaaagttcaccagcgccagcgacgtgtggagctacggcatcgtgatgtgggaggtggtgagctacggcgagagaccctactgggagatgaccaaccaggacgtgatcaaggccgtggaggagggctacagactgcccagccccatggactgccccgccgccctgtaccagctgatgctggactgctggcagaaggagagaaacagcagacccaagttcgacgagatcgtgaacatgctggacaagctgatcagaaaccccagcagcctgaagaccctggtgaacgccagctgcagagtgagcaacctgctggccgagcacagccccctgggcagcggcgcctacagaagcgtgggcgagtggctggaggccatcaagatgggcagatacaccgagatcttcatggagaacggctacagcagcatggacgccgtggcccaggtgaccctggagtag

SEQ ID NO: 80482 - DNA, 3018 bp, synthetic construct
  misc_feature 1..3018: note = Description of Artificial Sequence: Synthetic coding sequence
  source 1..3018: mol_type = other DNA
atggcccccgccagaggcagactgccccccgccctgtgggtggtgaccgccgccgccgccgccgccacctgcgtgagcgccgccagaggcgaggtgaacctgctggacaccagcaccatccacggcgactggggctggctgacctaccccgcccacggctgggacagcatcaacgaggtggacgagagcttccagcccatccacacctaccaggtgtgcaacgtgatgagccccaaccagaacaactggctgagaaccagctgggtgcccagagacggcgccagaagagtgtacgccgagatcaagttcaccctgagagactgcaacagcatgcccggcgtgctgggcacctgcaaggagaccttcaacctgtactacctggagagcgacagagacctgggcgccagcacccaggagagccagttcctgaagatcgacaccatcgccgccgacgagagcttcaccggcgccgacctgggcgtgagaagactgaagctgaacaccgaggtgagaagcgtgggccccctgagcaagagaggcttctacctggccttccaggacatcggcgcctgcctggccatcctgagcctgagaatctactacaagaagtgccccgccatggtgagaaacctggccgccttcagcgaggccgtgaccggcgccgacagcagcagcctggtggaggtgagaggccagtgcgtgagacacagcgaggagagagacacccccaagatgtactgcagcgccgagggcgagtggctggtgcccatcggcaagtgcgtgtgcagcgccggctacgaggagagaagagacgcctgcgtggcctgcgagctgggcttctacaagagcgcccccggcgaccagctgtgcgccagatgccccccccacagccacagcgccgcccccgccgcccaggcctgccactgcgacctgagctactacagagccgccctggacccccccagcagcgcctgcaccagaccccccagcgcccccgtgaacctgatcagcagcgtgaacggcaccagcgtgaccctggagtgggccccccccctggaccccggcggcagaagcgacatcacctacaacgccgtgtgcagaagatgcccctgggccctgagcagatgcgaggcctgcggcagcggcaccagattcgtgccccagcagaccagcctggtgcaggccagcctgctggtggccaacctgctggcccacatgaactacagcttctggatcgaggccgtgaacggcgtgagcgacctgagccccgagcccagaagagccgccgtggtgaacatcaccaccaaccaggccgcccccagccaggtggtggtgatcagacaggagagagccggccagaccagcgtgagcctgctgtggcaggagcccgagcagcccaacggcatcatcctggagtacgagatcaagtactacgagaaggacaaggagatgcagagctacagcaccctgaaggccgtgaccaccagagccaccgtgagcggcctgaagcccggcaccagatacgtgttccaggtgagagccagaaccagcgccggctgcggcagattcagccaggccatggaggtggagaccggcaagcccagacccagatacgacaccagaaccatcgtgtggatctgcctgaccctgatcaccggcctggtggtgctgctgctgctgctgatctgcaagaagagacactgcggctacagcaaggccttccaggacagcgacgaggagaagatgcactaccagaacggccaggcccccccccccgtgttcctgcccctgcaccacccccccggcaagctgcccgagccccagttctacgccgagccccacacctacgaggagcccggcagagccggcagaagcttcaccagagagatcgaggccagcagaatccacatcgagaagatcatcggcagcggcgacagcggcgaggtgtgctacggcagactgagagtgcccggccagagagacgtgcccgtggccatcaaggccctgaaggccggctacaccgagagacagagaagagacttcctgagcgaggccagcatcatgggccagttcgaccaccccaacatcatcagactggagggcgtggtgaccagaggcagactggccatgatcgtgaccgagtacatggagaacggcagcctggacaccttcctgagaacccacgacggccagttcaccatcatgcagctggtgggcatgctgagaggcgtgggcgccggcatgagatacctgagcgacctgggctacgtgcacagagacctggccgccagaaacgtgctggtggacagcaacctggtgtgcaaggtgagcgacttcggcctgagcagagtgctggaggacgaccccgacgccgcctacaccaccaccggcggcaagatccccatcagatggaccgcccccgaggccatcgccttcagaaccttcagcagcgccagcgacgtgtggagcttcggcgtggtgatgtgggaggtgctggcctacggcgagagaccctactggaacatgaccaacagagacgtgatcagcagcgtggaggagggctacagactgcccgcccccatgggctgcccccacgccctgcaccagctgatgctggactgctggcacaaggacagagcccagagacccagattcagccagatcgtgagcgtgctggacgccctgatcagaagccccgagagcctgagagccaccgccaccgtgagcagatgccccccccccgccttcgtgagaagctgcttcgacctgagaggcggcagcggcggcggcggcggcctgaccgtgggcgactggctggacagcatcagaatgggcagatacagagaccacttcgccgccggcggctacagcagcctgggcatggtgctgagaatgaacgcccaggacgtgagagccctgggcatcaccctgatgggccaccagaagaagatcctgggcagcatccagaccatgagagcccagctgaccagcacccagggccccagaagacacctgtag

SEQ ID NO: 80483 - DNA, 1488 bp, synthetic construct
  misc_feature 1..1488: note = Description of Artificial Sequence: Synthetic coding sequence
  source 1..1488: mol_type = other DNA
atggcccccgccagaggcagactgccccccgccctgtgggtggtgaccgccgccgccgccgccgccacctgcgtgagcgccgccagaggcgaggtgaacctgctggacaccagcaccatccacggcgactggggctggctgacctaccccgcccacggctgggacagcatcaacgaggtggacgagagcttccagcccatccacacctaccaggtgtgcaacgtgatgagccccaaccagaacaactggctgagaaccagctgggtgcccagagacggcgccagaagagtgtacgccgagatcaagttcaccctgagagactgcaacagcatgcccggcgtgctgggcacctgcaaggagaccttcaacctgtactacctggagagcgacagagacctgggcgccagcacccaggagagccagttcctgaagatcgacaccatcgccgccgacgagagcttcaccggcgccgacctgggcgtgagaagactgaagctgaacaccgaggtgagaagcgtgggccccctgagcaagagaggcttctacctggccttccaggacatcggcgcctgcctggccatcctgagcctgagaatctactacaagaagtgccccgccatggtgagaaacctggccgccttcagcgaggccgtgaccggcgccgacagcagcagcctggtggaggtgagaggccagtgcgtgagacacagcgaggagagagacacccccaagatgtactgcagcgccgagggcgagtggctggtgcccatcggcaagtgcgtgtgcagcgccggctacgaggagagaagagacgcctgcgtggcctgcgagctgggcttctacaagagcgcccccggcgaccagctgtgcgccagatgccccccccacagccacagcgccgcccccgccgcccaggcctgccactgcgacctgagctactacagagccgccctggacccccccagcagcgcctgcaccagaccccccagcgcccccgtgaacctgatcagcagcgtgaacggcaccagcgtgaccctggagtgggccccccccctggaccccggcggcagaagcgacatcacctacaacgccgtgtgcagaagatgcccctgggccctgagcagatgcgaggcctgcggcagcggcaccagattcgtgccccagcagaccagcctggtgcaggccagcctgctggtggccaacctgctggcccacatgaactacagcttctggatcgaggccgtgaacggcgtgagcgacctgagccccgagcccagaagagccgccgtggtgaacatcaccaccaaccaggccggcagaagaagaaacagcgtgccccagagacccggcccccccgccagccccgccagcgaccccagcagagaccagagcagcgccggcgacgtgctgtgggccttcagacaggtgcccctgtggccctgcgccccccaccaggaccccgagctggaggccctgcactgcctgtag

SEQ ID NO: 80484 - DNA, 1488 bp, synthetic construct; identical to SEQ ID NO: 80483
  misc_feature 1..1488: note = Description of Artificial Sequence: Synthetic coding sequence
  source 1..1488: mol_type = other DNA

SEQ ID NO: 80485 - DNA, 2955 bp, synthetic construct
  misc_feature 1..2955: note = Description of Artificial Sequence: Synthetic coding sequence
  source 1..2955: mol_type = other DNA
atggccctggactacctgctgctgctgctgctggccagcgccgtggccgccatggaggagaccctgatggacaccagaaccgccaccgccgagctgggctggaccgccaaccccgccagcggctgggaggaggtgagcggctacgacgagaacctgaacaccatcagaacctaccaggtgtgcaacgtgttcgagcccaaccagaacaactggctgctgaccaccttcatcaacagaagaggcgcccacagaatctacaccgagatgagattcaccgtgagagactgcagcagcctgcccaacgtgcccggcagctgcaaggagaccttcaacctgtactactacgagaccgacagcgtgatcgccaccaagaagagcgccttctggagcgaggccccctacctgaaggtggacaccatcgccgccgacgagagcttcagccaggtggacttcggcggcagactgatgaaggtgaacaccgaggtgagaagcttcggccccctgaccagaaacggcttctacctggccttccaggactacggcgcctgcatgagcctgctgagcgtgagagtgttcttcaagaagtgccccagcatcgtgcagaacttcgccgtgttccccgagaccatgaccggcgccgagagcaccagcctggtgatcgccagaggcacctgcatccccaacgccgaggaggtggacgtgcccatcaagctgtactgcaacggcgacggcgagtggatggtgcccatcggcagatgcacctgcaagcccggctacgagcccgagaacagcgtggcctgcaaggcctgccccgccggcaccttcaaggccagccaggaggccgagggctgcagccactgccccagcaacagcagaagccccgccgaggccagccccatctgcacctgcagaaccggctactacagagccgacttcgacccccccgaggtggcctgcaccagcgtgcccagcggccccagaaacgtgatcagcatcgtgaacgagaccagcatcatcctggagtggcacccccccagagagaccggcggcagagacgacgtgacctacaacatcatctgcaagaagtgcagagccgacagaagaagctgcagcagatgcgacgacaacgtggagttcgtgcccagacagctgggcctgaccgagtgcagagtgagcatcagcagcctgtgggcccacaccccctacaccttcgacatccaggccatcaacggcgtgagcagcaagagccccttccccccccagcacgtgagcgtgaacatcaccaccaaccaggccgcccccagcaccgtgcccatcatgcaccaggtgagcgccaccatgagaagcatcaccctgagctggccccagcccgagcagcccaacggcatcatcctggactacgagatcagatactacgagaaggagcacaacgagttcaacagcagcatggccagaagccagaccaacaccgccagaatcgacggcctgagacccggcatggtgtacgtggtgcaggtgagagccagaaccgtggccggctacggcaagttcagcggcaagatgtgcttccagaccctgaccgacgacgactacaagagcgagctgagagagcagctgcccctgatcgccggcagcgccgccgccggcgtggtgttcgtggtgagcctggtggccatcagcatcgtgtgcagcagaaagagagcctacagcaaggaggccgtgtacagcgacaagctgcagcactacagcaccggcagaggcagccccggcatgaagatctacatcgaccccttcacctacgaggaccccaacgaggccgtgagagagttcgccaaggagatcgacgtgagcttcgtgaagatcgaggaggtgatcggcgccggcgagttcggcgaggtgtacaagggcagactgaagctgcccggcaagagagagatctacgtggccatcaagaccctgaaggccggctacagcgagaagcagagaagagacttcctgagcgaggccagcatcatgggccagttcgaccaccccaacatcatcagactggagggcgtggtgaccaagagcagacccgtgatgatcatcaccgagttcatggagaacggcgccctggacagcttcctgagacagaacgacggccagttcaccgtgatccagctggtgggcatgctgagaggcatcgccgccggcatgaagtacctggccgagatgaactacgtgcacagagacctggccgccagaaacatcctggtgaacagcaacctggtgtgcaaggtgagcgacttcggcctgagcagatacctgcaggacgacaccagcgaccccacctacaccagcagcctgggcggcaagatccccgtgagatggaccgcccccgaggccatcgcctacagaaagttcaccagcgccagcgacgtgtggagctacggcatcgtgatgtgggaggtgatgagcttcggcgagagaccctactgggacatgagcaaccaggacgtgatcaacgccatcgagcaggactacagactgcccccccccatggactgccccgccgccctgcaccagctgatgctggactgctggcagaaggacagaaacagcagacccagattcgccgagatcgtgaacaccctggacaagatgatcagaaaccccgccagcctgaagaccgtggccaccatcaccgccgtgcccagccagcccctgctggacagaagcatccccgacttcaccgccttcaccaccgtggacgactggctgagcgccatcaagatggtgcagtacagagacagcttcctgaccgccggcttcaccagcctgcagctggtgacccagatgaccagcgaggacctgctgagaatcggcatcaccctggccggccaccagaagaagatcctgaacagcatccacagcatgagagtgcagatcagccagagccccaccgccatggcctag

SEQ ID NO: 80486 - DNA, 1638 bp, synthetic construct
  misc_feature 1..1638: note = Description of Artificial Sequence: Synthetic coding sequence
  source 1..1638: mol_type = other DNA
atgcaccaggtgagcgccaccatgagaagcatcaccctgagctggccccagcccgagcagcccaacggcatcatcctggactacgagatcagatactacgagaaggagcacaacgagttcaacagcagcatggccagaagccagaccaacaccgccagaatcgacggcctgagacccggcatggtgtacgtggtgcaggtgagagccagaaccgtggccggctacggcaagttcagcggcaagatgtgcttccagaccctgaccgacgacgactacaagagcgagctgagagagcagctgcccctgatcgccggcagcgccgccgccggcgtggtgttcgtggtgagcctggtggccatcagcatcgtgtgcagcagaaagagagcctacagcaaggaggccgtgtacagcgacaagctgcagcactacagcaccggcagaggcagccccggcatgaagatctacatcgaccccttcacctacgaggaccccaacgaggccgtgagagagttcgccaaggagatcgacgtgagcttcgtgaagatcgaggaggtgatcggcgccggcgagttcggcgaggtgtacaagggcagactgaagctgcccggcaagagagagatctacgtggccatcaagaccctgaaggccggctacagcgagaagcagagaagagacttcctgagcgaggccagcatcatgggccagttcgaccaccccaacatcatcagactggagggcgtggtgaccaagagcagacccgtgatgatcatcaccgagttcatggagaacggcgccctggacagcttcctgagacagaacgacggccagttcaccgtgatccagctggtgggcatgctgagaggcatcgccgccggcatgaagtacctggccgagatgaactacgtgcacagagacctggccgccagaaacatcctggtgaacagcaacctggtgtgcaaggtgagcgacttcggcctgagcagatacctgcaggacgacaccagcgaccccacctacaccagcagcctgggcggcaagatccccgtgagatggaccgcccccgaggccatcgcctacagaaagttcaccagcgccagcgacgtgtggagctacggcatcgtgatgtgggaggtgatgagcttcggcgagagaccctactgggacatgagcaaccaggacgtgatcaacgccatcgagcaggactacagactgcccccccccatggactgccccgccgccctgcaccagctgatgctggactgctggcagaaggacagaaacagcagacccagattcgccgagatcgtgaacaccctggacaagatgatcagaaaccccgccagcctgaagaccgtggccaccatcaccgccgtgcccagccagcccctgctggacagaagcatccccgacttcaccgccttcaccaccgtggacgactggctgagcgccatcaagatggtgcagtacagagacagcttcctgaccgccggcttcaccagcctgcagctggtgacccagatgaccagcgaggacctgctgagaatcggcatcaccctggccggccaccagaagaagatcctgaacagcatccacagcatgagagtgcagatcagccagagccccaccgccatggcctag

SEQ ID NO: 80487 - DNA, 2997 bp, synthetic construct
  misc_feature 1..2997: note = Description of Artificial Sequence: Synthetic coding sequence
  source 1..2997: mol_type = other DNA
atggccagagccagacccccccccccccccagccccccccccggcctgctgcccctgctgccccccctgctgctgctgcccctgctgctgctgcccgccggctgcagagccctggaggagaccctgatggacaccaagtgggtgaccagcgagctggcctggaccagccaccccgagagcggctgggaggaggtgagcggctacgacgaggccatgaaccccatcagaacctaccaggtgtgcaacgtgagagagagcagccagaacaactggctgagaaccggcttcatctggagaagagacgtgcagagagtgtacgtggagctgaagttcaccgtgagagactgcaacagcatccccaacatccccggcagctgcaaggagaccttcaacctgttctactacgaggccgacagcgacgtggccagcgccagcagccccttctggatggagaacccctacgtgaaggtggacaccatcgcccccgacgagagcttcagcagactggacgccggcagagtgaacaccaaggtgagaagcttcggccccctgagcaaggccggcttctacctggccttccaggaccagggcgcctgcatgagcctgatcagcgtgagagccttctacaagaagtgcgccagcaccaccgccggcttcgccctgttccccgagaccctgaccggcgccgagcccaccagcctggtgatcgcccccggcacctgcatccccaacgccgtggaggtgagcgtgcccctgaagctgtactgcaacggcgacggcgagtggatggtgcccgtgggcgcctgcacctgcgccaccggccacgagcccgccgccaaggagagccagtgcagaccctgcccccccggcagctacaaggccaagcagggcgagggcccctgcctgccctgcccccccaacagcagaaccaccagccccgccgccagcatctgcacctgccacaacaacttctacagagccgacagcgacagcgccgacagcgcctgcaccaccgtgcccagcccccccagaggcgtgatcagcaacgtgaacgagaccagcctgatcctggagtggagcgagcccagagacctgggcggcagagacgacctgctgtacaacgtgatctgcaagaagtgccacggcgccggcggcgccagcgcctgcagcagatgcgacgacaacgtggagttcgtgcccagacagctgggcctgaccgagagaagagtgcacatcagccacctgctggcccacaccagatacaccttcgaggtgcaggccgtgaacggcgtgagcggcaagagccccctgccccccagatacgccgccgtgaacatcaccaccaaccaggccgcccccagcgaggtgcccaccctgagactgcacagcagcagcggcagcagcctgaccctgagctgggccccccccgagagacccaacggcgtgatcctggactacgagatgaagtacttcgagaagagcgagggcatcgccagcaccgtgaccagccagatgaacagcgtgcagctggacggcctgagacccgacgccagatacgtggtgcaggtgagagccagaaccgtggccggctacggccagtacagcagacccgccgagttcgagaccaccagcgagagaggcagcggcgcccagcagctgcaggagcagctgcccctgatcgtgggcagcgccaccgccggcctggtgttcgtggtggccgtggtggtgatcgccatcgtgtgcctgagaaagcagagacacggcagcgacagcgagtacaccgagaagctgcagcagtacatcgcccccggcatgaaggtgtacatcgaccccttcacctacgaggaccccaacgaggccgtgagagagttcgccaaggagatcgacgtgagctgcgtgaagatcgaggaggtgatcggcgccggcgagttcggcgaggtgtgcagaggcagactgaagcagcccggcagaagagaggtgttcgtggccatcaagaccctgaaggtgggctacaccgagagacagagaagagacttcctgagcgaggccagcatcatgggccagttcgaccaccccaacatcatcagactggagggcgtggtgaccaagagcagacccgtgatgatcctgaccgagttcatggagaactgcgccctggacagcttcctgagactgaacgacggccagttcaccgtgatccagctggtgggcatgctgagaggcatcgccgccggcatgaagtacctgagcgagatgaactacgtgcacagagacctggccgccagaaacatcctggtgaacagcaacctggtgtgcaaggtgagcgacttcggcctgagcagattcctggaggacgaccccagcgaccccacctacaccagcagcctgggcggcaagatccccatcagatggaccgcccccgaggccatcgcctacagaaagttcaccagcgccagcgacgtgtggagctacggcatcgtgatgtgggaggtgatgagctacggcgagagaccctactgggacatgagcaaccaggacgtgatcaacgccgtggagcaggactacagactgcccccccccatggactgccccaccgccctgcaccagctgatgctggactgctgggtgagagacagaaacctgagacccaagttcagccagatcgtgaacaccctggacaagctgatcagaaacgccgccagcctgaaggtgatcgccagcgcccagagcggcatgagccagcccctgctggacagaaccgtgcccgactacaccaccttcaccaccgtgggcgactggctggacgccatcaagatgggcagatacaaggagagcttcgtgagcgccggcttcgccagcttcgacctggtggcccagatgaccgccgaggacctgctgagaatcggcgtgaccctggccggccaccagaagaagatcctgagcagcatccaggacatgagactgcagatgaaccagaccctgcccgtgcaggtgtag

SEQ ID NO: 80488 - DNA, 3066 bp, synthetic construct
  misc_feature 1..3066: note = Description of Artificial Sequence: Synthetic coding sequence
  source 1..3066: mol_type = other DNA
atggccaccgagggcgccgcccagctgggcaacagagtggccggcatggtgtgcagcctgtgggtgctgctgctggtgagcagcgtgctggccctggaggaggtgctgctggacaccaccggcgagaccagcgagatcggctggctgacctacccccccggcggctgggacgaggtgagcgtgctggacgaccagagaagactgaccagaaccttcgaggcctgccacgtggccggcgccccccccggcaccggccaggacaactggctgcagacccacttcgtggagagaagaggcgcccagagagcccacatcagactgcacttcagcgtgagagcctgcagcagcctgggcgtgagcggcggcacctgcagagagaccttcaccctgtactacagacaggccgaggagcccgacagccccgacagcgtgagcagctggcacctgaagagatggaccaaggtggacaccatcgccgccgacgagagcttccccagcagcagcagcagcagcagcagcagcagcagcgccgcctgggccgtgggcccccacggcgccggccagagagccggcctgcagctgaacgtgaaggagagaagcttcggccccctgacccagagaggcttctacgtggccttccaggacaccggcgcctgcctggccctggtggccgtgagactgttcagctacacctgccccgccgtgctgagaagcttcgccagcttccccgagacccaggccagcggcgccggcggcgccagcctggtggccgccgtgggcacctgcgtggcccacgccgagcccgaggaggacggcgtgggcggccaggccggcggcagcccccccagactgcactgcaacggcgagggcaagtggatggtggccgtgggcggctgcagatgccagcccggctaccagcccgccagaggcgacaaggcctgccaggcctgccccagaggcctgtacaagagcagcgccggcaacgccccctgcagcccctgccccgccagaagccacgcccccaaccccgccgcccccgtgtgcccctgcctggagggcttctacagagccagcagcgacccccccgaggccccctgcaccggcccccccagcgccccccaggagctgtggttcgaggtgcagggcagcgccctgatgctgcactggagactgcccagagagctgggcggcagaggcgacctgctgttcaacgtggtgtgcaaggagtgcgagggcagacaggagcccgccagcggcggcggcggcacctgccacagatgcagagacgaggtgcacttcgaccccagacagagaggcctgaccgagagcagagtgctggtgggcggcctgagagcccacgtgccctacatcctggaggtgcaggccgtgaacggcgtgagcgagctgagccccgaccccccccaggccgccgccatcaacgtgagcaccagccacgaggtgcccagcgccgtgcccgtggtgcaccaggtgagcagagccagcaacagcatcaccgtgagctggccccagcccgaccagaccaacggcaacatcctggactaccagctgagatactacgaccaggccgaggacgagagccacagcttcaccctgaccagcgagaccaacaccgccaccgtgacccagctgagccccggccacatctacggcttccaggtgagagccagaaccgccgccggccacggcccctacggcggcaaggtgtacttccagaccctgccccagggcgagctgagcagccagctgcccgagagactgagcctggtgatcggcagcatcctgggcgccctggccttcctgctgctggccgccatcaccgtgctggccgtggtgttccagagaaagagaagaggcaccggctacaccgagcagctgcagcagtacagcagccccggcctgggcgtgaagtactacatcgaccccagcacctacgaggacccctgccaggccatcagagagctggccagagaggtggaccccgcctacatcaagatcgaggaggtgatcggcaccggcagcttcggcgaggtgagacagggcagactgcagcccagaggcagaagagagcagaccgtggccatccaggccctgtgggccggcggcgccgagagcctgcagatgaccttcctgggcagagccgccgtgctgggccagttccagcaccccaacatcctgagactggagggcgtggtgaccaagagcagacccctgatggtgctgaccgagttcatggagctgggccccctggacagcttcctgagacagagagagggccagttcagcagcctgcagctggtggccatgcagagaggcgtggccgccgccatgcagtacctgagcagcttcgccttcgtgcacagaagcctgagcgcccacagcgtgctggtgaacagccacctggtgtgcaaggtggccagactgggccacagcccccagggccccagctgcctgctgagatgggccgcccccgaggtgatcgcccacggcaagcacaccaccagcagcgacgtgtggagcttcggcatcctgatgtgggaggtgatgagctacggcgagagaccctactgggacatgagcgagcaggaggtgctgaacgccatcgagcaggagttcagactgccccccccccccggctgcccccccggcctgcacctgctgatgctggacacctggcagaaggacagagccagaagaccccacttcgaccagctggtggccgccttcgacaagatgatcagaaagcccgacaccctgcaggccggcggcgaccccggcgagagacccagccaggccctgctgacccccgtggccctggacttcccctgcctggacagcccccaggcctggctgagcgccatcggcctggagtgctaccaggacaacttcagcaagttcggcctgtgcaccttcagcgacgtggcccagctgagcctggaggacctgcccgccctgggcatcaccctggccggccaccagaagaagctgctgcaccacatccagctgctgcagcagcacctgagacagcagggcagcgtggaggtgtag

SEQ ID NO: 80489 - DNA, 2235 bp, synthetic construct
  misc_feature 1..2235: note = Description of Artificial Sequence: Synthetic coding sequence
  source 1..2235: mol_type = other DNA
atggccaccgagggcgccgcccagctgggcaacagagtggccggcatggtgagcgtgggcggctgcagatgccagcccggctaccagcccgccagaggcgacaaggcctgccaggcctgccccagaggcctgtacaagagcagcgccggcaacgccccctgcagcccctgccccgccagaagccacgcccccaaccccgccgcccccgtgtgcccctgcctggagggcttctacagagccagcagcgacccccccgaggccccctgcaccggcccccccagcgccccccaggagctgtggttcgaggtgcagggcagcgccctgatgctgcactggagactgcccagagagctgggcggcagaggcgacctgctgttcaacgtggtgtgcaaggagtgcgagggcagacaggagcccgccagcggcggcggcggcacctgccacagatgcagagacgaggtgcacttcgaccccagacagagaggcctgaccgagagcagagtgctggtgggcggcctgagagcccacgtgccctacatcctggaggtgcaggccgtgaacggcgtgagcgagctgagccccgaccccccccaggccgccgccatcaacgtgagcaccagccacgaggtgcccagcgccgtgcccgtggtgcaccaggtgagcagagccagcaacagcatcaccgtgagctggccccagcccgaccagaccaacggcaacatcctggactaccagctgagatactacgaccaggccgaggacgagagccacagcttcaccctgaccagcgagaccaacaccgccaccgtgacccagctgagccccggccacatctacggcttccaggtgagagccagaaccgccgccggccacggcccctacggcggcaaggtgtacttccagaccctgccccagggcgagctgagcagccagctgcccgagagactgagcctggtgatcggcagcatcctgggcgccctggccttcctgctgctggccgccatcaccgtgctggccgtggtgttccagagaaagagaagaggcaccggctacaccgagcagctgcagcagtacagcagccccggcctgggcgtgaagtactacatcgaccccagcacctacgaggacccctgccaggccatcagagagctggccagagaggtggaccccgcctacatcaagatcgaggaggtgatcggcaccggcagcttcggcgaggtgagacagggcagactgcagcccagaggcagaagagagcagaccgtggccatccaggccctgtgggccggcggcgccgagagcctgcagatgaccttcctgggcagagccgccgtgctgggccagttccagcaccccaacatcctgagactggagggcgtggtgaccaagagcagacccctgatggtgctgaccgagttcatggagctgggccccctggacagcttcctgagacagagagagggccagttcagcagcctgcagctggtggccatgcagagaggcgtggccgccgccatgcagtacctgagcagcttcgccttcgtgcacagaagcctgagcgcccacagcgtgctggtgaacagccacctggtgtgcaaggtggccagactgggccacagcccccagggccccagctgcctgctgagatgggccgcccccgaggtgatcgcccacggcaagcacaccaccagcagcgacgtgtggagcttcggcatcctgatgtgggaggtgatgagctacggcgagagaccctactgggacatgagcgagcaggaggtgctgaacgccatcgagcaggagttcagactgccccccccccccggctgcccccccggcctgcacctgctgatgctggacacctggcagaaggacagagccagaagaccccacttcgaccagctggtggccgccttcgacaagatgatcagaaagcccgacaccctgcaggccggcggcgaccccggcgagagacccagccaggccctgctgacccccgtggccctggacttcccctgcctggacagcccccaggcctggctgagcgccatcggcctggagtgctaccaggacaacttcagcaagttcggcctgtgcaccttcagcgacgtggcccagctgagcctggaggacctgcccgccctgggcatcaccctggccggccaccagaagaagctgctgcaccacatccagctgctgcagcagcacctgagacagcagggcagcgtggaggtgtag

SEQ ID NO: 80490 - DNA, 3066 bp, synthetic construct; identical to SEQ ID NO: 80488
  misc_feature 1..3066: note = Description of Artificial Sequence: Synthetic coding sequence
  source 1..3066: mol_type = other DNA

SEQ ID NO: 80491 - DNA, 654 bp, synthetic construct
  misc_feature 1..654: note = Description of Artificial Sequence: Synthetic coding sequence
  source 1..654: mol_type = other DNA
atggccggcagaaccgtgagagccgagaccagaagcagagccaaggacgacatcaagaaggtgatggccaccatcgagaaggtgagaagatgggagaagagatgggtgaccgtgggcgacaccagcctgagaatcttcaagtgggtgcccgtggtggacccccaggaggaggagagaagaagagccggcggcggcgccgagagaagcagaggcagagagagaagaggcagaggcgccagccccagaggcggcggccccctgatcctgctggacctgaacgacgagaacagcaaccagagcttccacagcgagggcagcctgcagaagggcaccgagcccagccccggcggcaccccccagcccagcagacccgtgagccccgccggcccccccgagggcgtgcccgaggaggcccagccccccagactgggccaggagagagaccccggcggcatcaccgccggcagcaccgacgagccccccatgctgaccaaggaggagcccgtgcccgagctgctggaggccgaggcccccgaggcctaccccgtgttcgagcccgtgccccccgtgcccgaggccgcccagggcgacaccgaggacagcgagggcgccccccccctgaagagaatctgccccaacgcccccgacccctag

SEQ ID NO: 80492 - DNA, 717 bp, synthetic construct
  misc_feature 1..717: note = Description of Artificial Sequence: Synthetic coding sequence
  source 1..717: mol_type = other DNA
atggccgccgcccccctgctgctgctgctgctgctggtgcccgtgcccctgctgcccctgctggcccagggccccggcggcgccctgggcaacagacacgccgtgtactggaacagcagcaaccagcacctgagaagagagggctacaccgtgcaggtgaacgtgaacgactacctggacatctactgcccccactacaacagcagcggcgtgggccccggcgccggccccggccccggcggcggcgccgagcagtacgtgctgtacatggtgagcagaaacggctacagaacctgcaacgccagccagggcttcaagagatgggagtgcaacagaccccacgccccccacagccccatcaagttcagcgagaagttccagagatacagcgccttcagcctgggctacgagttccacgccggccacgagtactactacatcagcacccccacccacaacctgcactggaagtgcctgagaatgaaggtgttcgtgtgctgcgccagcaccagccacagcggcgagaagcccgtgcccaccctgccccagttcaccatgggccccaacgtgaagatcaacgtgctggaggacttcgagggcgagaacccccaggtgcccaagctggagaagagcatcagcggcaccagccccaagagagagcacctgcccctggccgtgggcatcgccttcttcctgatgaccttcctggccagctag

SEQ ID NO: 80493 - DNA, 639 bp, synthetic construct
  misc_feature 1..639: note = Description of Artificial Sequence: Synthetic coding sequence
  source 1..639: mol_type = other DNA
atggccgccgcccccctgctgctgctgctgctgctggtgcccgtgcccctgctgcccctgctggcccagggccccggcggcgccctgggcaacagacacgccgtgtactggaacagcagcaaccagcacctgagaagagagggctacaccgtgcaggtgaacgtgaacgactacctggacatctactgcccccactacaacagcagcggcgtgggccccggcgccggccccggccccggcggcggcgccgagcagtacgtgctgtacatggtgagcagaaacggctacagaacctgcaacgccagccagggcttcaagagatgggagtgcaacagaccccacgccccccacagccccatcaagttcagcgagaagttccagagatacagcgccttcagcctgggctacgagttccacgccggccacgagtactactacatcagcacccccacccacaacctgcactggaagtgcctgagaatgaaggtgttcgtgtgctgcgccagcaaggacttcgagggcgagaacccccaggtgcccaagctggagaagagcatcagcggcaccagccccaagagagagcacctgcccctggccgtgggcatcgccttcttcctgatgaccttcctggccagctag

SEQ ID NO: 80494 - DNA, 702 bp, synthetic construct
  misc_feature 1..702: note = Description of Artificial Sequence: Synthetic coding sequence
  source 1..702: mol_type = other DNA
atgagactgctgcccctgctgagaaccgtgctgtgggccgccttcctgggcagccccctgagaggcggcagcagcctgagacacgtggtgtactggaacagcagcaaccccagcctgagaagagagggctacaccgtgcaggtgaacgtgaacgactacctggacatctactgcccccactacaacagcagcggcgtgggccccggcgccggccccggccccggcggcggcgccgagcagtacgtgctgtacatggtgagcagaaacggctacagaacctgcaacgccagccagggcttcaagagatgggagtgcaacagaccccacgccccccacagccccatcaagttcagcgagaagttccagagatacagcgccttcagcctgggctacgagttccacgccggccacgagtactactacatcagcacccccacccacaacctgcactggaagtgcctgagaatgaaggtgttcgtgtgctgcgccagcaccagccacagcggcgagaagcccgtgcccaccctgccccagttcaccatgggccccaacgtgaagatcaacgtgctggaggacttcgagggcgagaacccccaggtgcccaagctggagaagagcatcagcggcaccagccccaagagagagcacctgcccctggccgtgggcatcgccttcttcctgatgaccttcctggccagctag

SEQ ID NO: 80495 - DNA, 582 bp, synthetic construct
  misc_feature 1..582: note = Description of Artificial Sequence: Synthetic coding sequence
  source 1..582: mol_type = other DNA
atgagactgctgcccctgctgagaaccgtgctgtgggccgccttcctgggcagccccctgagaggcggcagcagcctgagacacgtggtgtactggaacagcagcaaccccagactgctgagaggcgacgccgtggtggagctgggcctgaacgactacctggacatcgtgtgcccccactacgagggccccggcccccccgagggccccgagaccttcgccctgtacatggtggactggcccggctacgagagctgccaggccgagggccccagagcctacaagagatgggtgtgcagcctgcccttcggccacgtgcagttcagcgagaagatccagagattcacccccttcagcctgggcttcgagttcctgcccggcgagacctactactacatcagcgtgcccacccccgagagcagcggccagtgcctgagactgcaggtgagcgtgtgctgcaaggagagaaacctgcccagccaccccaaggagcccgagagcagccaggaccccctggaggaggagggcagcctgctgcccgccctgggcgtgcccatccagaccgacaagatggagcactag

SEQ ID NO: 80496 - DNA, 606 bp, synthetic construct
  misc_feature 1..606: note = Description of Artificial Sequence: Synthetic coding sequence
  source 1..606: mol_type = other DNA
atgagactgctgcccctgctgagaaccgtgctgtgggccgccttcctgggcagccccctgagaggcggcagcagcctgagacacgtggtgtactggaacagcagcaaccccagactgctgagaggcgacgccgtggtggagctgggcctgaacgactacctggacatcgtgtgcccccactacgagggccccggcccccccgagggccccgagaccttcgccctgtacatggtggactggcccggctacgagagctgccaggccgagggccccagagcctacaagagatgggtgtgcagcctgcccttcggccacgtgcagttcagcgagaagatccagagattcacccccttcagcctgggcttcgagttcctgcccggcgagacctactactacatcagcgtgcccacccccgagagcagcggccagtgcctgagactgcaggtgagcgtgtgctgcaaggagagaaagagcgagagcgcccaccccgtgggcagccccggcgagagcggcaccagcggctggagaggcggcgacacccccagccccctgtgcctgctgctgctgctgctgctgctgatcctgagactgctgagaatcctgtag

SEQ ID NO: 80497 - DNA, 624 bp, synthetic construct
  misc_feature 1..624: note = Description of Artificial Sequence: Synthetic coding sequence
  source 1..624: mol_type = other DNA
atgagactgctgcccctgctgagaaccgtgctgtgggccgccttcctgggcagccccctgagaggcggcagcagcctgagacacgtggtgtactggaacagcagcaaccccagactgctgagaggcgacgccgtggtggagctgggcctgaacgactacctggacatcgtgtgcccccactacgagggccccggcccccccgagggccccgagaccttcgccctgtacatggtggactggcccggctacgagagctgccaggccgagggccccagagcctacaagagatgggtgtgcagcctgcccttcggccacgtgcagttcagcgagaagatccagagattcacccccttcagcctgggcttcgagttcctgcccggcgagacctactactacatcagcgtgcccacccccgagagcagcggccagtgcctgagactgcaggtgagcgtgtgctgcaaggagagaagagccagagtgctgcccagaagccccggcggcggcggcatccccgccgcctgcaccggcggcgccaacagcgacagacaggacggcgccctgatgggcgagatcagaggcagcgaggtgaccctggccggcgcctgccccctgatcaccggctag

SEQ ID NO: 80498 - DNA, 1083 bp, synthetic construct
  misc_feature 1..1083: note = Description of Artificial Sequence: Synthetic coding sequence
  source 1..1083: mol_type = other DNA
atgagcgacagcaaggagcccagactgcagcagctgggcctgctggtgagcaaggtgcccagcagcatcagccaggagcagagcagacaggacgccatctaccagaacctgacccagctgaaggccgccgtgggcgagctgagcgagaagagcaagctgcaggagatctaccaggagctgacccagctgaaggccgccgtgggcgagctgcccgagaagagcaagctgcaggagatctaccaggagctgaccagactgaaggccgccgtgggcgagctgcccgagaagagcaagctgcaggagatctaccaggagctgacctggctgaaggccgccgtgggcgagctgcccgagaagagcaagatgcaggagatctaccaggagctgaccagactgaaggccgccgtgggcgagctgcccgagaagagcaagcagcaggagatctaccaggagctgaccagactgaaggccgccgtgggcgagctgcccgagaagagcaagcagcaggagatctaccaggagctgaccagactgaaggccgccgtgggcgagctgcccgagaagagcaagcagcaggagatctaccaggagctgacccagctgaaggccgccgtggagagactgtgccacccctgcccctgggagtggaccttcttccagggcaactgctacttcatgagcaacagccagagaaactggcacgacagcatcaccgcctgcaaggaggtgggcgcccagctggtggtgatcaagagcgccgaggagcagaacttcctgcagctgcagagcagcagaagcaacagattcacctggatgggcctgagcgacctgaaccaggagggcacctggcagtgggtggacggcagccccctgctgcccagcttcaagcagtactggaacagaggcgagcccaacaacgtgggcgaggaggactgcgccgagttcagcggcaacggctggaacgacgacaagtgcaacctggccaagttctggatctgcaagaagagcgccgccagctgcagcagagacgaggagcagttcctgagccccgcccccgccacccccaaccccccccccgcctag

SEQ ID NO: 80499 - DNA, 888 bp, synthetic construct
  misc_feature 1..888: note = Description of Artificial Sequence: Synthetic coding sequence
  source 1..888: mol_type = other DNA
atggagaagatgagcagacccctgcccctgaaccccaccttcatcccccccccctacggcgtgctgagaagcctgctggagaaccccctgaagctgcccctgcaccacgaggacgccttcagcaaggacaaggacaaggagaagaagctggacgacgagagcaacagccccaccgtgccccagagcgccttcctgggccccaccctgtgggacaagaccctgccctacgacggcgacaccttccagctggagtacatggacctggaggagttcctgagcgagaacggcatcccccccagccccagccagcacgaccacagcccccacccccccggcctgcagcccgccagcagcgccgcccccagcgtgatggacctgagcagcagagccagcgcccccctgcaccccggcatccccagccccaactgcatgcagagccccatcagacccggccagctgctgcccgccaacagaaacacccccagccccatcgaccccgacaccatccaggtgcccgtgggctacgagcccgaccccgccgacctggccctgagcagcatccccggccaggagatgttcgaccccagaaagagaaagttcagcgaggaggagctgaagccccagcccatgatcaagaaggccagaaaggtgttcatccccgacgacctgaaggacgacaagtactgggccagaagaagaaagaacaacatggccgccaagagaagcagagacgccagaagactgaaggagaaccagatcgccatcagagccagcttcctggagaaggagaacagcgccctgagacaggaggtggccgacctgagaaaggagctgggcaagtgcaagaacatcctggccaagtacgaggccagacacggccccctgtag

SEQ ID NO: 80500 - DNA, 780 bp, synthetic construct
  misc_feature 1..780: note = Description of Artificial Sequence: Synthetic coding sequence
  source 1..780: mol_type = other DNA
atggccgccgccgcccagctgagcctgacccagctgagcagcggcaaccccgtgtacgagaagtactacagacaggtggacaccggcaacaccggcagagtgctggccagcgacgccgccgccttcctgaagaagagcggcctgcccgacctgatcctgggcaagatctgggacctggccgacaccgacggcaagggcatcctgaacaagcaggagttcttcgtggccctgagactggtggcctgcgcccagaacggcctggaggtgagcctgagcagcctgaacctggccgtgcccccccccagattccacgacaccagcagccccctgctgatcagcggcaccagcgccgccgagctgccctgggccgtgaagcccgaggacaaggccaagtacgacgccatcttcgacagcctgagccccgtgaacggcttcctgagcggcgacaaggtgaagcccgtgctgctgaacagcaagctgcccgtggacatcctgggcagagtgtgggagctgagcgacatcgaccacgacggcatgctggacagagacgagttcgccgtgaccgagagccacagcgtgacccaggccggcgtgcagtggagagacctgagcagcctgcagcccagaccccccggcttcaagctgttcttccacctgagcctgctgagaagctgggactacagacacgccccccccccccccgccaacttctacatcttcagcagagacagcgtgagcccctgcctgcccgactggagcagagcccccgacaacagatag

SEQ ID NO: 80501 - DNA, 2289 bp, synthetic construct
  misc_feature 1..2289: note = Description of Artificial Sequence: Synthetic coding sequence
  source 1..2289: mol_type = other DNA
atggccgccgccgcccagctgagcctgacccagctgagcagcggcaaccccgtgtacgagaagtactacagacaggtggacaccggcaacaccggcagagtgctggccagcgacgccgccgccttcctgaagaagagcggcctgcccgacctgatcctgggcaagatctgggacctggccgacaccgacggcaagggcatcctgaacaagcaggagttcttcgtggccctgagactggtggcctgcgcccagaacggcctggaggtgagcctgagcagcctgaacctggccgtgcccccccccagattccacgacaccagcagccccctgctgatcagcggcaccagcgccgccgagctgccctgggccgtgaagcccgaggacaaggccaagtacgacgccatcttcgacagcctgagccccgtgaacggcttcctgagcggcgacaaggtgaagcccgtgctgctgaacagcaagctgcccgtggacatcctgggcagagtgtgggagctgagcgacatcgaccacgacggcatgctggacagagacgagttcgccgtggccatgttcctggtgtactgcgccctggagaaggagcccgtgcccatgagcctgccccccgccctggtgccccccagcaagagaaagacctgggtggtgagccccgccgagaaggccaagtacgacgagatcttcctgaagaccgacaaggacatggacggcttcgtgagcggcctggaggtgagagagatcttcctgaagaccggcctgcccagcaccctgctggcccacatctggagcctgtgcgacaccaaggactgcggcaagctgagcaaggaccagttcgccctggccttccacctgatcagccagaagctgatcaagggcatcgaccccccccacgtgctgacccccgagatgatcccccccagcgacagagccagcctgcagaagaacatcatcggcagcagccccgtggccgacttcagcgccatcaaggagctggacaccctgaacaacgagatcgtggacctgcagagagagaagaacaacgtggagcaggacctgaaggagaaggaggacaccatcaagcagagaaccagcgaggtgcaggacctgcaggacgaggtgcagagagagaacaccaacctgcagaagctgcaggcccagaagcagcaggtgcaggagctgctggacgagctggacgagcagaaggcccagctggaggagcagctgaaggaggtgagaaagaagtgcgccgaggaggcccagctggccagaagcagccccgagctgctgcccagcggcgtgaccgacgagaacgaggtgaccaccgccgtgaccgagaaggtgtgcagcgagctggacaacaacagacacagcaaggaggaggaccccttcaacgtggacagcagcagcctgaccggccccgtggccgacaccaacctggacttcttccagagcgaccccttcgtgggcagcgaccccttcaaggacgaccccttcggcaagatcgaccccttcggcggcgaccccttcaagggcagcgaccccttcgccagcgactgcttcttcagacagagcaccgaccccttcgccaccagcagcaccgaccccttcagcgccgccaacaacagcagcatcaccagcgtggagaccctgaagcacaacgaccccttcgcccccggcggcaccgtggtggccgccagcgacagcgccaccgaccccttcgccagcgtgttcggcaacgagagcttcggcggcggcttcgccgacttcagcaccctgagcaaggtgaacaacgaggaccccttcagaagcgccaccagcagcagcgtgagcaacgtggtgatcaccaagaacgtgttcgaggagaccagcgtgaagagcgaggacgagccccccgccctgccccccaagatcggcacccccaccagaccctgccccctgccccccggcaagagaagcatcaacaagctggacagccccgaccccttcaagctgaacgaccccttccagcccttccccggcaacgacagccccaaggagaaggaccccgagatcttctgcgaccccttcaccagcgccaccaccaccaccaacaaggaggccgaccccagcaacttcgccaacttcagcgcctaccccagcgaggaggacatgatcgagtgggccaagagagagagcgagagagaggaggagcagagactggccagactgaaccagcaggagcaggaggacctggagctggccatcgccctgagcaagagcgagatcagcgaggcctag

SEQ ID NO: 80502 - DNA, 2691 bp, synthetic construct
  misc_feature 1..2691: note = Description of Artificial Sequence: Synthetic coding sequence
  source 1..2691: mol_type = other DNA
atggccgccgccgcccagctgagcctgacccagctgagcagcggcaaccccgtgtacgagaagtactacagacaggtggacaccggcaacaccggcagagtgctggccagcgacgccgccgccttcctgaagaagagcggcctgcccgacctgatcctgggcaagatctgggacctggccgacaccgacggcaagggcatcctgaacaagcaggagttcttcgtggccctgagactggtggcctgcgcccagaacggcctggaggtgagcctgagcagcctgaacctggccgtgcccccccccagattccacgacaccagcagccccctgctgatcagcggcaccagcgccgccgagctgccctgggccgtgaagcccgaggacaaggccaagtacgacgccatcttcgacagcctgagccccgtgaacggcttcctgagcggcgacaaggtgaagcccgtgctgctgaacagcaagctgcccgtggacatcctgggcagagtgtgggagctgagcgacatcgaccacgacggcatgctggacagagacgagttcgccgtggccatgttcctggtgtactgcgccctggagaaggagcccgtgcccatgagcctgccccccgccctggtgccccccagcaagagaaagacctgggtggtgagccccgccgagaaggccaagtacgacgagatcttcctgaagaccgacaaggacatggacggcttcgtgagcggcctggaggtgagagagatcttcctgaagaccggcctgcccagcaccctgctggcccacatctggagcctgtgcgacaccaaggactgcggcaagctgagcaaggaccagttcgccctggccttccacctgatcagccagaagctgatcaagggcatcgaccccccccacgtgctgacccccgagatgatcccccccagcgacagagccagcctgcagaagaacatcatcggcagcagccccgtggccgacttcagcgccatcaaggagctggacaccctgaacaacgagatcgtggacctgcagagagagaagaacaacgtggagcaggacctgaaggagaaggaggacaccatcaagcagagaaccagcgaggtgcaggacctgcaggacgaggtgcagagagagaacaccaacctgcagaagctgcaggcccagaagcagcaggtgcaggagctgctggacgagctggacgagcagaaggcccagctggaggagcagctgaaggaggtgagaaagaagtgcgccgaggaggcccagctgatcagcagcctgaaggccgagctgaccagccaggagagccagatcagcacctacgaggaggagctggccaaggccagagaggagctgagcagactgcagcaggagaccgccgagctggaggagagcgtggagagcggcaaggcccagctggagcccctgcagcagcacctgcaggacagccagcaggagatcagcagcatgcagatgaagctgatggagatgaaggacctggagaaccacaacagccagctgaactggtgcagcagcccccacagcatcctggtgaacggcgccaccgactactgcagcctgagcaccagcagcagcgagaccgccaacctgaacgagcacgtggagggccagagcaacctggagagcgagcccatccaccaggagagccccgccagaagcagccccgagctgctgcccagcggcgtgaccgacgagaacgaggtgaccaccgccgtgaccgagaaggtgtgcagcgagctggacaacaacagacacagcaaggaggaggaccccttcaacgtggacagcagcagcctgaccggccccgtggccgacaccaacctggacttcttccagagcgaccccttcgtgggcagcgaccccttcaaggacgaccccttcggcaagatcgaccccttcggcggcgaccccttcaagggcagcgaccccttcgccagcgactgcttcttcagacagagcaccgaccccttcgccaccagcagcaccgaccccttcagcgccgccaacaacagcagcatcaccagcgtggagaccctgaagcacaacgaccccttcgcccccggcggcaccgtggtggccgccagcgacagcgccaccgaccccttcgccagcgtgttcggcaacgagagcttcggcggcggcttcgccgacttcagcaccctgagcaaggtgaacaacgaggaccccttcagaagcgccaccagcagcagcgtgagcaacgtggtgatcaccaagaacgtgttcgaggagaccagcgtgaagagcgaggacgagccccccgccctgccccccaagatcggcacccccaccagaccctgccccctgccccccggcaagagaagcatcaacaagctggacagccccgaccccttcaagctgaacgaccccttccagcccttccccggcaacgacagccccaaggagaaggaccccgagatcttctgcgaccccttcaccagcgccaccaccaccaccaacaaggaggccgaccccagcaacttcgccaacttcagcgcctaccccagcgaggaggacatgatcgagtgggccaagagagagagcgagagagaggaggagcagagactggccagactgaaccagcaggagcaggaggacctggagctggccatcgccctgagcaagagcgagatcagcgaggcctag

SEQ ID NO: 80503 - DNA, 1722 bp, synthetic construct
  misc_feature 1..1722: note = Description of Artificial Sequence: Synthetic coding sequence
  source 1..1722: mol_type = other DNA
atgatcctgatggtgagagactgcctgaagagccagcacagagacccccactgcgaccccagcgacaagagagagaagaacaacgtggagcaggacctgaaggagaaggaggacaccatcaagcagagaaccagcgaggtgcaggacctgcaggacgaggtgcagagagagaacaccaacctgcagaagctgcaggcccagaagcagcaggtgcaggagctgctggacgagctggacgagcagaaggcccagctggaggagcagctgaaggaggtgagaaagaagtgcgccgaggaggcccagctgatcagcagcctgaaggccgagctgaccagccaggagagccagatcagcacctacgaggaggagctggccaaggccagagaggagctgagcagactgcagcaggagaccgccgagctggaggagagcgtggagagcggcaaggcccagctggagcccctgcagcagcacctgcaggacagccagcaggagatcagcagcatgcagatgaagctgatggagatgaaggacctggagaaccacaacagccagctgaactggtgcagcagcccccacagcatcctggtgaacggcgccaccgactactgcagcctgagcaccagcagcagcgagaccgccaacctgaacgagcacgtggagggccagagcaacctggagagcgagcccatccaccaggagagccccgccagaagcagccccgagctgctgcccagcggcgtgaccgacgagaacgaggtgaccaccgccgtgaccgagaaggtgtgcagcgagctggacaacaacagacacagcaaggaggaggaccccttcaacgtggacagcagcagcctgaccggccccgtggccgacaccaacctggacttcttccagagcgaccccttcgtgggcagcgaccccttcaaggacgaccccttcggcaagatcgaccccttcggcggcgaccccttcaagggcagcgaccccttcgccagcgactgcttcttcagacagagcaccgaccccttcgccaccagcagcaccgaccccttcagcgccgccaacaacagcagcatcaccagcgtggagaccctgaagcacaacgaccccttcgcccccggcggcaccgtggtggccgccagcgacagcgccaccgaccccttcgccagcgtgttcggcaacgagagcttcggcggcggcttcgccgacttcagcaccctgagcaaggtgaacaacgaggaccccttcagaagcgccaccagcagcagcgtgagcaacgtggtgatcaccaagaacgtgttcgaggagaccagcgtgaagagcgaggacgagccccccgccctgccccccaagatcggcacccccaccagaccctgccccctgccccccggcaagagaagcatcaacaagctggacagccccgaccccttcaagctgaacgaccccttccagcccttccccggcaacgacagccccaaggagaaggaccccgagatcttctgcgaccccttcaccagcgccaccaccaccaccaacaaggaggccgaccccagcaacttcgccaacttcagcgcctaccccagcgaggaggacatgatcgagtgggccaagagagagagcgagagagaggaggagcagagactggccagactgaaccagcaggagcaggaggacctggagctggccatcgccctgagcaagagcgagatcagcgaggcctag

SEQ ID NO: 80504 - DNA, 2469 bp, synthetic construct
  misc_feature 1..2469: note = Description of Artificial Sequence: Synthetic coding sequence
  source 1..2469: mol_type = other DNA
atgaacggccacatcagcaaccaccccagcagcttcggcatgtaccccagccagatgaacggctacggcagcagccccaccttcagccagaccgacagagagcacggcagcaagaccagcgccaaggccctgtacgagcagagaaagaactacgccagagacagcgtgagcagcgtgagcgacatcagccagtacagagtggagcacctgaccaccttcgtgctggacagaaaggacgccatgatcaccgtggacgacggcatcagaaagctgaagctgctggacgccaagggcaaggtgtggacccaggacatgatcctgcaggtggacgacagagccgtgagcctgatcgacctggagagcaagaacgagctggagaacttccccctgaacaccatccagcactgccaggccgtgatgcacagctgcagctacgacagcgtgctggccctggtgtgcaaggagcccacccagaacaagcccgacctgcacctgttccagtgcgacgaggtgaaggccaacctgatcagcgaggacatcgagagcgccatcagcgacagcaagggcggcaagcagaagagaagacccgacgccctgagaatgatcagcaacgccgaccccagcatcccccccccccccagagcccccgcccccgccccccccggcaccgtgacccaggtggacgtgagaagcagagtggccgcctggagcgcctgggccgccgaccagggcgacttcgagaagcccagacagtaccacgagcaggaggagacccccgagatgatggccgccagaatcgacagagacgtgcagatcctgaaccacatcctggacgacatcgagttcttcatcaccaagctgcagaaggccgccgaggccttcagcgagctgagcaagagaaagaagaacaagaagggcaagagaaagggccccggcgagggcgtgctgaccctgagagccaagccccccccccccgacgagttcctggactgcttccagaagttcaagcacggcttcaacctgctggccaagctgaagagccacatccagaaccccagcgccgccgacctggtgcacttcctgttcacccccctgaacatggtggtgcaggccaccggcggccccgagctggccagcagcgtgctgagccccctgctgaacaaggacaccatcgacttcctgaactacaccgtgaacggcgacgagagacagctgtggatgagcctgggcggcacctggatgaaggccagagccgagtggcccaaggagcagttcatccccccctacgtgcccagattcagaaacggctgggagccccccatgctgaacttcatgggcgccaccatggagcaggacctgtaccagctggccgagagcgtggccaacgtggccgagcaccagagaaagcaggagatcaagagactgagcaccgagcacagcagcgtgagcgagtaccaccccgccgacggctacgccttcagcagcaacatctacaccagaggcagccacctggaccagggcgaggccgccgtggccttcaagcccaccagcaacagacacatcgacagaaactacgagcccctgaagacccagcccaagaagtacgccaagagcaagtacgacttcgtggccagaaacaacagcgagctgagcgtgctgaaggacgacatcctggagatcctggacgacagaaagcagtggtggaaggtgagaaacgccagcggcgacagcggcttcgtgcccaacaacatcctggacatcgtgagaccccccgagagcggcctgggcagagccgaccccccctacacccacaccatccagaagcagagaatggagtacggccccagacccgccgacaccccccccgcccccagccccccccccacccccgcccccgtgcccgtgcccctgccccccagcacccccgcccccgtgcccgtgagcaaggtgcccgccaacatcaccagacagaacagcagcagcagcgacagcggcggcagcatcgtgagagacagccagagacacaagcagctgcccgtggacagaagaaagagccagatggaggaggtgcaggacgagctgatccacagactgaccatcggcagaagcgccgcccagaagaagttccacgtgcccagacagaacgtgcccgtgatcaacatcacctacgacagcacccccgaggacgtgaagacctggctgcagagcaagggcttcaaccccgtgaccgtgaacagcctgggcgtgctgaacggcgcccagctgttcagcctgaacaaggacgagctgagaaccgtgtgccccgagggcgccagagtgtacagccagatcaccgtgcagaaggccgccctggaggacagcagcggcagcagcgagctgcaggagatcatgagaagaagacaggagaagatcagcgccgccgccagcgacagcggcgtggagagcttcgacgagggcagcagccactag

SEQ ID NO: 80505 - DNA, 366 bp, synthetic construct
  misc_feature 1..366: note = Description of Artificial Sequence: Synthetic coding sequence
  source 1..366: mol_type = other DNA
atgaacggccacatcagcaaccaccccagcagcttcggcatgtaccccagccagatgaacggctacggcagcagccccaccttcagccagaccgacagagagcacggcagcaagaccagcgccaaggccctgtacgagcagagaaagaactacgccagagacagcgtgagcagcgtgagcgacatcagccagtacagagtggagcacctgaccaccttcgtgctggacagaaaggacgccatgatcaccgtggacgacggcatcagaaagctgaagctgctggacgccaagggcaaggtgtggacccaggacatgatcctgcaggtggacgacagagccgtgagcctgatcgacctggagagctag

SEQ ID NO: 80506 - DNA, 207 bp, synthetic construct
  misc_feature 1..207: note = Description of Artificial Sequence: Synthetic coding sequence
  source 1..207: mol_type = other DNA
atgaacggccacatcagcaaccaccccagcagcttcggcatgtaccccagccagatgaacggctacggcagcagccccaccttcagccagaccgacagagagcacggcagcaagaccagcgccaaggccctgtacgagcagagaaagaactacgccagagacagcgtgagcagcgtgagcgacatcagccagtacagagtggagtag

SEQ ID NO: 80507 - DNA, 1689 bp, synthetic construct
  misc_feature 1..1689: note = Description of Artificial Sequence: Synthetic coding sequence
  source 1..1689: mol_type = other DNA
atgatggccgccagaatcgacagagacgtgcagatcctgaaccacatcctggacgacatcgagttcttcatcaccaagctgcagaaggccgccgaggccttcagcgagctgagcaagagaaagaagaacaagaagggcaagagaaagggccccggcgagggcgtgctgaccctgagagccaagccccccccccccgacgagttcctggactgcttccagaagttcaagcacggcttcaacctgctggccaagctgaagagccacatccagaaccccagcgccgccgacctggtgcacttcctgttcacccccctgaacatggtggtgcaggccaccggcggccccgagctggccagcagcgtgctgagccccctgctgaacaaggacaccatcgacttcctgaactacaccgtgaacggcgacgagagacagctgtggatgagcctgggcggcacctggatgaaggccagagccgagtggcccaaggagcagttcatccccccctacgtgcccagattcagaaacggctgggagccccccatgctgaacttcatgggcgccaccatggagcaggacctgtaccagctggccgagagcgtggccaacgtggccgagcaccagagaaagcaggagatcaagagactgagcaccgagcacagcagcgtgagcgagtaccaccccgccgacggctacgccttcagcagcaacatctacaccagaggcagccacctggaccagggcgaggccgccgtggccttcaagcccaccagcaacagacacatcgacagaaactacgagcccctgaagacccagcccaagaagtacgccaagagcaagtacgacttcgtggccagaaacaacagcgagctgagcgtgctgaaggacgacatcctggagatcctggacgacagaaagcagtggtggaaggtgagaaacgccagcggcgacagcggcttcgtgcccaacaacatcctggacatcgtgagaccccccgagagcggcctgggcagagccgaccccccctacacccacaccatccagaagcagagaatggagtacggccccagacccgccgacaccccccccgcccccagccccccccccacccccgcccccgtgcccgtgcccctgccccccagcacccccgcccccgtgcccgtgagcaaggtgcccgccaacatcaccagacagaacagcagcagcagcgacagcggcggcagcatcgtgagagacagccagagacacaagcagctgcccgtggacagaagaaagagccagatggaggaggtgcaggacgagctgatccacagactgaccatcggcagaagcgccgcccagaagaagttccacgtgcccagacagaacgtgcccgtgatcaacatcacctacgacagcacccccgaggacgtgaagacctggctgcagagcaagggcttcaaccccgtgaccgtgaacagcctgggcgtgctgaacggcgcccagctgttcagcctgaacaaggacgagctgagaaccgtgtgccccgagggcgccagagtgtacagccagatcaccgtgcagaaggccgccctggaggacagcagcggcagcagcgagctgcaggagatcatgagaagaagacaggagaagatcagcgccgccgccagcgacagcggcgtggagagcttcgacgagggcagcagccactag

SEQ ID NO: 80508 - DNA, 1689 bp, synthetic construct; identical to SEQ ID NO: 80507
  misc_feature 1..1689: note = Description of Artificial Sequence: Synthetic coding sequence
  source 1..1689: mol_type = other DNA

SEQ ID NO: 80509 - DNA, 2076 bp, synthetic construct
  misc_feature 1..2076: note = Description of Artificial Sequence: Synthetic coding sequence
  source 1..2076: mol_type = other DNA
atgaacggccacatcagcaaccaccccagcagcttcggcatgtaccccagccagatgaacggctacggcagcagccccaccttcagccagaccgacagagagcacggcagcaagaccagcgccaaggccctgtacgagcagagaaagaactacgccagagacagcgtgagcagcgtgagcgacatcagccagtacagagtggagcacctgaccaccttcgtgctggacagaaaggacgccatgatcaccgtggacgacggcatcagaaagctgaagctgctggacgccaagggcaaggtgtggacccaggacatgatcctgcaggtggacgacagagccgtgagcctgatcgacctggagagcaagaacgagctggagaacttccccctgaacaccatccagcactgccaggccgtgatgcacagctgcagctacgacagcgtgctggccctggtgtgcaaggagcccacccagaacaagcccgacctgcacctgttccagtgcgacgaggtgaaggccaacctgatcagcgaggacatcgagagcgccatcagcgacagcaagggcggcaagcagaagagaagacccgacgccctgagaatgatcagcaacgccgaccccagcatcccccccccccccagagcccccgcccccgccccccccggcaccgtgacccaggtggacgtgagaagcagagtggccgcctggagcgcctgggccgccgaccagggcgacttcgagaagcccagacagtaccacgagcaggaggagacccccgagatgatggccgccagaatcgacagagacgtgcagatcctgaaccacatcctggacgacatcgagttcttcatcaccaagctgcagaaggccgccgaggccttcagcgagctgagcaagagaaagaagaacaagaagggcaagagaaagggccccggcgagggcgtgctgaccctgagagccaagccccccccccccgacgagttcctggactgcttccagaagttcaagcacggcttcaacctgctggccaagctgaagagccacatccagaaccccagcgccgccgacctggtgcacttcctgttcacccccctgaacatggtggtgcaggccaccggcggccccgagctggccagcagcgtgctgagccccctgctgaacaaggacaccatcgacttcctgaactacaccgtgaacggcgacgagagacagctgtggatgagcctgggcggcacctggatgaaggccagagccgagtggcccaaggagcagttcatccccccctacgtgcccagattcagaaacggctgggagccccccatgctgaacttcatgggcgccaccatggagcaggacctgtaccagctggccgagagcgtggccaacgtggccgagcaccagagaaagcaggagatcaagagactgagcaccgagcacagcagcgtgagcgagtaccaccccgccgacggctacgccttcagcagcaacatctacaccagaggcagccacctggaccagggcgaggccgccgtggccttcaagcccaccagcaacagacacatcgacagaaactacgagcccctgaagacccagcccaagaagtacgccaagagcaagtacgacttcgtggccagaaacaacagcgagctgagcgtgctgaaggacgacatcctggagatcctggacgacagaaagcagtggtggaaggtgagaaacgccagcggcgacagcggcttcgtgcccaacaacatcctggacatcgtgagaccccccgagagcggcctgggcagagccgaccccccctacacccacaccatccagaagcagagaatggagtacggccccagacccgccgacaccccccccgcccccagccccccccccacccccgcccccgtgcccgtgcccctgccccccagcacccccgcccccgtgcccgtgagcaaggtgcccgccaacatcaccagacagaacagcagcagcagcgacagcggcggcagcatcgtgagagacagccagagacacaagaccagcggcggccccaaggagatcagcgacggcggcagcgccagatag

SEQ ID NO: 80510 - DNA, 207 bp, synthetic construct; identical to SEQ ID NO: 80506
  misc_feature 1..207: note = Description of Artificial Sequence: Synthetic coding sequence
  source 1..207: mol_type = other DNA

SEQ ID NO: 80511 - DNA, 2469 bp, synthetic construct; identical to SEQ ID NO: 80504
  misc_feature 1..2469: note = Description of Artificial Sequence: Synthetic coding sequence
  source 1..2469: mol_type = other DNA

SEQ ID NO: 80512 - DNA, 2469 bp, synthetic construct; identical to SEQ ID NO: 80504
  misc_feature 1..2469: note = Description of Artificial Sequence: Synthetic coding sequence
  source 1..2469: mol_type = other DNA

SEQ ID NO: 80513 - DNA, 204 bp, synthetic construct
  misc_feature 1..204: note = Description of Artificial Sequence: Synthetic coding sequence
  source 1..204: mol_type = other DNA
atgaacggccacatcagcaaccaccccagcagcttcggcatgtaccccagccagatgaacggctacggcagcagccccaccttcagccagaccgacagagagcacggcagcaagaccagcgccaaggccctgtacgagcagagaaagaactacgccagagacagcgtgagcagcgtgagcgacatcagccagtacagagtgtag

SEQ ID NO: 80514 - DNA, 387 bp, synthetic construct
  misc_feature 1..387: note = Description of Artificial Sequence: Synthetic coding sequence
  source 1..387: mol_type = other DNA
atgaacggccacatcagcaaccaccccagcagcttcggcatgtaccccagccagatgaacggctacggcagcagccccaccttcagccagaccgacagagagcacggcagcaagaccagcgccaaggccctgtacgagcagagaaagaactacgccagagacagcgtgagcagcgtgagcgacatcagccagtacagagtggagcacctgaccaccttcgtgctggacagaaaggacgccatgatcaccgtggacgacggcatcagaaagctgaagctgctggacgccaagggcaaggtgtggacccaggacatgatcctgcaggtggacgacagagccgtgagcctgatcgacctggagagcaagaacgagctggagaacttctag

SEQ ID NO: 80515 - DNA, 996 bp, synthetic construct
  misc_feature 1..996: note = Description of Artificial Sequence: Synthetic coding sequence
  source 1..996: mol_type = other DNA
atgagattcagattcggcgtggtggtgccccccgccgtggccggcgccagacccgagctgctggtggtgggcagcagacccgagctgggcagatgggagcccagaggcgccgtgagactgagacccgccggcaccgccgccggcgacggcgccctggccctgcaggagcccggcctgtggctgggcgaggtggagctggccgccgaggaggccgcccaggacggcgccgagatcggcgccacccccaagctgcccagcaccatcttcccctggttcgtgctgagacagggcctgatcctgggcaacggcccccaccacgacagatgctgcacctacaacgagaacaacctggtggacggcgtgtactgcctgcccatcggccactggatcgaggccaccggccacaccaacgagatgaagcacaccaccgacttctacttcaacatcgccggccaccaggccatgcactacagcagaatcctgcccaacatctggctgggcagctgccccagacaggtggagcacgtgaccatcaagctgaagcacgagctgggcatcaccgccgtgatgaacttccagaccgagtgggacatcgtgcagaacagcagcggctgcaacagataccccgagcccatgacccccgacaccatgatcaagctgtacagagaggagggcctggcctacatctggatgcccacccccgacatgagcaccgagggcagagtgcagatgctgccccaggccgtgtgcctgctgcacgccctgctggagaagggccacatcgtgtacgtgcactgcaacgccggcgtgggcagaagcaccgccgccgtgtgcggctggctgcagtacgtgatgggctggaacctgagaaaggtgcagtacttcctgatggccaagagacccgccgtgtacatcgacgaggaggccctggccagagcccaggaggacttcttccagaagttcggcaaggtgagaagcagcgtgtgcagcctgtag

SEQ ID NO: 80516 - DNA, 996 bp, synthetic construct
  misc_feature 1..996: note = Description of Artificial Sequence: Synthetic coding sequence
  source 1..996: mol_type = other DNA
atgagattcagattcggcgtggtggtgccccccgccgtggccggcgccagacccgagctgctggtggtgggcagcagacccgagctgggcagatgggagcccagaggcgccgtgagactgagacccgccggcaccgccgccggcgacggcgccctggccctgcaggagcccggcctgtggctgggcgaggtggagctggccgccgaggaggccgcccaggacggcgccgagcccggcagagtggacaccttctggtacaagttcctgaagagagagcccggcggcgagctgagctgggagggcaacggcccccaccacgacagatgctgcacctacaacgagaacaacctggtggacggcgtgtactgcctgcccatcggccactggatcgaggccaccggccacaccaacgagatgaagcacaccaccgacttctacttcaacatcgccggccaccaggccatgcactacagcagaatcctgcccaacatctggctgggcagctgccccagacaggtggagcacgtgaccatcaagctgaagcacgagctgggcatcaccgccgtgatgaacttccagaccgagtgggacatcgtgcagaacagcagcggctgcaacagataccccgagcccatgacccccgacaccatgatcaagctgtacagagaggagggcctggcctacatctggatgcccacccccgacatgagcaccgagggcagagtgcagatgctgccccaggccgtgtgcctgctgcacgccctgctggagaagggccacatcgtgtacgtgcactgcaacgccggcgtgggcagaagcaccgccgccgtgtgcggctggctgcagtacgtgatgggctggaacctgagaaaggtgcagtacttcctgatggccaagagacccgccgtgtacatcgacgaggaggccctggccagagcccaggaggacttcttccagaagttcggcaaggtgagaagcagcgtgtgcagcctgtag

SEQ ID NO: 80517 - DNA, 954 bp, synthetic construct
  misc_feature 1..954: note = Description of Artificial Sequence: Synthetic coding sequence
  source 1..954: mol_type = other DNA
atgagattcagattcggcgtggtggtgccccccgccgtggccggcgccagacccgagctgctggtggtgggcagcagacccgagctgggcagatgggagcccagaggcgccgtgagactgagacccgccggcaccgccgccggcgacggcgccctggccctgcaggagcccggcctgtggctgggcgaggtggagctggccgccgaggaggccgcccaggacggcgccgagcccggcagagtggacaccttctggtacaagttcctgaagagagagcccggcggcgagctgagctgggagggcaacggcccccaccacgacagatgctgcacctacaacgagaacaacctggtggacggcgtgtactgcctgcccatcggccactggatcgaggccaccggccacaccaacgagatgaagcacaccaccgacttctacttcaacatcgccggccaccaggccatgcactacagcagaatcctgcccaacatctggctgggcagctgccccagacaggtggagcacgtgaccatcaagctgaagcacgagctgggcatcaccgccgtgatgaacttccagaccgagtgggacatcgtgcagaacagcagcggctgcaacagataccccgagcccatgacccccgacaccatgatcaagctgtacagagaggagggcctggcctacatctggatgcccacccccgacatgagcaccgagggcagagtgcagatgctgccccaggccgtgtgcctgctgcacgccctgctggagaagggccacatcgtgtacgtgcactgcaacgccggcgtgggcagaagcaccgccgccgtgtgcggctggctgcagtacgtgatgggctggaacctgagaaaggtgcagtacttcctgatggccaagagacccgccgtgtacatcgacgaggaggccgccagccaggacaccttccccctgtag

SEQ ID NO: 80518 - DNA, 714 bp, synthetic construct
  misc_feature 1..714: note = Description of Artificial Sequence: Synthetic coding sequence
  source 1..714: mol_type = other DNA
tgagacaccttctggtacaagttcctgaagagagagcccggcggcgagctgagctgggagggcaacggcccccaccacgacagatgctgcacctacaacgagaacaacctggtggacggcgtgtactgcctgcccatcggccactggatcgaggccaccggccacaccaacgagatgaagcacaccaccgacttctacttcaacatcgccggccaccaggccatgcactacagcagaatcctgcccaacatctggctgggcagctgccccagacaggtggagcacgtgaccatcaagctgaagcacgagctgggcatcaccgccgtgatgaacttccagaccgagtgggacatcgtgcagaacagcagcggctgcaacagataccccgagcccatgacccccgacaccatgatcaagctgtacagagaggagggcctggcctacatctggatgcccacccccgacatgagcaccgagggcagagtgcagatgctgccccaggccgtgtgcctgctgcacgccctgctggagaagggccacatcgtgtacgtgcactgcaacgccggcgtgggcagaagcaccgccgccgtgtgcggctggctgcagtacgtgatgggctggaacctgagaaaggtgcagtacttcctgatggccaagagacccgccgtgtacatcgacgaggaggccgccagccaggacaccttccccctgtag

SEQ ID NO: 80519 - DNA, 513 bp, synthetic construct
  misc_feature 1..513: note = Description of Artificial Sequence: Synthetic coding sequence
  source 1..513: mol_type = other DNA
tgaaacggcccccaccacgacagatgctgcacctacaacgagaacaacctggtggacggcgtgtactgcctgcccatcggccactggatcgaggccaccggccacaccaacgagatgaagcacaccaccgacttctacttcaacatcgccggccaccaggccatgcactacagcagaatcctgcccaacatctggctgggcagctgccccagacaggtggagcacgtgaccatcaagctgaagcacgagctgggcatcaccgccgtgatgaacttccagaccgagtgggacatcgtgcagaacagcagcggctgcaacagataccccgagcccatgacccccgacaccatgatcaagctgtacagagaggagggcctggcctacatctggatgcccacccccgacatgagcaccgaggacgagaagagaaccgccgacatgtgctgcagcggcatgtgggaggagaccgccgacttcggcctgggcatcctggactacctgaagcagaagtag

SEQ ID NO: 80520 - DNA, 813 bp, synthetic construct
  misc_feature 1..813: note = Description of Artificial Sequence: Synthetic coding sequence
  source 1..813: mol_type = other DNA
atgagattcagattcggcgtggtggtgccccccgccgtggccggcgccagacccgagctgctggtggtgggcagcagacccgagctgggcagatgggagcccagaggcgccgtgagactgagacccgccggcaccgccgccggcgacggcgccctggccctgcaggagcccggcctgtggctgggcgaggtggagctggccgccgaggaggccgcccaggacggcgccgagcccggcagagtggacaccttctggtacaagttcctgaagagagagcccggcggcgagctgagctgggagggcaacggcccccaccacgacagatgctgcacctacaacgagaacaacctggtggacggcgtgtactgcctgcccatcggccactggatcgaggccaccggccacaccaacgagatgaagcacaccaccgacttctacttcaacatcgccggccaccaggccatgcactacagcagaatcctgcccaacatctggctgggcagctgccccagacaggtggagcacgtgaccatcaagctgaagcacgagctgggcatcaccgccgtgatgaacttccagaccgagtgggacatcgtgcagaacagcagcggctgcaacagataccccgagcccatgacccccgacaccatgatcaagctgtacagagaggagggcctggcctacatctggatgcccacccccgacatgagcaccgaggacgagaagagaaccgccgacatgtgctgcagcggcatgtgggaggagaccgccgacttcggcctgggcatcctggactacctgaagcagaagtag

SEQ ID NO: 80521 - DNA, 945 bp, synthetic construct
  misc_feature 1..945: note = Description of Artificial Sequence: Synthetic coding sequence
  source 1..945: mol_type = other DNA
atggcccccccccaggtgctggccttcggcctgctgctggccgccgccaccgccaccttcgccgccgcccaggaggagtgcgtgtgcgagaactacaagctggccgtgaactgcttcgtgaacaacaacagacagtgccagtgcaccagcgtgggcgcccagaacaccgtgatctgcagcaagctggccgccaagtgcctggtgatgaaggccgagatgaacggcagcaagctgggcagaagagccaagcccgagggcgccctgcagaacaacgacggcctgtacgaccccgactgcgacgagagcggcctgttcaaggccaagcagtgcaacggcaccagcatgtgctggtgcgtgaacaccgccggcgtgagaagaaccgacaaggacaccgagatcacctgcagcgagagagtgagaacctactggatcatcatcgagctgaagcacaaggccagagagaagccctacgacagcaagagcctgagaaccgccctgcagaaggagatcaccaccagataccagctggaccccaagttcatcaccagcatcctgtacgagaacaacgtgatcaccatcgacctggtgcagaacagcagccagaagacccagaacgacgtggacatcgccgacgtggcctactacttcgagaaggacgtgaagggcgagagcctgttccacagcaagaagatggacctgaccgtgaacggcgagcagctggacctggaccccggccagaccctgatctactacgtggacgagaaggcccccgagttcagcatgcagggcctgaaggccggcgtgatcgccgtgatcgtggtggtggtgatcgccgtggtggccggcatcgtggtgctggtgatcagcagaaagaagagaatggccaagtacgagaaggccgagatcaaggagatgggcgagatgcacagagagctgaacgcctag

SEQ ID NO: 80522 - DNA, 474 bp, synthetic construct
  misc_feature 1..474: note = Description of Artificial Sequence: Synthetic coding sequence
  source 1..474: mol_type = other DNA
atgctggtgctgctggccggcatcttcgtggtgcacatcgccaccgtgatcatgctgttcgtgagcaccatcgccaacgtgtggctggtgagcaacaccgtggacgccagcgtgggcctgtggaagaactgcaccaacatcagctgcagcgacagcctgagctacgccagcgaggacgccctgaagaccgtgcaggccttcatgatcctgagcatcatcttctgcgtgatcgccctgctggtgttcgtgttccagctgttcaccatggagaagggcaacagattcttcctgagcggcgccaccaccctggtgtgctggctgtgcatcctggtgggcgtgagcatctacaccagccactacgccaacagagacggcacccagtaccaccacggctacagctacatcctgggctggatctgcttctgcttcagcttcatcatcggcgtgctgtacctggtgctgagaaagaagtag

SEQ ID NO: 80523 - DNA, 426 bp, synthetic construct
  misc_feature 1..426: note = Description of Artificial Sequence: Synthetic coding sequence
  source 1..426: mol_type = other DNA
atgctggtgctgctggccggcatcttcgtggtgcacatcgccaccgtgatcatgctgttcgtgagcaccatcgccaacgtgtggctggtgagcaacaccgtggacgccagcgtgggcctgtggaagaactgcaccaacatcagctgcagcgacagcctgagctacgccagcgaggacgccctgaagaccgtgcaggccttcatgatcctgagcatcatcttctgcgtgatcgccctgctggtgttcgtgttccagctgttcaccatggagaagggcaacagattcttcctgagcggcgccaccaccctggtgtgcttcatcatgagaatcgtgatggagagaagcatcaccaccgccatccccaccagctgggccggcagcgccagcgccagcgccagcagcagcgccttcagcatctggagctag

SEQ ID NO: 80524 - DNA, 12 bp, synthetic construct
  misc_feature 1..12: note = Description of Artificial Sequence: Synthetic coding sequence
  source 1..12: mol_type = other DNA
atgctggtgtag

SEQ ID NO: 80525 - DNA, 504 bp, synthetic construct
  misc_feature 1..504: note = Description of Artificial Sequence: Synthetic coding sequence
  source 1..504: mol_type = other DNA
atgctggtgctgctggccttcatcatcgccttccacatcaccagcgccgccctgctgttcatcgccaccgtggacaacgcctggtgggtgggcgacgagttcttcgccgacgtgtggagaatctgcaccaacaacaccaactgcaccgtgatcaacgacagcttccaggagtacagcaccctgcaggccgtgcaggccaccatgatcctgagcaccatcctgtgctgcatcgccttcttcatcttcgtgctgcagctgttcagactgaagcagggcgagagattcgtgctgaccagcatcatccagctgatgagctgcctgtgcgtgatgatcgccgccagcatctacaccgacagaagagaggacatccacgacaagaacgccaagttctaccccgtgaccagagagggcagctacggctacagctacatcctggcctgggtggccttcgcctgcaccttcatcagcggcatgatgtacctgatcctgagaaagagaaagtag

SEQ ID NO: 80526 - DNA, 504 bp, synthetic construct; identical to SEQ ID NO: 80525
  misc_feature 1..504: note = Description of Artificial Sequence: Synthetic coding sequence
  source 1..504: mol_type = other DNA

SEQ ID NO: 80527 - DNA, 492 bp, synthetic construct
  misc_feature 1..492: note = Description of Artificial Sequence: Synthetic coding sequence
  source 1..492: mol_type = other DNA
atgagcctgctgctgctggtggtgagcgccctgcacatcctgatcctgatcctgctgttcgtggccaccctggacaagagctggtggaccctgcccggcaaggagagcctgaacctgtggtacgactgcacctggaacaacgacaccaagacctgggcctgcagcaacgtgagcgagaacggctggctgaaggccgtgcaggtgctgatggtgctgagcctgatcctgtgctgcctgagcttcatcctgttcatgttccagctgtacaccatgagaagaggcggcctgttctacgccaccggcctgtgccagctgtgcaccagcgtggccgtgttcaccggcgccctgatctacgccatccacgccgaggagatcctggagaagcaccccagaggcggcagcttcggctactgcttcgccctggcctgggtggccttccccctggccctggtgagcggcatcatctacatccacctgagaaagagagagtag

SEQ ID NO: 80528 - DNA, 2034 bp, synthetic construct
  misc_feature 1..2034: note = Description of Artificial Sequence: Synthetic coding sequence
  source 1..2034: mol_type = other DNA
atgaccgccagccccgactacctggtggtgctgttcggcatcaccgccggcgccaccggcgccaagctgggcagcgacgagaaggagctgatcctgctgttctggaaggtggtggacctggccaacaagaaggtgggccagctgcacgaggtgctggtgagacccgaccagctggagctgaccgaggactgcaaggaggagaccaagatcgacgtggagagcctgagcagcgccagccagctggaccaggccctgagacagttcaaccagagcgtgagcaacgagctgaacatcggcgtgggcaccagcttctgcctgtgcaccgacggccagctgcacgtgagacagatcctgcaccccgaggccagcaagaagaacgtgctgctgcccgagtgcttctacagcttcttcgacctgagaaaggagttcaagaagtgctgccccggcagccccgacatcgacaagctggacgtggccaccatgaccgagtacctgaacttcgagaagagcagcagcgtgagcagatacggcgccagccaggtggaggacatgggcaacatcatcctggccatgatcagcgagccctacaaccacagattcagcgaccccgagagagtgaactacaagttcgagagcggcacctgcagcaagatggagctgatcgacgacaacaccgtggtgagagccagaggcctgccctggcagagcagcgaccaggacatcgccagattcttcaagggcctgaacatcgccaagggcggcgccgccctgtgcctgaacgcccagggcagaagaaacggcgaggccctggtgagattcgtgagcgaggagcacagagacctggccctgcagagacacaagcaccacatgggcaccagatacatcgaggtgtacaaggccaccggcgaggacttcctgaagatcgccggcggcaccagcaacgaggtggcccagttcctgagcaaggagaaccaggtgatcgtgagaatgagaggcctgcccttcaccgccaccgccgaggaggtggtggccttcttcggccagcactgccccatcaccggcggcaaggagggcatcctgttcgtgacctaccccgacggcagacccaccggcgacgccttcgtgctgttcgcctgcgaggagtacgcccagaacgccctgagaaagcacaaggacctgctgggcaagagatacatcgagctgttcagaagcaccgccgccgaggtgcagcaggtgctgaacagattcagcagcgcccccctgatccccctgcccaccccccccatcatccccgtgctgccccagcagttcgtgccccccaccaacgtgagagactgcatcagactgagaggcctgccctacgccgccaccatcgaggacatcctggacttcctgggcgagttcgccaccgacatcagaacccacggcgtgcacatggtgctgaaccaccagggcagacccagcggcgacgccttcatccagatgaagagcgccgacagagccttcatggccgcccagaagtgccacaagaagaacatgaaggacagatacgtggaggtgttccagtgcagcgccgaggagatgaacttcgtgctgatgggcggcaccctgaacagaaacggcctgagcccccccccctgcctgagcccccccagctacaccttccccgcccccgccgccgtgatccccaccgaggccgccatctaccagcccagcgtgatcctgaaccccagagccctgcagcccagcaccgcctactaccccgccggcacccagctgttcatgaactacaccgcctactaccccagcccccccggcagccccaacagcctgggctacttccccaccgccgccaacctgagcggcgtgcccccccagcccggcaccgtggtgagaatgcagggcctggcctacaacaccggcgtgaaggagatcctgaacttcttccagggctaccagtacgccaccgaggacggcctgatccacaccaacgaccaggccagaaccctgcccaaggagtgggtgtgcatctag

SEQ ID NO: 80529 - DNA, 1980 bp, synthetic construct
  misc_feature 1..1980: note = Description of Artificial Sequence: Synthetic coding sequence
  source 1..1980: mol_type = other DNA
atgaccgccagccccgactacctggtggtgctgttcggcatcaccgccggcgccaccggcgccaagctgggcagcgacgagaaggagctgatcctgctgttctggaaggtggtggacctggccaacaagaaggtgggccagctgcacgaggtgctggtgagacccgaccagctggagctgaccgaggactgcaaggaggagaccaagatcgacgtggagagcctgagcagcgccagccagctggaccaggccctgagacagttcaaccagagcgtgagcaacgagctgaacatcggcgtgggcaccagcttctgcctgtgcaccgacggccagctgcacgtgagacagatcctgcaccccgaggccagcaagaagaacgtgctgctgcccgagtgcttctacagcttcttcgacctgagaaaggagttcaagaagtgctgccccggcagccccgacatcgacaagctggacgtggccaccatgaccgagtacctgaacttcgagaagagcagcagcgtgagcagatacggcgccagccaggtggaggacatgggcaacatcatcctggccatgatcagcgagccctacaaccacagattcagcgaccccgagagagtgaactacaagttcgagagcggcacctgcagcaagatggagctgatcgacgacaacaccgtggtgagagccagaggcctgccctggcagagcagcgaccaggacatcgccagattcttcaagggcctgaacatcgccaagggcggcgccgccctgtgcctgaacgcccagggcagaagaaacggcgaggccctggtgagattcgtgagcgaggagcacagagacctggccctgcagagacacaagcaccacatgggcaccagatacatcgaggtgtacaaggccaccggcgaggacttcctgaagatcgccggcggcaccagcaacgaggtggcccagttcctgagcaaggagaaccaggtgatcgtgagaatgagaggcctgcccttcaccgccaccgccgaggaggtggtggccttcttcggccagcactgccccatcaccggcggcaaggagggcatcctgttcgtgacctaccccgacggcagacccaccggcgacgccttcgtgctgttcgcctgcgaggagtacgcccagaacgccctgagaaagcacaaggacctgctgggcaagagatacatcgagctgttcagaagcaccgccgccgaggtgcagcaggtgctgaacagattcagcagcgcccccctgatccccctgcccaccccccccatcatccccgtgctgccccagcagttcgtgccccccaccaacgtgagagactgcatcagactgagaggcctgccctacgccgccaccatcgaggacatcctggacttcctgggcgagttcgccaccgacatcagaacccacggcgtgcacatggtgctgaaccaccagggcagacccagcggcgacgccttcatccagatgaagagcgccgacagagccttcatggccgcccagaagtgccacaagaagaacatgaaggacagatacgtggaggtgttccagtgcagcgccgaggagatgaacttcgtgctgatgggcggcaccctgaacagaaacggcctgagcccccccccctgcctgagcccccccagctacaccttccccgcccccgccgccgtgatccccaccgaggccgccatctaccagcccagcgtgatcctgaaccccagagccctgcagcccagcaccgcctactaccccgccggcacccagctgttcatgaactacaccgcctactaccccagcccccccggcagccccaacagcctgggctacttccccaccgccgccaacctgagcggcgtgcccccccagcccggcaccgtggtgagaatgcagggcctggcctacaacaccggcgtgaaggagatcctgaacttcttccagggctaccagtgcctgaaggacgtgtggtag

SEQ ID NO: 80530 - DNA, 2046 bp, synthetic construct
  misc_feature 1..2046: note = Description of Artificial Sequence: Synthetic coding sequence
  source 1..2046: mol_type = other DNA
atgaccgccagccccgactacctggtggtgctgttcggcatcaccgccggcgccaccggcgccaagctgggcagcgacgagaaggagctgatcctgctgttctggaaggtggtggacctggccaacaagaaggtgggccagctgcacgaggtgctggtgagacccgaccagctggagctgaccgaggactgcaaggaggagaccaagatcgacgtggagagcctgagcagcgccagccagctggaccaggccctgagacagttcaaccagagcgtgagcaacgagctgaacatcggcgtgggcaccagcttctgcctgtgcaccgacggccagctgcacgtgagacagatcctgcaccccgaggccagcaagaagaacgtgctgctgcccgagtgcttctacagcttcttcgacctgagaaaggagttcaagaagtgctgccccggcagccccgacatcgacaagctggacgtggccaccatgaccgagtacctgaacttcgagaagagcagcagcgtgagcagatacggcgccagccaggtggaggacatgggcaacatcatcctggccatgatcagcgagccctacaaccacagattcagcgaccccgagagagtgaactacaagttcgagagcggcacctgcagcaagatggagctgatcgacgacaacaccgtggtgagagccagaggcctgccctggcagagcagcgaccaggacatcgccagattcttcaagggcctgaacatcgccaagggcggcgccgccctgtgcctgaacgcccagggcagaagaaacggcgaggccctggtgagattcgtgagcgaggagcacagagacctggccctgcagagacacaagcaccacatgggcaccagatacatcgaggtgtacaaggccaccggcgaggacttcctgaagatcgccggcggcaccagcaacgaggtggcccagttcctgagcaaggagaaccaggtgatcgtgagaatgagaggcctgcccttcaccgccaccgccgaggaggtggtggccttcttcggccagcactgccccatcaccggcggcaaggagggcatcctgttcgtgacctaccccgacggcagacccaccggcgacgccttcgtgctgttcgcctgcgaggagtacgcccagaacgccctgagaaagcacaaggacctgctgggcaagagatacatcgagctgttcagaagcaccgccgccgaggtgcagcaggtgctgaacagattcagcagcgcccccctgatccccctgcccaccccccccatcatccccgtgctgccccagcagttcgtgccccccaccaacgtgagagactgcatcagactgagaggcctgccctacgccgccaccatcgaggacatcctggacttcctgggcgagttcgccaccgacatcagaacccacggcgtgcacatggtgctgaaccaccagggcagacccagcggcgacgccttcatccagatgaagagcgccgacagagccttcatggccgcccagaagtgccacaagaagaacatgaaggacagatacgtggaggtgttccagtgcagcgccgaggagatgaacttcgtgctgatgggcggcaccctgaacagaaacggcctgagcccccccccctgcaagctgccctgcctgagcccccccagctacaccttccccgcccccgccgccgtgatccccaccgaggccgccatctaccagcccagcgtgatcctgaaccccagagccctgcagcccagcaccgcctactaccccgccggcacccagctgttcatgaactacaccgcctactaccccagcccccccggcagccccaacagcctgggctacttccccaccgccgccaacctgagcggcgtgcccccccagcccggcaccgtggtgagaatgcagggcctggcctacaacaccggcgtgaaggagatcctgaacttcttccagggctaccagtacgccaccgaggacggcctgatccacaccaacgaccaggccagaaccctgcccaaggagtgggtgtgcatctag

SEQ ID NO: 80531 - DNA, 1827 bp, synthetic construct
  misc_feature 1..1827: note = Description of Artificial Sequence: Synthetic coding sequence
  source 1..1827: mol_type = other DNA
atgaccgccagccccgactacctggtggtgctgttcggcatcaccgccggcgccaccggcgccaagctgggcagcgacgagaaggagctgatcctgctgttctggaaggtggtggacctggccaacaagaaggtgggccagctgcacgaggtgctggtgagacccgaccagctggagctgaccgaggactgcaaggaggagaccaagatcgacgtggagagcctgagcagcgccagccagctggaccaggccctgagacagttcaaccagagcgtgagcaacgagctgaacatcggcgtgggcaccagcttctgcctgtgcaccgacggccagctgcacgtgagacagatcctgcaccccgaggccagcaagaagaacgtgctgctgcccgagtgcttctacagcttcttcgacctgagaaaggagttcaagaagtgctgccccggcagccccgacatcgacaagctggacgtggccaccatgaccgagtacctgaacttcgagaagagcagcagcgtgagcagatacggcgccagccaggtggaggacatgggcaacatcatcctggccatgatcagcgagccctacaaccacagattcagcgaccccgagagagtgaactacaagttcgagagcggcacctgcagcaagatggagctgatcgacgacaacaccgtggtgagagccagaggcctgccctggcagagcagcgaccaggacatcgccagattcttcaagggcctgaacatcgccaagggcggcgccgccctgtgcctgaacgcccagggcagaagaaacggcgaggccctggtgagattcgtgagcgaggagcacagagacctggccctgcagagacacaagcaccacatgggcaccagatacatcgaggtgtacaaggccaccggcgaggacttcctgaagatcgccggcggcaccagcaacgaggtggcccagttcctgagcaaggagaaccaggtgatcgtgagaatgagaggcctgcccttcaccgccaccgccgaggaggtggtggccttcttcggccagcactgccccatcaccggcggcaaggagggcatcctgttcgtgacctaccccgacggcagacccaccggcgacgccttcgtgctgttcgcctgcgaggagtacgcccagaacgccctgagaaagcacaaggacctgctgggcaagagatacatcgagctgttcagaagcaccgccgccgaggtgcagcaggtgctgaacagattcagcagcgcccccctgatccccctgcccaccccccccatcatccccgtgctgccccagcagttcgtgccccccaccaacgtgagagactgcatcagactgagaggcctgccctacgccgccaccatcgaggacatcctggacttcctgggcgagttcgccaccgacatcagaacccacggcgtgcacatggtgctgaaccaccagggcagacccagcggcgacgccttcatccagatgaagagcgccgacagagccttcatggccgcccagaagtgccacaagaagaacatgaaggacagatacgtggaggtgttccagtgcagcgccgaggagatgaacttcgtgctgatgggcggcaccctgaacagaaacggcctgagcccccccccctgcaagctgccctgcctgagcccccccagctacaccttccccgcccccgccgccgtgatccccaccgaggccgccatctaccagcccagcgtgatcctgaaccccagagccctgcagcccagcaccgcctactaccccgccggcacccagctgttcatgaactacaccgcctactaccccagcgtgtag

SEQ ID NO: 80532 - DNA, 2154 bp, synthetic construct
  misc_feature 1..2154: note = Description of Artificial Sequence: Synthetic coding sequence
  source 1..2154: mol_type = other DNA
atgacccccccccccccccccccccccccccccggccccgaccccgccgccgaccccgccgccgacccctgcccctggcccggcagcctggtggtgctgttcggcgccaccgccggcgccctgggcagagacctgggcagcgacgagaccgacctgatcctgctggtgtggcaggtggtggagcccagaagcagacaggtgggcaccctgcacaagagcctggtgagagccgaggccgccgccctgagcacccagtgcagagaggccagcggcctgagcgccgacagcctggccagagccgagcccctggacaaggtgctgcagcagttcagccagctggtgaacggcgacgtggccctgctgggcggcggcccctacatgctgtgcaccgacggccagcagctgctgagacaggtgctgcaccccgaggccagcagaaagaacctggtgctgcccgacatgttcttcagcttctacgacctgagaagagagttccacatgcagcaccccagcacctgccccgccagagacctgaccgtggccaccatggcccagggcctgggcctggagaccgacgccaccgaggacgacttcggcgtgtgggaggtgaagaccatggtggccgtgatcctgcacctgctgaaggagcccagcagccagctgttcagcaagcccgaggtgatcaagcagaagtacgagaccggcccctgcagcaaggccgacgtggtggacagcgagaccgtggtgagagccagaggcctgccctggcagagcagcgaccaggacgtggccagattcttcaagggcctgaacgtggccagaggcggcgtggccctgtgcctgaacgcccagggcagaagaaacggcgaggccctgatcagattcgtggacagcgagcagagagacctggccctgcagagacacaagcaccacatgggcgtgagatacatcgaggtgtacaaggccaccggcgaggagttcgtgaagatcgccggcggcaccagcctggaggtggccagattcctgagcagagaggaccaggtgatcctgagactgagaggcctgcccttcagcgccggccccaccgacgtgctgggcttcctgggccccgagtgccccgtgaccggcggcaccgagggcctgctgttcgtgagacaccccgacggcagacccaccggcgacgccttcgccctgttcgcctgcgaggagctggcccaggccgccctgagaagacacaagggcatgctgggcaagagatacatcgagctgttcagaagcaccgccgccgaggtgcagcaggtgctgaacagatacgccagcggccccctgctgcccaccctgaccgcccccctgctgcccatccccttccccctggcccccggcaccggcagagactgcgtgagactgagaggcctgccctacaccgccaccatcgaggacatcctgagcttcctgggcgaggccgccgccgacatcagaccccacggcgtgcacatggtgctgaaccagcagggcagacccagcggcgacgccttcatccagatgaccagcgccgagagagccctggccgccgcccagagatgccacaagaaggtgatgaaggagagatacgtggaggtggtgccctgcagcaccgaggagatgagcagagtgctgatgggcggcaccctgggcagaagcggcatgagcccccccccctgcaagctgccctgcctgagcccccccacctacaccaccttccaggccacccccaccctgatccccaccgagaccgccgccctgtaccccagcagcgccctgctgcccgccgccagagtgcccgccgcccccacccccgtggcctactaccccggccccgccacccagctgtacctgaactacaccgcctactaccccagcccccccgtgagccccaccaccgtgggctacctgaccacccccaccgccgccctggccagcgcccccaccagcgtgctgagccagagcggcgccctggtgagaatgcagggcgtgccctacaccgccggcatgaaggacctgctgagcgtgttccaggcctaccagctgcccgccgacgactacaccagcctgatgcccgtgggcgacccccccagaaccgtgctgcaggcccccaaggagtgggtgtgcctgtag

SEQ ID NO: 80533 - DNA, 924 bp, synthetic construct
  misc_feature 1..924: note = Description of Artificial Sequence: Synthetic coding sequence
  source 1..924: mol_type = other DNA
atgaacaccagaaacagagtggtgaacagcggcctgggcgccagccccgccagcagacccaccagagacccccaggaccccagcggcagacagggcgagctgagccccgtggaggaccagagagagggcctggaggccgcccccaagggccccagcagagagagcgtggtgcacgccggccagagaagaaccagcgcctacaccctgatcgcccccaacatcaacagaagaaacgagatccagagaatcgccgagcaggagctggccaacctggagaagtggaaggagcagaacagagccaagcccgtgcacctggtgcccagaagactgggcggcagccagagcgagaccgaggtgagacagaagcagcagctgcagctgatgcagagcaagtacaagcagaagctgaagagagaggagagcgtgagaatcaagaaggaggccgaggaggccgagctgcagaagatgaaggccatccagagagagaagagcaacaagctggaggagaagaagagactgcaggagaacctgagaagagaggccttcagagagcaccagcagtacaagaccgccgagttcctgagcaagctgaacaccgagagccccgacagaagcgcctgccagagcgccgtgtgcggcccccagagcagcacctgggccagaagctgggcctacagagacagcctgaaggccgaggagaacagaaagctgcagaagatgaaggacgagcagcaccagaagagcgagctgctggagctgaagagacagcagcaggagcaggagagagccaagatccaccagaccgagcacagaagagtgaacaacgccttcctggacagactgcagggcaagagccagcccggcggcctggagcagagcggcggctgctggaacatgaacagcggcaacagctggggcatctag

SEQ ID NO: 80534 - DNA, 1233 bp, synthetic construct
  misc_feature 1..1233: note = Description of Artificial Sequence: Synthetic coding sequence
  source 1..1233: mol_type = other DNA
atgaacaccagaaacagagtggtgaacagcggcctgggcgccagccccgccagcagacccaccagagacccccaggaccccagcggcagacagggcgagctgagccccgtggaggaccagagagagggcctggaggccgcccccaagggccccagcagagagagcgtggtgcacgccggccagagaagaaccagcgcctacaccctgatcgcccccaacatcaacagaagaaacgagatccagagaatcgccgagcaggagctggccaacctggagaagtggaaggagcagaacagagccaagcccgtgcacctggtgcccagaagactgggcggcagccagagcgagaccgaggtgagacagaagcagcagctgcagctgatgcagagcaagtacaagcagaagctgaagagagaggagagcgtgagaatcaagaaggaggccgaggaggccgagctgcagaagatgaaggccatccagagagagaagagcaacaagctggaggagaagaagagactgcaggagaacctgagaagagaggccttcagagagcaccagcagtacaagaccgccgagttcctgagcaagctgaacaccgagagccccgacagaagcgcctgccagagcgccgtgtgcggcccccagagcagcacctggaagctgcccatcctgcccagagaccacagctgggccagaagctgggcctacagagacagcctgaaggccgaggagaacagaaagctgcagaagatgaaggacgagcagcaccagaagagcgagctgctggagctgaagagacagcagcaggagcaggagagagccaagatccaccagaccgagcacagaagagtgaacaacgccttcctggacagactgcagggcaagagccagcccggcggcctggagcagagcggcggctgctggaacatgaacagcggcaacagctggggcagcctgctggtgttcagcagacacctgagagtgtacgagaagatcctgacccccatctggcccagcagcaccgacctggagaagccccacgagatgctgttcctgaacgtgatcctgttcagcctgaccgtgttcaccctgatcagcaccgcccacaccctggacagagccgtgagaagcgactggctgctgctggtgctgatctacgcctgcctggaggagctgatccccgagctgatcttcaacctgtactgccagggcaacgccaccctgttcttctag

SEQ ID NO: 80535 - DNA, 1368 bp, synthetic construct
  misc_feature 1..1368: note = Description of Artificial Sequence: Synthetic coding sequence
  source 1..1368: mol_type = other DNA
atgtggctggagatcctgctgaccagcgtgctgggcttcgccatctactggttcatcagcagagacaaggaggagaccctgcccctggaggacggctggtggggccccggcaccagaagcgccgccagagaggacgacagcatcagacccttcaaggtggagaccagcgacgaggagatccacgacctgcaccagagaatcgacaagttcagattcaccccccccctggaggacagctgcttccactacggcttcaacagcaactacctgaagaaggtgatcagctactggagaaacgagttcgactggaagaagcaggtggagatcctgaacagatacccccacttcaagaccaagatcgagggcctggacatccacttcatccacgtgaagcccccccagctgcccgccggccacacccccaagcccctgctgatggtgcacggctggcccggcagcttctacgagttctacaagatcatccccctgctgaccgaccccaagaaccacggcctgagcgacgagcacgtgttcgaggtgatctgccccagcatccccggctacggcttcagcgaggccagcagcaagaagggcttcaacagcgtggccaccgccagaatcttctacaagctgatgctgagactgggcttccaggagttctacatccagggcggcgactggggcagcctgatctgcaccaacatggcccagctggtgcccagccacgtgaagggcctgcacctgaacatggccctggtgctgagcaacttcagcaccctgaccctgctgctgggccagagattcggcagattcctgggcctgaccgagagagacgtggagctgctgtaccccgtgaaggagaaggtgttctacagcctgatgagagagagcggctacatgcacatccagtgcaccaagcccgacaccgtgggcagcgccctgaacgacagccccgtgggcctggccgcctacatcctggagaagttcagcacctggaccaacaccgagttcagatacctggaggacggcggcctggagagaaagttcagcctggacgacctgctgaccaacgtgatgctgtactggaccaccggcaccatcatcagcagccagagattctacaaggagaacctgggccagggctggatgacccagaagcacgagagaatgaaggtgtacgtgcccaccggcttcagcgccttccccttcgagctgctgcacacccccgagaagtgggtgagattcaagtaccccaagctgatcagctacagctacatggtgagaggcggccacttcgccgccttcgaggagcccgagctgctggcccaggacatcagaaagttcctgagcgtgctggagagacagtag

SEQ ID NO: 80536 - DNA, 1368 bp, synthetic construct; identical to SEQ ID NO: 80535
  misc_feature 1..1368: note = Description of Artificial Sequence: Synthetic coding sequence
  source 1..1368: mol_type = other DNA

SEQ ID NO: 80537 - DNA, 486 bp, synthetic construct
  misc_feature 1..486: note = Description of Artificial Sequence: Synthetic coding sequence
  source 1..486: mol_type = other DNA
atgtggctggagatcctgctgaccagcgtgctgggcttcgccatctactggttcatcagcagagacaaggaggagaccctgcccctggaggacggctggtggggccccggcaccagaagcgccgccagagaggacgacagcatcagacccttcaaggtggagaccagcgacgaggagatccacgacctgcaccagagaatcgacaagttcagattcaccccccccctggaggacagctgcttccactacggcttcaacagcaactacctgaagaaggtgatcagctactggagaaacgagttcgactggaagaagcaggtggagatcctgaacagatacccccacttcaagaccaagatcgagggcctggacatccacttcatccacgtgaagcccccccagctgcccgccggccacacccccaagcccctgctgatggtgcacggctggcccggcagcttctacgagttctacaagatcatctag

SEQ ID NO: 80538 - DNA, 411 bp, synthetic construct
  misc_feature 1..411: note = Description of Artificial Sequence: Synthetic coding sequence
  source 1..411: mol_type = other DNA
atgtggctggagatcctgctgaccagcgtgctgggcttcgccatctactggttcatcagcagagacaaggaggagaccctgcccctggaggacggctggtggggccccggcaccagaagcgccgccagagaggacgacagcatcagacccttcaaggtggagaccagcgacgaggagatccacgacctgcaccagagaatcgacaagttcagattcaccccccccctggaggacagctgcttccactacggcttcaacagcaactacctgaagaaggtgatcagctactggagaaacgagttcgactggaagaagcaggtggagatcctgaacagatacccccacttcaagaccaagatcgagggcctggacatccacttcatccacgtgaagcccccccagctgccctag

SEQ ID NO: 80539 - DNA, 1509 bp, synthetic construct
  misc_feature 1..1509: note = Description of Artificial Sequence: Synthetic coding sequence
  source 1..1509: mol_type = other DNA
atgaagggcgagatcaccctgagccagtggatccccctgatggaggagaactgcagaaagtgcagcgagaccgccaaggtgtgcctgcccaagaacttcagcatcaaggagatcttcgacaaggccatcagcgccagaaagatcaacagacccatgctgcaggccgccctgatgctgagaaagaagggcttcaccaccgccatcctgaccaacacctggctggacgacagagccgagagagacggcctggcccagctgatgtgcgagctgaagatgcacttcgacttcctgatcgagagctgccaggtgggcatggtgaagcccgagccccagatctacaagttcctgctggacaccctgaaggccagccccagcgaggtggtgttcctggacgacatcggcgccaacctgaagcccgccagagacctgggcatggtgaccatcctggtgcaggacaccgacaccgccctgaaggagctggagaaggtgaccggcatccagctgctgaacacccccgcccccctgcccaccagctgcaaccccagcgacatgagccacggctacgtgaccgtgaagcccagagtgagactgcacttcgtggagctgggcagcggccccgccgtgtgcctgtgccacggcttccccgagagctggtacagctggagataccagatccccgccctggcccaggccggctacagagtgctggccatggacatgaagggctacggcgagagcagcgccccccccgagatcgaggagtactgcatggaggtgctgtgcaaggagatggtgaccttcctggacaagctgggcctgagccaggccgtgttcatcggccacgactggggcggcatgctggtgtggtacatggccctgttctaccccgagagagtgagagccgtggccagcctgaacacccccttcatccccgccaaccccaacatgagccccctggagagcatcaaggccaaccccgtgttcgactaccagctgtacttccaggagcccggcgtggccgaggccgagctggagcagaacctgagcagaaccttcaagagcctgttcagagccagcgacgagagcgtgctgagcatgcacaaggtgtgcgaggccggcggcctgttcgtgaacagccccgaggagcccagcctgagcagaatggtgaccgaggaggagatccagttctacgtgcagcagttcaagaagagcggcttcagaggccccctgaactggtacagaaacatggagagaaactggaagtgggcctgcaagagcctgggcagaaagatcctgatccccgccctgatggtgaccgccgagaaggacttcgtgctggtgccccagatgagccagcacatggaggactggatcccccacctgaagagaggccacatcgaggactgcggccactggacccagatggacaagcccaccgaggtgaaccagatcctgatcaagtggctggacagcgacgccagaaacccccccgtggtgagcaagatgtag

SEQ ID NO: 80540 - DNA, 1470 bp, synthetic construct
  misc_feature 1..1470: note = Description of Artificial Sequence: Synthetic coding sequence
  source 1..1470: mol_type = other DNA
atggaggagaactgcagaaagtgcagcgagaccgccaaggtgtgcctgcccaagaacttcagcatcaaggagatcttcgacaaggccatcagcgccagaaagatcaacagacccatgctgcaggccgccctgatgctgagaaagaagggcttcaccaccgccatcctgaccaacacctggctggacgacagagccgagagagacggcctggcccagctgatgtgcgagctgaagatgcacttcgacttcctgatcgagagctgccaggtgggcatggtgaagcccgagccccagatctacaagttcctgctggacaccctgaaggccagccccagcgaggtggtgttcctggacgacatcggcgccaacctgaagcccgccagagacctgggcatggtgaccatcctggtgcaggacaccgacaccgccctgaaggagctggagaaggtgaccggcatccagctgctgaacacccccgcccccctgcccaccagctgcaaccccagcgacatgagccacggctacgtgaccgtgaagcccagagtgagactgcacttcgtggagctgggcagcggccccgccgtgtgcctgtgccacggcttccccgagagctggtacagctggagataccagatccccgccctggcccaggccggctacagagtgctggccatggacatgaagggctacggcgagagcagcgccccccccgagatcgaggagtactgcatggaggtgctgtgcaaggagatggtgaccttcctggacaagctgggcctgagccaggccgtgttcatcggccacgactggggcggcatgctggtgtggtacatggccctgttctaccccgagagagtgagagccgtggccagcctgaacacccccttcatccccgccaaccccaacatgagccccctggagagcatcaaggccaaccccgtgttcgactaccagctgtacttccaggagcccggcgtggccgaggccgagctggagcagaacctgagcagaaccttcaagagcctgttcagagccagcgacgagagcgtgctgagcatgcacaaggtgtgcgaggccggcggcctgttcgtgaacagccccgaggagcccagcctgagcagaatggtgaccgaggaggagatccagttctacgtgcagcagttcaagaagagcggcttcagaggccccctgaactggtacagaaacatggagagaaactggaagtgggcctgcaagagcctgggcagaaagatcctgatccccgccctgatggtgaccgccgagaaggacttcgtgctggtgccccagatgagccagcacatggaggactggatcccccacctgaagagaggccacatcgaggactgcggccactggacccagatggacaagcccaccgaggtgaaccagatcctgatcaagtggctggacagcgacgccagaaacccccccgtggtgagcaagatgtag

SEQ ID NO: 80541 - DNA, 1509 bp, synthetic construct
  misc_feature 1..1509: note = Description of Artificial Sequence: Synthetic coding sequence
  source 1..1509: mol_type = other DNA
atgaccctgagagccgccgtgttcgacctggacggcgtgctggccctgcccgccgtgttcggcgtgctgggcagaaccgaggaggccctggccctgcccagaggcctgctgaacgacgccttccagaagggcggccccgagggcgccaccaccagactgatgaagggcgagatcaccctgagccagtggatccccctgatggaggagaactgcagaaagtgcagcgagaccgccaaggtgtgcctgcccaagaacttcagcatcaaggagatcttcgacaaggccatcagcgccagaaagatcaacagacccatgctgcaggccgccctgatgctgagaaagaaggccttctgcagcggcttcaccaccgccatcctgaccaacacctggctggacgacagagccgagagagacggcctggcccagctgatgtgcgagctgaagatgcacttcgacttcctgatcgagagctgccaggtgggcatggtgaagcccgagccccagatctacaagttcctgctggacaccctgaaggccagccccagcgaggtggtgttcctggacgacatcggcgccaacctgaagcccgccagagacctgggcatggtgaccatcctggtgcaggacaccgacaccgccctgaaggagctggagaaggtgaccggcatccagctgctgaacacccccgcccccctgcccaccagctgcaaccccagcgacatgagccacggctacgtgaccgtgaagcccagagtgagactgcacttcgtggagctgggcagcggccccgccgtgtgcctgtgccacggcttccccgagagctggtacagctggagataccagatccccgccctggcccaggccggctacagagtgctggccatggacatgaagggctacggcgagagcagcgccccccccgagatcgaggagtactgcatggaggtgctgtgcaaggagagcatcaaggccaaccccgtgttcgactaccagctgtacttccaggagcccggcgtggccgaggccgagctggagcagaacctgagcagaaccttcaagagcctgttcagagccagcgacgagagcgtgctgagcatgcacaaggtgtgcgaggccggcggcctgttcgtgaacagccccgaggagcccagcctgagcagaatggtgaccgaggaggagatccagttctacgtgcagcagttcaagaagagcggcttcagaggccccctgaactggtacagaaacatggagagaaactggaagtgggcctgcaagagcctgggcagaaagatcctgatccccgccctgatggtgaccgccgagaaggacttcgtgctggtgccccagatgagccagcacatggaggactggatcccccacctgaagagaggccacatcgaggactgcggccactggacccagatggacaagcccaccgaggtgaaccagatcctgatcaagtggctggacagcgacgccagaaacccccccgtggtgagcaagatgtag

SEQ ID NO: 80542 - DNA, 1668 bp, synthetic construct
  misc_feature 1..1668: note = Description of Artificial Sequence: Synthetic coding sequence
  source 1..1668: mol_type = other DNA
atgaccctgagagccgccgtgttcgacctggacggcgtgctggccctgcccgccgtgttcggcgtgctgggcagaaccgaggaggccctggccctgcccagaggcctgctgaacgacgccttccagaagggcggccccgagggcgccaccaccagactgatgaagggcgagatcaccctgagccagtggatccccctgatggaggagaactgcagaaagtgcagcgagaccgccaaggtgtgcctgcccaagaacttcagcatcaaggagatcttcgacaaggccatcagcgccagaaagatcaacagacccatgctgcaggccgccctgatgctgagaaagaagggcttcaccaccgccatcctgaccaacacctggctggacgacagagccgagagagacggcctggcccagctgatgtgcgagctgaagatgcacttcgacttcctgatcgagagctgccaggtgggcatggtgaagcccgagccccagatctacaagttcctgctggacaccctgaaggccagccccagcgaggtggtgttcctggacgacatcggcgccaacctgaagcccgccagagacctgggcatggtgaccatcctggtgcaggacaccgacaccgccctgaaggagctggagaaggtgaccggcatccagctgctgaacacccccgcccccctgcccaccagctgcaaccccagcgacatgagccacggctacgtgaccgtgaagcccagagtgagactgcacttcgtggagctgggcagcggccccgccgtgtgcctgtgccacggcttccccgagagctggtacagctggagataccagatccccgccctggcccaggccggctacagagtgctggccatggacatgaagggctacggcgagagcagcgccccccccgagatcgaggagtactgcatggaggtgctgtgcaaggagatggtgaccttcctggacaagctgggcctgagccaggccgtgttcatcggccacgactggggcggcatgctggtgtggtacatggccctgttctaccccgagagagtgagagccgtggccagcctgaacacccccttcatccccgccaaccccaacatgagccccctggagagcatcaaggccaaccccgtgttcgactaccagctgtacttccaggagcccggcgtggccgaggccgagctggagcagaacctgagcagaaccttcaagagcctgttcagagccagcgacgagagcgtgctgagcatgcacaaggtgtgcgaggccggcggcctgttcgtgaacagccccgaggagcccagcctgagcagaatggtgaccgaggaggagatccagttctacgtgcagcagttcaagaagagcggcttcagaggccccctgaactggtacagaaacatggagagaaactggaagtgggcctgcaagagcctgggcagaaagatcctgatccccgccctgatggtgaccgccgagaaggacttcgtgctggtgccccagatgagccagcacatggaggactggatcccccacctgaagagaggccacatcgaggactgcggccactggacccagatggacaagcccaccgaggtgaaccagatcctgatcaagtggctggacagcgacgccagaaacccccccgtggtgagcaagatgtag

SEQ ID NO: 80543 - DNA, 1653 bp, synthetic construct
  misc_feature 1..1653: note = Description of Artificial Sequence: Synthetic coding sequence
  source 1..1653: mol_type = other DNA
atgagcaccagcagcctgagaagacagatgaagaacatcgtgcacaactacagcgaggccgagatcaaggtgagagaggccaccagcaacgacccctggggccccagcagcagcctgatgagcgagatcgccgacctgacctacaacgtggtggccttcagcgagatcatgagcatgatctggaagagactgaacgaccacggcaagaactggagacacgtgtacaaggccatgaccctgatggagtacctgatcaagaccggcagcgagagagtgagccagcagtgcaaggagaacatgtacgccgtgcagaccctgaaggacttccagtacgtggacagagacggcaaggaccagggcgtgaacgtgagagagaaggccaagcagctggtggccctgctgagagacgaggacagactgagagaggagagagcccacgccctgaagaccaaggagaagctggcccagaccgccaccgccagcagcgccgccgtgggcagcggccccccccccgaggccgagcaggcctggccccagagcagcggcgaggaggagctgcagctgcagctggccctggccatgagcaaggaggaggccgaccaggaggagagaatcagaagaggcgacgacctgagactgcagatggccatcgaggagagcaagagagagaccggcggcaaggaggagagcagcctgatggacctggccgacgtgttcaccgcccccgcccccgcccccaccaccgacccctggggcggccccgcccccatggccgccgccgtgcccaccgccgcccccaccagcgacccctggggcggcccccccgtgccccccgccgccgacccctggggcggccccgcccccacccccgccagcggcgacccctggagacccgccgcccccgccggccccagcgtggacccctggggcggcacccccgcccccgccgccggcgagggccccacccccgacccctggggcagcagcgacggcggcgtgcccgtgagcggccccagcgccagcgacccctggacccccgcccccgccttcagcgacccctggggcggcagccccgccaagcccagcaccaacggcaccaccgccggcggcttcgacaccgagcccgacgagttcagcgacttcgacagactgagaaccgccctgcccaccagcggcagcagcgccggcgagctggagctgctggccggcgaggtgcccgccagaagccccggcgccttcgacatgagcggcgtgagaggcagcctggccgaggccgtgggcagccccccccccgccgccacccccacccccaccccccccaccagaaagacccccgagagcttcctgggccccaacgccgccctggtggacctggacagcctggtgagcagacccggccccaccccccccggcgccaaggccagcaaccccttcctgcccggcggcggccccgccaccggccccagcgtgaccaaccccttccagcccgccccccccgccaccctgaccctgaaccagctgagactgagccccgtgccccccgtgcccggcgccccccccacctacatcagccccctgggcggcggccccggcctgccccccatgatgccccccggcccccccgcccccaacaccaaccccttcctgctgtag

SEQ ID NO: 80544 - DNA, 1731 bp, synthetic construct
  misc_feature 1..1731: note = Description of Artificial Sequence: Synthetic coding sequence
  source 1..1731: mol_type = other DNA
atgagcaccagcagcctgagaagacagatgaagaacatcgtgcacaactacagcgaggccgagatcaaggtgagagaggccaccagcaacgacccctggggccccagcagcagcctgatgagcgagatcgccgacctgacctacaacgtggtggccttcagcgagatcatgagcatgatctggaagagactgaacgaccacggcaagaactggagacacgtgtacaaggccatgaccctgatggagtacctgatcaagaccggcagcgagagagtgagccagcagtgcaaggagaacatgtacgccgtgcagaccctgaaggacttccagtacgtggacagagacggcaaggaccagggcgtgaacgtgagagagaaggccaagcagctggtggccctgctgagagacgaggacagactgagagaggagagagcccacgccctgaagaccaaggagaagctggcccagaccgccaccgccagcagcgccgccgtgggcagcggccccccccccgaggccgagcaggcctggccccagagcagcggcgaggaggagctgcagctgcagctggccctggccatgagcaaggaggaggccgaccagccccccagctgcggccccgaggacgacgcccagctgcagctggccctgagcctgagcagagaggagcacgacaaggaggagagaatcagaagaggcgacgacctgagactgcagatggccatcgaggagagcaagagagagaccggcggcaaggaggagagcagcctgatggacctggccgacgtgttcaccgcccccgcccccgcccccaccaccgacccctggggcggccccgcccccatggccgccgccgtgcccaccgccgcccccaccagcgacccctggggcggcccccccgtgccccccgccgccgacccctggggcggccccgcccccacccccgccagcggcgacccctggagacccgccgcccccgccggccccagcgtggacccctggggcggcacccccgcccccgccgccggcgagggccccacccccgacccctggggcagcagcgacggcggcgtgcccgtgagcggccccagcgccagcgacccctggacccccgcccccgccttcagcgacccctggggcggcagccccgccaagcccagcaccaacggcaccaccgccgccggcggcttcgacaccgagcccgacgagttcagcgacttcgacagactgagaaccgccctgcccaccagcggcagcagcgccggcgagctggagctgctggccggcgaggtgcccgccagaagccccggcgccttcgacatgagcggcgtgagaggcagcctggccgaggccgtgggcagccccccccccgccgccacccccacccccaccccccccaccagaaagacccccgagagcttcctgggccccaacgccgccctggtggacctggacagcctggtgagcagacccggccccaccccccccggcgccaaggccagcaaccccttcctgcccggcggcggccccgccaccggccccagcgtgaccaaccccttccagcccgccccccccgccaccctgaccctgaaccagctgagactgagccccgtgccccccgtgcccggcgccccccccacctacatcagccccctgggcggcggccccggcctgccccccatgatgccccccggcccccccgcccccaacaccaaccccttcctgctgtag

SEQ ID NO: 80545 - DNA, 1989 bp, synthetic construct
  misc_feature 1..1989: note = Description of Artificial Sequence: Synthetic coding sequence
  source 1..1989: mol_type = other DNA
atgggcgaccagagctggctgtggaaccaggccgcccccggcgtgagaagccccgtgttcgcctgcagcgtggagaagggcaacgtgcccctggtgctgagcgagcacctggcccacagcagagaccccggcagcggcgccgtgagattcctgatcagccccgagccctgggccagcgccatcctgggcaccagcggcctgctggccagccccgtgctgcccgccgccctggacgccgtgacctgccagcacctgccccagcccagcagcggcagcagacccatcagccccagaatcggcgccctgtgccccctgctgctgcagcccggcaccatgagcaccagcagcctgagaagacagatgaagaacatcgtgcacaactacagcgaggccgagatcaaggtgagagaggccaccagcaacgacccctggggccccagcagcagcctgatgagcgagatcgccgacctgacctacaacgtggtggccttcagcgagatcatgagcatgatctggaagagactgaacgaccacggcaagaactggagacacgtgtacaaggccatgaccctgatggagtacctgatcaagaccggcagcgagagagtgagccagcagtgcaaggagaacatgtacgccgtgcagaccctgaaggacttccagtacgtggacagagacggcaaggaccagggcgtgaacgtgagagagaaggccaagcagctggtggccctgctgagagacgaggacagactgagagaggagagagcccacgccctgaagaccaaggagaagctggcccagaccgccaccgccagcagcgccgccgtgggcagcggccccccccccgaggccgagcaggcctggccccagagcagcggcgaggaggagctgcagctgcagctggccctggccatgagcaaggaggaggccgaccaggaggagagaatcagaagaggcgacgacctgagactgcagatggccatcgaggagagcaagagagagaccggcggcaaggaggagagcagcctgatggacctggccgacgtgttcaccgcccccgcccccgcccccaccaccgacccctggggcggccccgcccccatggccgccgccgtgcccaccgccgcccccaccagcgacccctggggcggcccccccgtgccccccgccgccgacccctggggcggccccgcccccacccccgccagcggcgacccctggagacccgccgcccccgccggccccagcgtggacccctggggcggcacccccgcccccgccgccggcgagggccccacccccgacccctggggcagcagcgacggcggcgtgcccgtgagcggccccagcgccagcgacccctggacccccgcccccgccttcagcgacccctggggcggcagccccgccaagcccagcaccaacggcaccaccgccgccggcggcttcgacaccgagcccgacgagttcagcgacttcgacagactgagaaccgccctgcccaccagcggcagcagcgccggcgagctggagctgctggccggcgaggtgcccgccagaagccccggcgccttcgacatgagcggcgtgagaggcagcctggccgaggccgtgggcagccccccccccgccgccacccccacccccaccccccccaccagaaagacccccgagagcttcctgggccccaacgccgccctggtggacctggacagcctggtgagcagacccggccccaccccccccggcgccaaggccagcaaccccttcctgcccggcggcggccccgccaccggccccagcgtgaccaaccccttccagcccgccccccccgccaccctgaccctgaaccagctgagactgagccccgtgccccccgtgcccggcgccccccccacctacatcagccccctgggcggcggccccggcctgccccccatgatgccccccggcccccccgcccccaacaccaaccccttcctgctgtag

SEQ ID NO: 80546 - DNA, 1611 bp, synthetic construct
  misc_feature 1..1611: note = Description of Artificial Sequence: Synthetic coding sequence
  source 1..1611: mol_type = other DNA
atgagcgagatcgccgacctgacctacaacgtggtggccttcagcgagatcatgagcatgatctggaagagactgaacgaccacggcaagaactggagacacgtgtacaaggccatgaccctgatggagtacctgatcaagaccggcagcgagagagtgagccagcagtgcaaggagaacatgtacgccgtgcagaccctgaaggacttccagtacgtggacagagacggcaaggaccagggcgtgaacgtgagagagaaggccaagcagctggtggccctgctgagagacgaggacagactgagagaggagagagcccacgccctgaagaccaaggagaagctggcccagaccgccaccgccagcagcgccgccgtgggcagcggccccccccccgaggccgagcaggcctggccccagagcagcggcgaggaggagctgcagctgcagctggccctggccatgagcaaggaggaggccgaccagccccccagctgcggccccgaggacgacgcccagctgcagctggccctgagcctgagcagagaggagcacgacaaggaggagagaatcagaagaggcgacgacctgagactgcagatggccatcgaggagagcaagagagagaccggcggcaaggaggagagcagcctgatggacctggccgacgtgttcaccgcccccgcccccgcccccaccaccgacccctggggcggccccgcccccatggccgccgccgtgcccaccgccgcccccaccagcgacccctggggcggcccccccgtgccccccgccgccgacccctggggcggccccgcccccacccccgccagcggcgacccctggagacccgccgcccccgccggccccagcgtggacccctggggcggcacccccgcccccgccgccggcgagggccccacccccgacccctggggcagcagcgacggcggcgtgcccgtgagcggccccagcgccagcgacccctggacccccgcccccgccttcagcgacccctggggcggcagccccgccaagcccagcaccaacggcaccaccgccggcggcttcgacaccgagcccgacgagttcagcgacttcgacagactgagaaccgccctgcccaccagcggcagcagcgccggcgagctggagctgctggccggcgaggtgcccgccagaagccccggcgccttcgacatgagcggcgtgagaggcagcctggccgaggccgtgggcagccccccccccgccgccacccccacccccaccccccccaccagaaagacccccgagagcttcctgggccccaacgccgccctggtggacctggacagcctggtgagcagacccggccccaccccccccggcgccaaggccagcaaccccttcctgcccggcggcggccccgccaccggccccagcgtgaccaaccccttccagcccgccccccccgccaccctgaccctgaaccagctgagactgagccccgtgccccccgtgcccggcgccccccccacctacatcagccccctgggcggcggccccggcctgccccccatgatgccccccggcccccccgcccccaacaccaaccccttcctgctgtag

SEQ ID NO: 80547 - DNA, 1926 bp, synthetic construct
  misc_feature 1..1926: note = Description of Artificial Sequence: Synthetic coding sequence
  source 1..1926: mol_type = other DNA
atgaccaccagcagcatcagaagacagatgaagaacatcgtgaacaactacagcgaggccgagatcaaggtgagagaggccaccagcaacgacccctggggccccagcagcagcctgatgaccgagatcgccgacctgacctacaacgtggtggccttcagcgagatcatgagcatggtgtggaagagactgaacgaccacggcaagaactggagacacgtgtacaaggccctgaccctgctggactacctgatcaagaccggcagcgagagagtggcccagcagtgcagagagaacatcttcgccatccagaccctgaaggacttccagtacatcgacagagacggcaaggaccagggcatcaacgtgagagagaagagcaagcagctggtggccctgctgaaggacgaggagagactgaaggccgagagagcccaggccctgaagaccaaggagagaatggcccaggtggccaccggcatgggcagcaaccagatcaccttcggcagaggcagcagccagcccaacctgagcaccagccacagcgagcaggagtacggcaaggccggcggcagccccgccagctaccacggcagccccgaggccagcctgtgcccccagcacagaaccggcgcccccctgggccagagcgaggagctgcagcccctgagccagagacaccccttcctgccccacctgggcctggccagcagacccaacggcgactggagccagccctgcctgacctgcgacagagccgccagagccaccagccccagagtgagcagcgagctggagcaggccagaccccagaccagcggcgaggaggagctgcagctgcagctggccctggccatgagcagagaggtggccgagcaggaggagagactgagaagaggcgacgacctgagactgcagatggccctggaggagagcagaagagacaccgtgaagatccccaagaagaaggagcacggcagcctgccccagcagaccaccctgctggacctgatggacgccctgcccagcagcggccccgccgcccagaaggccgagccctggggccccagcgccagcaccaaccagaccaacccctggggcggccccgccgcccccgccagcaccagcgacccctggcccagcttcggcaccaagcccgccgccagcatcgacccctggggcgtgcccaccggcgccaccgtgcagagcgtgcccaagaacagcgacccctgggccgccagccagcagcccgccagcagcgccggcaagagagccagcgacgcctggggcgccgtgagcaccaccaagcccgtgagcgtgagcggcagcttcgagctgttcagcaacctgaacggcaccatcaaggacgacttcagcgagttcgacaacctgagaaccagcaagaagaccgccgagagcgtgaccagcctgcccagccagaacaacggcaccaccagccccgaccccttcgagagccagcccctgaccgtggccagcagcaagcccagcagcgccagaaagacccccgagagcttcctgggccccaacgccgccctggtgaacctggacagcctggtgaccagacccgccccccccgcccagagcctgaaccccttcctggcccccggcgcccccgccaccagcgcccccgtgaaccccttccaggtgaaccagccccagcccctgaccctgaaccagctgagaggcagccccgtgctgggcaccagcaccagcttcggccccggccccggcgtggagagcatggccgtggccagcatgaccagcgccgccccccagcccgccctgggcgccaccggcagcagcctgacccccctgggccccgccatgatgaacatggtgggcagcgtgggcatcccccccagcgccgcccaggccaccggcaccaccaaccccttcctgctgtag

SEQ ID NO: 80548 - DNA, 1755 bp, synthetic construct
  misc_feature 1..1755: note = Description of Artificial Sequence: Synthetic coding sequence
  source 1..1755: mol_type = other DNA
atgaccaccagcagcatcagaagacagatgaagaacatcgtgaacaactacagcgaggccgagatcaaggtgagagaggccaccagcaacgacccctggggccccagcagcagcctgatgaccgagatcgccgacctgacctacaacgtggtggccttcagcgagatcatgagcatggtgtggaagagactgaacgaccacggcaagaactggagacacgtgtacaaggccctgaccctgctggactacctgatcaagaccggcagcgagagagtggcccagcagtgcagagagaacatcttcgccatccagaccctgaaggacttccagtacatcgacagagacggcaaggaccagggcatcaacgtgagagagaagagcaagcagctggtggccctgctgaaggacgaggagagactgaaggccgagagagcccaggccctgaagaccaaggagagaatggcccaggtggccaccggcatgggcagcaaccagatcaccttcggcagaggcagcagccagcccaacctgagcaccagccacagcgagcaggagtacggcaaggccggcggcagccccgccagctaccacggcagcaccagccccagagtgagcagcgagctggagcaggccagaccccagaccagcggcgaggaggagctgcagctgcagctggccctggccatgagcagagaggtggccgagcaggaggagagactgagaagaggcgacgacctgagactgcagatggccctggaggagagcagaagagacaccgtgaagatccccaagaagaaggagcacggcagcctgccccagcagaccaccctgctggacctgatggacgccctgcccagcagcggccccgccgcccagaaggccgagccctggggccccagcgccagcaccaaccagaccaacccctggggcggccccgccgcccccgccagcaccagcgacccctggcccagcttcggcaccaagcccgccgccagcatcgacccctggggcgtgcccaccggcgccaccgtgcagagcgtgcccaagaacagcgacccctgggccgccagccagcagcccgccagcagcgccggcaagagagccagcgacgcctggggcgccgtgagcaccaccaagcccgtgagcgtgagcggcagcttcgagctgttcagcaacctgaacggcaccatcaaggacgacttcagcgagttcgacaacctgagaaccagcaagaagaccgccgagagcgtgaccagcctgcccagccagaacaacggcaccaccagccccgaccccttcgagagccagcccctgaccgtggccagcagcaagcccagcagcgccagaaagacccccgagagcttcctgggccccaacgccgccctggtgaacctggacagcctggtgaccagacccgccccccccgcccagagcctgaaccccttcctggcccccggcgcccccgccaccagcgcccccgtgaaccccttccaggtgaaccagccccagcccctgaccctgaaccagctgagaggcagccccgtgctgggcaccagcaccagcttcggccccggccccggcgtggagagcatggccgtggccagcatgaccagcgccgccccccagcccgccctgggcgccaccggcagcagcctgacccccctgggccccgccatgatgaacatggtgggcagcgtgggcatcccccccagcgccgcccaggccaccggcaccaccaaccccttcctgctgtag

SEQ ID NO: 80549 - DNA, 1071 bp, synthetic construct
  misc_feature 1..1071: note = Description of Artificial Sequence: Synthetic coding sequence
  source 1..1071: mol_type = other DNA
atgagcagagaggtggccgagcaggaggagagactgagaagaggcgacgacctgagactgcagatggccctggaggagagcagaagagacaccgtgaagatccccaagaagaaggagcacggcagcctgccccagcagaccaccctgctggacctgatggacgccctgcccagcagcggccccgccgcccagaaggccgagccctggggccccagcgccagcaccaaccagaccaacccctggggcggccccgccgcccccgccagcaccagcgacccctggcccagcttcggcaccaagcccgccgccagcatcgacccctggggcgtgcccaccggcgccaccgtgcagagcgtgcccaagaacagcgacccctgggccgccagccagcagcccgccagcagcgccggcaagagagccagcgacgcctggggcgccgtgagcaccaccaagcccgtgagcgtgagcggcagcttcgagctgttcagcaacctgaacggcaccatcaaggacgacttcagcgagttcgacaacctgagaaccagcaagaagaccgccgagagcgtgaccagcctgcccagccagaacaacggcaccaccagccccgaccccttcgagagccagcccctgaccgtggccagcagcaagcccagcagcgccagaaagacccccgagagcttcctgggccccaacgccgccctggtgaacctggacagcctggtgaccagacccgccccccccgcccagagcctgaaccccttcctggcccccggcgcccccgccaccagcgcccccgtgaaccccttccaggtgaaccagccccagcccctgaccctgaaccagctgagaggcagccccgtgctgggcaccagcaccagcttcggccccggccccggcgtggagagcatggccgtggccagcatgaccagcgccgccccccagcccgccctgggcgccaccggcagcagcctgacccccctgggccccgccatgatgaacatggtgggcagcgtgggcatcccccccagcgccgcccaggccaccggcaccaccaaccccttcctgctgtag

SEQ ID NO: 80550 - DNA, 1755 bp, synthetic construct; identical to SEQ ID NO: 80548
  misc_feature 1..1755: note = Description of Artificial Sequence: Synthetic coding sequence
  source 1..1755: mol_type = other DNA

SEQ ID NO: 80551 - DNA, 1455 bp, synthetic construct
  misc_feature 1..1455: note = Description of Artificial Sequence: Synthetic coding sequence
  source 1..1455: mol_type = other DNA
atgaccaccagcagcatcagaagacagatgaagaacatcgtgaacaactacagcgaggccgagatcaaggtgagagaggccaccagcaacgacccctggggccccagcagcagcctgatgaccgagatcgccgacctgacctacaacgtggtggccttcagcgagatcatgagcatggtgtggaagagactgaacgaccacggcaagaactggagacacgtgtacaaggccctgaccctgctggactacctgatcaagaccggcagcgagagagtggcccagcagtgcagagagaacatcttcgccatccagaccctgaaggacttccagtacatcgacagagacggcaaggaccagggcatcaacgtgagagagaagagcaagcagctggtggccctgctgaaggacgaggagagactgaaggccgagagagcccaggccctgaagaccaaggagagaatggcccaggtggccaccggcatgggcagcaaccagatcaccttcggcagaggcagcagccagcccaacctgagcaccagccacagcgagcaggagtacggcaaggccggcggcagccccgccagctaccacggcagccccgaggccagcctgtgcccccagcacagaaccggcgcccccctgggccagagcgaggagctgcagcccctgagccagagacaccccttcctgccccacctgggcctggccagcagacccaacggcgactggagccagccctgcctgacctgcgacagagccgccagagccaccagccccagagtgagcagcgagctggagcaggccagaccccagaccagcggcgaggaggagctgcagctgcagctggccctggccatgagcagagaggtggccgagcaggaggagagactgagaagaggcgacgacctgagactgcagatggccctggaggagagcagaagagacaccgtgaagatccccaagaagaaggagcacggcagcctgccccagcagaccaccctgctggacctgatggacgccctgcccagcagcggccccgccgcccagaaggccgagccctggggccccagcgccagcaccaaccagaccaacccctggggcggccccgccgcccccgccagcaccagcgacccctggcccagcttcggcaccaagcccgccgccagcatcgacccctggggcgtgcccaccggcgccaccgtgcagagcgtgcccaagaacagcgacccctgggccgccagccagcagcccgccagcagcgccggcaagagagccagcgacgcctggggcgccgtgagcaccaccaagcccgtgagcgtgagcggcagcttcgagctgttcagcaacctgaacggcaccatcaaggacgacttcagcgagttcgacaacctgagaaccagcaagaagaccggcatgcagggcctgaccggcctgctgttcaccatggagatctag

SEQ ID NO: 80552 - DNA, 1500 bp, synthetic construct
  misc_feature 1..1500: note = Description of Artificial Sequence: Synthetic coding sequence
  source 1..1500: mol_type = other DNA
atgaccaccagcagcatcagaagacagatgaagaacatcgtgaacaactacagcgaggccgagatcaaggtgagagaggccaccagcaacgacccctggggccccagcagcagcctgatgaccgagatcgccgacctgacctacaacgtggtggccttcagcgagatcatgagcatggtgtggaagagactgaacgaccacggcaagaactggagacacgtgtacaaggccctgaccctgctggactacctgatcaagaccggcagcgagagagtggcccagcagtgcagagagaacatcttcgccatccagaccctgaaggacttccagtacatcgacagagacggcaaggaccagggcatcaacgtgagagagaagagcaagcagctggtggccctgctgaaggacgaggagagactgaaggccgagagagcccaggccctgaagaccaaggagagaatggcccaggtggccaccggcatgggcagcaaccagatcaccttcggcagaggcagcagccagcccaacctgagcaccagccacagcgagcaggagtacggcaaggccggcggcagccccgccagctaccacggcagcaccagccccagagtgagcagcgagctggagcaggccagaccccagaccagcggcgaggaggagctgcagctgcagctggccctggccatgagcagagaggtggccgagcaggaggagagactgagaagaggcgacgacctgagactgcagatggccctggaggagagcagaagagacaccgtgaagatccccaagaagaaggagcacggcagcctgccccagcagaccaccctgctggacctgatggacgccctgcccagcagcggccccgccgcccagaaggccgagccctggggccccagcgccagcaccaaccagaccaacccctggggcggccccgccgcccccgccagcaccagcgacccctggcccagcttcggcaccaagcccgccgccagcatcgacccctggggcgtgcccaccggcgccaccgtgcagagcgtgcccaagaacagcgacccctgggccgccagccagcagcccgccagcagcgccggcaagagagccagcgacgcctggggcgccgtgagcaccaccaagcccgtgagcgtgagcggcagcttcgagctgttcagcaacctgaacggcaccatcaaggacgacttcagcgagttcgacaacctgagaaccagcaagaagaccgccgagagcgtgaccagcctgcccagccagaacaacggcaccaccagccccgaccccttcgagagccagcccctgaccgtggccagcagcaagcccagcagcgccagaaagacccccgagagcttcctgggccccaacgccgccctggtgaacctggacagcctggtgaccagacccgccccccccgcccagagcctgaaccccttcctggcccccggcatgcagggcctgaccggcctgctgttcaccatggagatctag

SEQ ID NO: 80553 - DNA, 1899 bp, synthetic construct
  misc_feature 1..1899: note = Description of Artificial Sequence: Synthetic coding sequence
  source 1..1899: mol_type = other DNA
atgaccaccagcgccctgagaagacaggtgaagaacatcgtgcacaactacagcgaggccgagatcaaggtgagagaggccaccagcaacgacccctggggcccccccagcagcctgatgagcgagatcgccgacctgaccttcaacaccgtggccttcaccgaggtgatgggcatgctgtggagaagactgaacgacagcggcaagaactggagacacgtgtacaaggccctgaccctgctggactacctgctgaagaccggcagcgagagagtggcccaccagtgcagagagaacctgtacaccatccagaccctgaaggacttccagtacatcgacagagacggcaaggaccagggcgtgaacgtgagagagaaggtgaagcaggtgatggccctgctgaaggacgaggagagactgagacaggagagaacccacgccctgaagaccaaggagagaatggccctggagggcatcggcatcggcagcggccagctgggcttcagcagaagatacggcgaggactacagcagaagcagaggcagccccagcagctacaacagcagcagcagcagccccagatacaccagcgacctggagcaggccagaccccagaccagcggcgaggaggagctgcagctgcagctggccctggccatgagcagagaggaggccgagaagcccgtgccccccgccagccacagagacgaggacctgcagctgcagctggccctgagactgagcagacaggagcacgagaaggaggtgagaagctggcagggcgacggcagccccatggccaacggcgccggcgccgtggtgcaccaccagagagacagagagcccgagagagaggagagaaaggaggaggagaagctgaagaccagccagagcagcatcctggacctggccgacatcttcgtgcccgccctggccccccccagcacccactgcagcgccgacccctgggacatccccggcttcagacccaacaccgaggccagcggcagcagctggggccccagcgccgacccctggagccccatccccagcggcaccgtgctgagcagaagccagccctgggacctgacccccatgctgagcagcagcgagccctggggcagaacccccgtgctgcccgccggcccccccaccaccgacccctgggccctgaacagcccccaccacaagctgcccagcaccggcgccgacccctggggcgccagcctggagaccagcgacacccccggcggcgccagcaccttcgaccccttcgccaagccccccgagagcaccgagaccaaggagggcctggagcaggccctgcccagcggcaagcccagcagccccgtggagctggacctgttcggcgaccccagccccagcagcaagcagaacggcaccaaggagcccgacgccctggacctgggcatcctgggcgaggccctgacccagcccagcaaggaggccagagcctgcagaacccccgagagcttcctgggccccagcgccagcagcctggtgaacctggacagcctggtgaaggccccccaggtggccaagaccagaaaccccttcctgaccggcctgagcgcccccagccccaccaaccccttcggcgccggcgagcccggcagacccaccctgaaccagatgagaaccggcagccccgccctgggcctggccggcggccccgtgggcgcccccctgggcagcatgacctacagcgccagcctgcccctgcccctgagcagcgtgcccgccggcctgaccctgcccgccagcgtgagcgtgttcccccaggccggcgccttcgccccccagcccctgctgcccacccccagcagcgccggccccagacccccccccccccagaccggcaccaaccccttcctgtag

SEQ ID NO: 80554 - DNA, 957 bp, synthetic construct
  misc_feature 1..957: note = Description of Artificial Sequence: Synthetic coding sequence
  source 1..957: mol_type = other DNA
atgaccaccagcgccctgagaagacaggtgaagaacatcgtgcacaactacagcgaggccgagatcaaggtgagagaggccaccagcaacgacccctggggcccccccagcagcctgatgagcgagatcgccgacctgaccttcaacaccgtggccttcaccgaggtgatgggcatgctgtggagaagactgaacgacagcggcaagaactggagacacgtgtacaaggccctgaccctgctggactacctgctgaagaccggcagcgagagagtggcccaccagtgcagagagaacctgtacaccatccagaccctgaaggacttccagtacatcgacagagacggcaaggaccagggcgtgaacgtgagagagaaggtgaagcaggtgatggccctgctgaaggacgaggagagactgagacaggagagaacccacgccctgaagaccaaggagagaatggccctggagggcatcggcatcggcagcggccagctgggcttcagcagaagatacggcgaggactacagcagaagcagaggcagccccagcagctacaacagcagcagcagcagccccagatacaccagcgacctggagcaggccagaccccagaccagcggcgaggaggagctgcagctgcagctggccctggccatgagcagagaggaggccgagaagcccgtgccccccgccagccacagagacgaggacctgcagctgcagctggccctgagactgagcagacaggagcacgagaaggaggtgagaagctggcagggcgacggcagccccatggccaacggcgccggcgccgtggtgcaccaccagagagacagagagcccgagagagaggagagaaaggaggaggagaagctgaagaccagccaggccccccccaccagcgagcccagactgcccctgcccagcaccgtgctgcaccccggcctgggctag

SEQ ID NO: 80555 - DNA, 1725 bp, synthetic construct
  misc_feature 1..1725: note = Description of Artificial Sequence: Synthetic coding sequence
  source 1..1725: mol_type = other DNA
atggccctggagaccctgcccagactgtgcagacccgccgccgcccaggtgggcggcagcccccagagactgctgggcctgggcctgggccccagagagcccgccctggagccccacgtggagcccaaggacgccgccgccctgctgaccagacagcccatcctgcaggactgcgacctggccaccgtggccctgagcccccccccccccgccggcgccagagccacccacctgcaggtgagcagccacgacgacctgagaacccccgcccccggcgaggagcacagagcccagctgctgagaggcagaaaccaggtggccttcaccgaggtgatgggcatgctgtggagaagactgaacgacagcggcaagaactggagacacgtgtacaaggccctgaccctgctggactacctgctgaagaccggcagcgagagagtggcccaccagtgcagagagaacctgtacaccatccagaccctgaaggacttccagtacatcgacagagacggcaaggaccagggcgtgaacgtgagagagaaggtgaagcaggtgatggccctgctgaaggacgaggagagactgagacaggagagaacccacgccctgaagaccaaggagagaatggccctggagggcatcggcatcggcagcggccagctgggcttcagcagaagatacggcgaggactacagcagaagcagaggcagccccagcagctacaacagcagcagcagcagccccagatacaccagcgacctggagcaggccagaccccagaccagcggcgaggaggagctgcagctgcagctggccctggccatgagcagagaggaggccgagaaggaggtgagaagctggcagggcgacggcagccccatggccaacggcgccggcgccgtggtgcaccaccagagagacagagagcccgagagagaggagagaaaggaggaggagaagctgaagaccagccagagcagcatcctggacctggccgacatcttcgtgcccgccctggccccccccagcacccactgcagcgccgacccctgggacatccccggcttcagacccaacaccgaggccagcggcagcagctggggccccagcgccgacccctggagccccatccccagcggcaccgtgctgagcagaagccagccctgggacctgacccccatgctgagcagcagcgagccctggggcagaacccccgtgctgcccgccggcccccccaccaccgacccctgggccctgaacagcccccaccacaagctgcccagcaccggcgccgacccctggggcgccagcctggagaccagcgacacccccggcggcgccagcaccttcgaccccttcgccaagccccccgagagcaccgagaccaaggagggcctggagcaggccctgcccagcggcaagcccagcagccccgtggagctggacctgttcggcgaccccagccccagcagcaagcagaacggcaccaaggagcccgacgccctggacctgggcatcctgggcgaggccctgacccagcccagcaaggaggccagagcctgcagaacccccgagagcttcctgggccccagcgccagcagcctggtgaacctggacagcctggtgaaggccccccaggtggccaagaccagaaaccccttcctgaccggcctgagcgccccccccagactgagaaccagaggctgggccggcagaagatgctag

SEQ ID NO: 80556 - DNA, 507 bp, synthetic construct
  misc_feature 1..507: note = Description of Artificial Sequence: Synthetic coding sequence
  source 1..507: mol_type = other DNA
atgaccaccagcgccctgagaagacaggtgaagaacatcgtgcacaactacagcgaggccgagatcaaggtgagagaggccaccagcaacgacccctggggcccccccagcagcctgatgagcgagatcgccgacctgaccttcaacaccgtggccttcaccgaggtgatgggcatgctgtggagaagactgaacgacagcggcaagaactggagacacgtgtacaaggccctgaccctgctggactacctgctgaagaccggcagcgagagagtggcccaccagtgcagagagaacctgtacaccatccagaccctgaaggacttccagtacatcgacagagacggcaaggaccagggcgtgaacgtgagagagaaggtgaagcaggtgatggccctgctgaaggacgaggagagactgagacaggagagaacccacgccctgaagaccaaggagagaatggccctggagggcatcggcatcggcagcggccagctgggcttctag

SEQ ID NO: 80557 - DNA, 36 bp, synthetic construct
  misc_feature 1..36: note = Description of Artificial Sequence: Synthetic coding sequence
  source 1..36: mol_type = other DNA
atgaccaccagcgccctgagaagacaggtgaagtag

SEQ ID NO: 80558 - DNA, 411 bp, synthetic construct
  misc_feature 1..411: note = Description of Artificial Sequence: Synthetic coding sequence
  source 1..411: mol_type = other DNA
atgaccaccagcgccctgagaagacaggtgaagaacatcgtgcacaactacagcgaggccgagatcaaggtgagagaggccaccagcaacgacccctggggcccccccagcagcctgatgagcgagatcgccgacctgaccttcaacaccgtggccttcaccgaggtgatgggcatgctgtggagaagactgaacgacagcggcaagaactggagacacgtgtacaaggccctgaccctgctggactacctgctgaagaccggcagcgagagagtggcccaccagtgcagagagaacctgtacaccatccagaccctgaaggacttccagtacatcgacagagacggcaaggaccagggcgtgaacgtgagagagaaggtgaagcaggtgatggccctgctgaaggactag

SEQ ID NO: 80559 - DNA, 156 bp, synthetic construct
  misc_feature 1..156: note = Description of Artificial Sequence: Synthetic coding sequence
  source 1..156: mol_type = other DNA
atgaccaccagcgccctgagaagacaggtgaagaacatcgtgcacaactacagcgaggccgagatcaaggtgagagaggccaccagcaacgacccctggggcccccccagcagcctgatgagcgagatcgccgacctgaccttcaacaccgtgtag

SEQ ID NO: 80560 - DNA, 327 bp, synthetic construct
  misc_feature 1..327: note = Description of Artificial Sequence: Synthetic coding sequence
  source 1..327: mol_type = other DNA
atgaccaccagcgccctgagaagacaggtgaagaacatcgtgcacaactacagcgaggccgagatcaaggtgagagaggccaccagcaacgacccctggggcccccccagcagcctgatgagcgagatcgccgacctgaccttcaacaccgtggccttcaccgaggtgatgggcatgctgtggagaagactgaacgacagcggcaagaactggagacacgtgtacaaggccctgaccctgctggactacctgctgaagaccggcagcgagagagtggcccaccagtgcagagagaacctgtacaccatccagaccctgaaggactag

SEQ ID NO: 80561 - DNA, 1983 bp, synthetic construct
  misc_feature 1..1983: note = Description of Artificial Sequence: Synthetic coding sequence
  source 1..1983: mol_type = other DNA
atggccctggagaccctgcccagactgtgcagacccgccgccgcccaggtgggcggcagcccccagagactgctgggcctgggcctgggccccagagagcccgccctggagccccacgtggagcccaaggacgccgccgccctgctgaccagacagcccatcctgcaggactgcgacctggccaccgtggccctgagcccccccccccccgccggcgccagagccacccacctgcaggtgagcagccacgacgacctgagaacccccgcccccggcgaggagcacagagcccagctgctgagaggcagaaaccaggtggccttcaccgaggtgatgggcatgctgtggagaagactgaacgacagcggcaagaactggagacacgtgtacaaggccctgaccctgctggactacctgctgaagaccggcagcgagagagtggcccaccagtgcagagagaacctgtacaccatccagaccctgaaggacttccagtacatcgacagagacggcaaggaccagggcgtgaacgtgagagagaaggtgaagcaggtgatggccctgctgaaggacgaggagagactgagacaggagagaacccacgccctgaagaccaaggagagaatggccctggagggcatcggcatcggcagcggccagctgggcttcagcagaagatacggcgaggactacagcagaagcagaggcagccccagcagctacaacagcagcagcagcagccccagatacaccagcgacctggagcaggccagaccccagaccagcggcgaggaggagctgcagctgcagctggccctggccatgagcagagaggaggccgagaaggaggtgagaagctggcagggcgacggcagccccatggccaacggcgccggcgccgtggtgcaccaccagagagacagagagcccgagagagaggagagaaaggaggaggagaagctgaagaccagccagagcagcatcctggacctggccgacatcttcgtgcccgccctggccccccccagcacccactgcagcgccgacccctgggacatccccggcttcagacccaacaccgaggccagcggcagcagctggggccccagcgccgacccctggagccccatccccagcggcaccgtgctgagcagaagccagccctgggacctgacccccatgctgagcagcagcgagccctggggcagaacccccgtgctgcccgccggcccccccaccaccgacccctgggccctgaacagcccccaccacaagctgcccagcaccggcgccgacccctggggcgccagcctggagaccagcgacacccccggcggcgccagcaccttcgaccccttcgccaagccccccgagagcaccgagaccaaggagggcctggagcaggccctgcccagcggcaagcccagcagccccgtggagctggacctgttcggcgaccccagccccagcagcaagcagaacggcaccaaggagcccgacgccctggacctgggcatcctgggcgaggccctgacccagcccagcaaggaggccagagcctgcagaacccccgagagcttcctgggccccagcgccagcagcctggtgaacctggacagcctggtgaaggccccccaggtggccaagaccagaaaccccttcctgaccggcctgagcgcccccagccccaccaaccccttcggcgccggcgagcccggcagacccaccctgaaccagatgagaaccggcagccccgccctgggcctggccggcggccccgtgggcgcccccctgggcagcatgacctacagcgccagcctgcccctgcccctgagcagcgtgcccgccggcctgaccctgcccgccagcgtgagcgtgttcccccaggccggcgccttcgccccccagcccctgctgcccacccccagcagcgccggccccagacccccccccccccagaccggcaccaaccccttcctgtag

SEQ ID NO: 80562 - DNA, 753 bp, synthetic construct
  misc_feature 1..753: note = Description of Artificial Sequence: Synthetic coding sequence
  source 1..753: mol_type = other DNA
atgggcatgctgtggagaagactgaacgacagcggcaagaactggagacacgtgtacaaggccctgaccctgctggactacctgctgaagaccggcagcgagagagtggcccaccagtgcagagagaacctgtacaccatccagaccctgaaggacttccagtacatcgacagagacggcaaggaccagggcgtgaacgtgagagagaaggtgaagcaggtgatggccctgctgaaggacgaggagagactgagacaggagagaacccacgccctgaagaccaaggagagaatggccctggagggcatcggcatcggcagcggccagctgggcttcagcagaagatacggcgaggactacagcagaagcagaggcagccccagcagctacaacagcagcagcagcagccccagatacaccagcgacctggagcaggccagaccccagaccagcggcgaggaggagctgcagctgcagctggccctggccatgagcagagaggaggccgagaaggaggtgagaagctggcagggcgacggcagccccatggccaacggcgccggcgccgtggtgcaccaccagagagacagagagcccgagagagaggagagaaaggaggaggagaagctgaagaccagccaggtgctgggcagaacccagagacccgtggacccccccggcggcctgctgcagacccccggcctgagaagcccccaggagcccagctgccccgaggccagccccggcatctag

SEQ ID NO: 80563 - DNA, 429 bp, synthetic construct
  misc_feature 1..429: note = Description of Artificial Sequence: Synthetic coding sequence
  source 1..429: mol_type = other DNA
atgagcctgctgcccgtgccctacaccgaggccgccagcctgagcaccggcagcaccgtgaccatcaagggcagacccctggcctgcttcctgaacgagccctacctgcaggtggacttccacaccgagatgaaggaggagagcgacatcgtgttccacttccaggtgtgcttcggcagaagagtggtgatgaacagcagagagtacggcgcctggaagcagcaggtggagagcaagaacatgcccttccaggacggccaggagttcgagctgagcatcagcgtgctgcccgacaagtaccaggtgatggtgaacggccagagcagctacaccttcgaccacagaatcaagcccgaggccgtgaagatggtgcaggtgtggagagacatcagcctgaccaagttcaacgtgagctacctgaagagatag

SEQ ID NO: 80564 - DNA, 828 bp, synthetic construct
  misc_feature 1..828: note = Description of Artificial Sequence: Synthetic coding sequence
  source 1..828: mol_type = other DNA
atgaacatgacccaggccagagtgctggtggccgccgtggtgggcctggtggccgtgctgctgtacgccagcatccacaagatcgaggagggccacctggccgtgtactacagaggcggcgccctgctgaccagccccagcggccccggctaccacatcatgctgcccttcatcaccaccttcagaagcgtgcagaccaccctgcagaccgacgaggtgaagaacgtgccctgcggcaccagcggcggcgtgatgatctacatcgacagaatcgaggtggtgaacatgctggccccctacgccgtgttcgacatcgtgagaaactacaccgccgactacgacaagaccctgatcttcaacaagatccaccacgagctgaaccagttctgcagcgcccacaccctgcaggaggtgtacatcgagctgttcgaccagatcgacgagaacctgaagcaggccctgcagaaggacctgaacctgatggcccccggcctgaccatccaggccgtgagagtgaccaagcccaagatccccgaggccatcagaagaaacttcgagctgatggaggccgagaagaccaagctgctgatcgccgcccagaagcagaaggtggtggagaaggaggccgagaccgagagaaagaaggccgtgatcgaggccgagaagatcgcccaggtggccaagatcagattccagcagaaggtgatggagaaggagaccgagaagagaatcagcgagatcgaggacgccgccttcctggccagagagaaggccaaggccgacgccgagtactacgccgcccacaagtacgccaccagcaacaagtag

SEQ ID NO: 80565 - DNA, 699 bp, synthetic construct
  misc_feature 1..699: note = Description of Artificial Sequence: Synthetic coding sequence
  source 1..699: mol_type = other DNA
atgatctacatcgacagaatcgaggtggtgaacatgctggccccctacgccgtgttcgacatcgtgagaaactacaccgccgactacgacaagaccctgatcttcaacaagatccaccacgagctgaaccagttctgcagcgcccacaccctgcaggaggtgtacatcgagctgttcgaccagatcgacgagaacctgaagcaggccctgcagaaggacctgaacctgatggcccccggcctgaccatccaggccgtgagagtgaccaagcccaagatccccgaggccatcagaagaaacttcgagctgatggaggccgagaagaccaagctgctgatcgccgcccagaagcagaaggtggtggagaaggaggccgagaccgagagaaagaaggccgtgatcgaggccgagaagatcgcccaggtggccaagatcagattccagcagaaggtgatggagaaggagaccgagaagagaatcagcgagatcgaggacgccgccttcctggccagagagaaggccaaggccgacgccgagtactacgccgcccacaagtacgccaccagcaacaagcacaagctgacccccgagtacctggagctgaagaagtaccaggccatcgccagcaacagcaagatctacttcggcagcaacatccccaacatgttcagcatcagcagatgcggccccagaggctag

SEQ ID NO: 80566 - DNA, 1047 bp, synthetic construct
  misc_feature 1..1047: note = Description of Artificial Sequence: Synthetic coding sequence
  source 1..1047: mol_type = other DNA
atgaacatgacccaggccagagtgctggtggccgccgtggtgggcctggtggccgtgctgctgtacgccagcatccacaagatcgaggagggccacctggccgtgtactacagaggcggcgccctgctgaccagccccagcggccccggctaccacatcatgctgcccttcatcaccaccttcagaagcgtgcagaccaccctgcagaccgacgaggtgaagaacgtgccctgcggcaccagcggcggcgtgatgatctacatcgacagaatcgaggtggtgaacatgctggccccctacgccgtgttcgacatcgtgagaaactacaccgccgactacgacaagaccctgatcttcaacaagatccaccacgagctgaaccagttctgcagcgcccacaccctgcaggaggtgtacatcgagctgttcgaccagatcgacgagaacctgaagcaggccctgcagaaggacctgaacctgatggcccccggcctgaccatccaggccgtgagagtgaccaagcccaagatccccgaggccatcagaagaaacttcgagctgatggaggccgagaagaccaagctgctgatcgccgcccagaagcagaaggtggtggagaaggaggccgagaccgagagaaagaaggccgtgatcgaggccgagaagatcgcccaggtggccaagatcagattccagcagaaggtgatggagaaggagaccgagaagagaatcagcgagatcgaggacgccgccttcctggccagagagaaggccaaggccgacgccgagtactacgccgcccacaagtacgccaccagcaacaagcacaagctgacccccgagtacctggagctgaagaagtaccaggccatcgccagcaacagcaagatctacttcggcagcaacatccccaacatgttcgtggacagcagctgcgccctgaagtacagcgacatcagaaccggcagagagagcagcctgcccagcaaggaggccctggagcccagcggcgagaacgtgatccagaacaaggagagcaccggctag

SEQ ID NO: 80567 - DNA, 1047 bp, synthetic construct; identical to SEQ ID NO: 80566
  misc_feature 1..1047: note = Description of Artificial Sequence: Synthetic coding sequence
  source 1..1047: mol_type = other DNA

SEQ ID NO: 80568 - DNA, 1020 bp, synthetic construct
  misc_feature 1..1020: note = Description of Artificial Sequence: Synthetic coding sequence
  source 1..1020: mol_type = other DNA
atggcccagctgggcgccgtggtggccgtggccagcagcttcttctgcgccagcctgttcagcgccgtgcacaagatcgaggagggccacatcggcgtgtactacagaggcggcgccctgctgaccagcaccagcggccccggcttccacctgatgctgcccttcatcaccagctacaagagcgtgcagaccaccctgcagaccgacgaggtgaagaacgtgccctgcggcaccagcggcggcgtgatgatctacttcgacagaatcgaggtggtgaacttcctggtgcccaacgccgtgtacgacatcgtgaagaactacaccgccgactacgacaaggccctgatcttcaacaagatccaccacgagctgaaccagttctgcagcgtgcacaccctgcaggaggtgtacatcgagctgttcgaccagatcgacgagaacctgaagctggccctgcagcaggacctgaccagcatggcccccggcctggtgatccaggccgtgagagtgaccaagcccaacatccccgaggccatcagaagaaactacgagctgatggagagcgagaagaccaagctgctgatcgccgcccagaagcagaaggtggtggagaaggaggccgagaccgagagaaagaaggccctgatcgaggccgagaaggtggcccaggtggccgagatcacctacggccagaaggtgatggagaaggagaccgagaagaagatcagcgagatcgaggacgccgccttcctggccagagagaaggccaaggccgacgccgagtgctacaccgccatgaagatcgccgaggccaacaagctgaagctgacccccgagtacctgcagctgatgaagtacaaggccatcgccagcaacagcaagatctacttcggcaaggacatccccaacatgttcatggacagcgccggcagcgtgagcaagcagttcgagggcctggccgacaagctgagcttcggcctggaggacgagcccctggagaccgccaccaaggagaactag

SEQ ID NO: 80569 - DNA, 459 bp, synthetic construct
  misc_feature 1..459: note = Description of Artificial Sequence: Synthetic coding sequence
  source 1..459: mol_type = other DNA
atggcccagctgggcgccgtggtggccgtggccagcagcttcttctgcgccagcctgttcagcgccgtgcacaagatcgaggagggccacatcggcgtgtactacagaggcggcgccctgctgaccagcaccagcggccccggcttccacctgatgctgcccttcatcaccagctacaagagcgtgcagaccaccctgcagaccgacgaggtgaagaacgtgccctgcggcaccagcggcggcgtgatgatctacttcgacagaatcgaggtggtgaacttcctggtgcccaacgccgtgtacgacatcgtgaagaactacaccgccgactacgacaaggccctgatcttcaacaagatccaccacgagctgaaccagttctgcagcgtgcacaccctgcaggaggtgtacatcgagctgttcggcctggagaacgacttcagccaggagagcagctag

SEQ ID NO: 80570 - DNA, 1020 bp, synthetic construct; identical to SEQ ID NO: 80568
  misc_feature 1..1020: note = Description of Artificial Sequence: Synthetic coding sequence
  source 1..1020: mol_type = other DNA

SEQ ID NO: 80571 - DNA, 621 bp, synthetic construct
  misc_feature 1..621: note = Description of Artificial Sequence: Synthetic coding sequence
  source 1..621: mol_type = other DNA
atggcccagctgggcgccgtggtggccgtggccagcagcttcttctgcgccagcctgttcagcgccgtgcacaagatcgaggagggccacatcggcgtgtactacagaggcggcgccctgctgaccagcaccagcggccccggcttccacctgatgctgcccttcatcaccagctacaagagcgtgcagaccaccctgcagaccgacgaggtgaagaacgtgccctgcggcaccagcggcggcgtgatgatctacttcgacagaatcgaggtggtgaacttcctggtgcccaacgccgtgtacgacatcgtgaagaactacaccgccgactacgacaaggccctgatcttcaacaagatccaccacgagctgaaccagttctgcagcgtgcacaccctgcaggaggtgtacatcgagctgttcggcaagaaggtgagccccgagcacgccgtgctgaagcagggcagctggaaccccgccagcctgcactgcctgaagcccggctgcctgcagggcgtgatggtgacctacggccaggagatgctgaagaacctggtgctgagaagctggagccagagaagcagctggagaatgctgatcgccatgcagcaggacccctag

SEQ ID NO: 80572 - DNA, 459 bp, synthetic construct; identical to SEQ ID NO: 80569
  misc_feature 1..459: note = Description of Artificial Sequence: Synthetic coding sequence
  source 1..459: mol_type = other DNA

SEQ ID NO: 80573 - DNA, 4239 bp, synthetic construct
  misc_feature 1..4239: note = Description of Artificial Sequence: Synthetic coding sequence
  source 1..4239: mol_type = other DNA
atgaccaccaagagaagcctgttcgtgagactggtgccctgcagatgcctgagaggcgaggaggagaccgtgaccaccctggactacagccactgcagcctggagcaggtgcccaaggagatcttcaccttcgagaagaccctggaggagctgtacctggacgccaaccagatcgaggagctgcccaagcagctgttcaactgccagagcctgcacaagctgagcctgcccgacaacgacctgaccaccctgcccgccagcatcgccaacctgatcaacctgagagagctggacgtgagcaagaacggcatccaggagttccccgagaacatcaagaactgcaaggtgctgaccatcgtggaggccagcgtgaaccccatcagcaagctgcccgacggcttcagccagctgctgaacctgacccagctgtacctgaacgacgccttcctggagttcctgcccgccaacttcggcagactgaccaagctgcagatcctggagctgagagagaaccagctgaagatgctgcccaagaccatgaacagactgacccagctggagagactggacctgggcagcaacgagttcaccgaggtgcccgaggtgctggagcagctgagcggcctgaaggagttctggatggacgccaacagactgaccttcatccccggcttcatcggcagcctgaagcagctgacctacctggacgtgagcaagaacaacatcgagatggtggaggagggcatcagcacctgcgagaacctgcaggacctgctgctgagcagcaacagcctgcagcagctgcccgagaccatcggcagcctgaagaacatcaccaccctgaagatcgacgagaaccagctgatgtacctgcccgacagcatcggcggcctgatcagcgtggaggagctggactgcagcttcaacgaggtggaggccctgcccagcagcatcggccagctgaccaacctgagaaccttcgccgccgaccacaactacctgcagcagctgccccccgagatcggcagctggaagaacatcaccgtgctgttcctgcacagcaacaagctggagaccctgcccgaggagatgggcgacatgcagaagctgaaggtgatcaacctgagcgacaacagactgaagaacctgcccttcagcttcaccaagctgcagcagctgaccgccatgtggctgagcgacaaccagagcaagcccctgatccccctgcagaaggagaccgacagcgagacccagaagatggtgctgaccaactacatgttcccccagcagcccagaaccgaggacgtgatgttcatcagcgacaacgagagcttcaaccccagcctgtgggaggagcagagaaagcagagagcccaggtggccttcgagtgcgacgaggacaaggacgagagagaggccccccccagagagggcaacctgaagagataccccaccccctaccccgacgagctgaagaacatggtgaagaccgtgcagaccatcgtgcacagactgaaggacgaggagaccaacgaggacagcggcagagacctgaagccccacgaggaccagcaggacatcaacaaggacgtgggcgtgaagaccagcgagagcaccaccaccgtgaagagcaaggtggacgagagagagaagtacatgatcggcaacagcgtgcagaagatcagcgagcccgaggccgagatcagccccggcagcctgcccgtgaccgccaacatgaaggccagcgagaacctgaagcacatcgtgaaccacgacgacgtgttcgaggagagcgaggagctgagcagcgacgaggagatgaagatggccgagatgagaccccccctgatcgagaccagcatcaaccagcccaaggtggtggccctgagcaacaacaagaaggacgacaccaaggagaccgacagcctgagcgacgaggtgacccacaacagcaaccagaacaacagcaactgcagcagccccagcagaatgagcgacagcgtgagcctgaacaccgacagcagccaggacaccagcctgtgcagccccgtgaagcagacccacatcgacatcaacagcaagatcagacaggaggacgagaacttcaacagcctgctgcagaacggcgacatcctgaacagcagcaccgaggagaagttcaaggcccacgacaagaaggacttcaacctgcccgagtacgacctgaacgtggaggagagactggtgctgatcgagaagagcgtggacagcaccgccaccgccgacgacacccacaagctggaccacatcaacatgaacctgaacaagctgatcaccaacgacaccttccagcccgagatcatggagagaagcaagacccaggacatcgtgctgggcaccagcttcctgagcatcaacagcaaggaggagaccgagcacctggagaacggcaacaagtaccccaacctggagagcgtgaacaaggtgaacggccacagcgaggagaccagccagagccccaacagaaccgagccccacgacagcgactgcagcgtggacctgggcatcagcaagagcaccgaggacctgagcccccagaagagcggccccgtgggcagcgtggtgaagagccacagcatcaccaacatggagatcggcggcctgaagatctacgacatcctgagcgacaacggcccccagcagcccagcaccaccgtgaagatcaccagcgccgtggacggcaagaacatcgtgagaagcaagagcgccaccctgctgtacgaccagcccctgcaggtgttcaccggcagcagcagcagcagcgacctgatcagcggcaccaaggccatcttcaagttcgacagcaaccacaaccccgaggagcccaacatcatcagaggccccaccagcggcccccagagcgccccccagatctacggccccccccagtacaacatccagtacagcagcagcgccgccgtgaaggacaccctgtggcacagcaagcagaacccccagatcgaccacgccagcttccccccccagctgctgcccagaagcgagagcaccgagaaccagagctacgccaagcacagcgccaacatgaacttcagcaaccacaacaacgtgagagccaacaccgcctaccacctgcaccagagactgggccccgccagacacggcgagatgtgggccatcagccccaacgacagactgatccccgccgtgaccagaagcaccatccagagacagagcagcgtgagcagcaccgccagcgtgaacctgggcgaccccggcagcaccagaagagcccagatccccgagggcgactacctgagctacagagagttccacagcgccggcagaaccccccccatgatgcccggcagccagagacccctgagcgccagaacctacagcatcgacggccccaacgccagcagaccccagagcgccagacccagcatcaacgagatccccgagagaaccatgagcgtgagcgacttcaactacagcagaaccagccccagcaagagacccaacgccagagtgggcagcgagcacagcctgctggacccccccggcaagagcaaggtgcccagagactggagagagcaggtgctgagacacatcgaggccaagaagctggagaagaagcacccccagaccagcagcagcggcgacccctgccaggacggcatcttcatcagcggccagcagaactacagcagcgccaccctgagccacaaggacgtgccccccgacagcctgatgaagatgcccctgagcaacggccagatgggccagcccctgagaccccaggccaactacagccagatccaccaccccccccaggccagcgtggccagacaccccagcagagagcagctgatcgactacctgatgctgaaggtggcccaccagcccccctacacccagccccactgcagccccagacagggccacgagctggccaagcaggagatcagagtgagagtggagaaggaccccgagctgggcttcagcatcagcggcggcgtgggcggcagaggcaaccccttcagacccgacgacgacggcatcttcgtgaccagagtgcagcccgagggccccgccagcaagctgctgcagcccggcgacaagatcatccaggccaacggctacagcttcatcaacatcgagcacggccaggccgtgagcctgctgaagaccttccagaacaccgtggagctgatcatcgtgagagaggtgagcagctag

SEQ ID NO: 80574 - DNA, 3909 bp, synthetic construct
  misc_feature 1..3909: note = Description of Artificial Sequence: Synthetic coding sequence
  source 1..3909: mol_type = other DNA
atgaccaccaagagaagcctgttcgtgagactggtgccctgcagatgcctgagaggcgaggaggagaccgtgaccaccctggactacagccactgcagcctggagcaggtgcccaaggagatcttcaccttcgagaagaccctggaggagctgtacctggacgccaaccagatcgaggagctgcccaagcagctgttcaactgccagagcctgcacaagctgagcctgcccgacaacgacctgaccaccctgcccgccagcatcgccaacctgatcaacctgagagagctggacgtgagcaagaacggcatccaggagttccccgagaacatcaagaactgcaaggtgctgaccatcgtggaggccagcgtgaaccccatcagcaagctgcccgacggcttcagccagctgctgaacctgacccagctgtacctgaacgacgccttcctggagttcctgcccgccaacttcggcagactgaccaagctgcagatcctggagctgagagagaaccagctgaagatgctgcccaagaccatgaacagactgacccagctggagagactggacctgggcagcaacgagttcaccgaggtgcccgaggtgctggagcagctgagcggcctgaaggagttctggatggacgccaacagactgaccttcatccccggcttcatcggcagcctgaagcagctgacctacctggacgtgagcaagaacaacatcgagatggtggaggagggcatcagcacctgcgagaacctgcaggacctgctgctgagcagcaacagcctgcagcagctgcccgagaccatcggcagcctgaagaacatcaccaccctgaagatcgacgagaaccagctgatgtacctgcccgacagcatcggcggcctgatcagcgtggaggagctggactgcagcttcaacgaggtggaggccctgcccagcagcatcggccagctgaccaacctgagaaccttcgccgccgaccacaactacctgcagcagctgccccccgagatcggcagctggaagaacatcaccgtgctgttcctgcacagcaacaagctggagaccctgcccgaggagatgggcgacatgcagaagctgaaggtgatcaacctgagcgacaacagactgaagaacctgcccttcagcttcaccaagctgcagcagctgaccgccatgtggctgagcgacaaccagagcaagcccctgatccccctgcagaaggagaccgacagcgagacccagaagatggtgctgaccaactacatgttcccccagcagcccagaaccgaggacgtgatgttcatcagcgacaacgagagcttcaaccccagcctgtgggaggagcagagaaagcagagagcccaggtggccttcgagtgcgacgaggacaaggacgagagagaggccccccccagagagggcaacctgaagagataccccaccccctaccccgacgagctgaagaacatggtgaagaccgtgcagaccatcgtgcacagactgaaggacgaggagaccaacgaggacagcggcagagacctgaagccccacgaggaccagcaggacatcaacaaggacgtgggcgtgaagaccagcgagagcaccaccaccgtgaagagcaaggtggacgagagagagaagtacatgatcggcaacagcgtgcagaagatcagcgagcccgaggccgagatcagccccggcagcctgcccgtgaccgccaacatgaaggccagcgagaacctgaagcacatcgtgaaccacgacgacgtgttcgaggagagcgaggagctgagcagcgacgaggagatgaagatggccgagatgagaccccccctgatcgagaccagcatcaaccagcccaaggtggtggccctgagcaacaacaagaaggacgacaccaaggagaccgacagcctgagcgacgaggtgacccacaacagcaaccagaacaacagcaactgcagcagccccagcagaatgagcgacagcgtgagcctgaacaccgacagcagccaggacaccagcctgtgcagccccgtgaagcagacccacatcgacatcaacagcaagatcagacaggaggacgagaacttcaacagcctgctgcagaacggcgacatcctgaacagcagcaccgaggagaagttcaaggcccacgacaagaaggacttcaacctgcccgagtacgacctgaacgtggaggagagactggtgctgatcgagaagagcgtggacagcaccgccaccgccgacgacacccacaagctggaccacatcaacatgaacctgaacaagctgatcaccaacgacaccttccagcccgagatcatggagagaagcaagacccaggacatcgtgctgggcaccagcttcctgagcatcaacagcaaggaggagaccgagcacctggagaacggcaacaagtaccccaacctggagagcgtgaacaaggtgaacggccacagcgaggagaccagccagagccccaacagaaccgagccccacgacagcgactgcagcgtggacctgggcatcagcaagagcaccgaggacctgagcccccagaagagcggccccgtgggcagcgtggtgaagagccacagcatcaccaacatggagatcggcggcctgaagatctacgacatcctgagcgacaacggcccccagcagcccagcaccaccgtgaagatcaccagcgccgtggacggcaagaacatcgtgagaagcaagagcgccaccctgctgtacgaccagcccctgcaggtgttcaccggcagcagcagcagcagcgacctgatcagcggcaccaaggccatcttcaagttcgacagcaaccacaaccccgaggagcccaacatcatcagaggccccaccagcggcccccagagcgccccccagatctacggccccccccagtacaacatccagtacagcagcagcgccgccgtgaaggacaccctgtggcacagcaagcagaacccccagatcgaccacgccagcttccccccccagctgctgcccagaagcgagagcaccgagaaccagagctacgccaagcacagcgccaacatgaacttcagcaaccacaacaacgtgagagccaacaccgcctaccacctgcaccagagactgggccccgccagacacggcgagatgtgggccatcagccccaacgacagactgatccccgccgtgaccagaagcaccatccagagacagagcagcgtgagcagcaccgccagcgtgaacctgggcgaccccggcagcaccagaagagcccagatccccgagggcgactacctgagctacagagagttccacagcgccggcagaaccccccccatgatgcccggcagccagagacccctgagcgccagaacctacagcatcgacggccccaacgccagcagaccccagagcgccagacccagcatcaacgagatccccgagagaaccatgagcgtgagcgacttcaactacagcagaaccagccccagcaagagacccaacgccagagtgggcagcgagcacagcctgctggacccccccggcaagagcaaggtgcccagagactggagagagcaggtgctgagacacatcgaggccaagaagctggagaagatcagagtgagagtggagaaggaccccgagctgggcttcagcatcagcggcggcgtgggcggcagaggcaaccccttcagacccgacgacgacggcatcttcgtgaccagagtgcagcccgagggccccgccagcaagctgctgcagcccggcgacaagatcatccaggccaacggctacagcttcatcaacatcgagcacggccaggccgtgagcctgctgaagaccttccagaacaccgtggagctgatcatcgtgagagaggtgagcagctag

SEQ ID NO: 80575 - DNA, 4023 bp, synthetic construct
  misc_feature 1..4023: note = Description of Artificial Sequence: Synthetic coding sequence
  source 1..4023: mol_type = other DNA
atgaccaccaagagaagcctgttcgtgagactggtgccctgcagatgcctgagaggcgaggaggagaccgtgaccaccctggactacagccactgcagcctggagcaggtgcccaaggagatcttcaccttcgagaagaccctggaggagctgtacctggacgccaaccagatcgaggagctgcccaagcagctgttcaactgccagagcctgcacaagctgagcctgcccgacaacgacctgaccaccctgcccgccagcatcgccaacctgatcaacctgagagagctggacgtgagcaagaacggcatccaggagttccccgagaacatcaagaactgcaaggtgctgaccatcgtggaggccagcgtgaaccccatcagcaagctgcccgacggcttcagccagctgctgaacctgacccagctgtacctgaacgacgccttcctggagttcctgcccgccaacttcggcagactgaccaagctgcagatcctggagctgagagagaaccagctgaagatgctgcccaagaccatgaacagactgacccagctggagagactggacctgggcagcaacgagttcaccgaggtgcccgaggtgctggagcagctgagcggcctgaaggagttctggatggacgccaacagactgaccttcatccccggcttcatcggcagcctgaagcagctgacctacctggacgtgagcaagaacaacatcgagatggtggaggagggcatcagcacctgcgagaacctgcaggacctgctgctgagcagcaacagcctgcagcagctgcccgagaccatcggcagcctgaagaacatcaccaccctgaagatcgacgagaaccagctgatgtacctgcccgacagcatcggcggcctgatcagcgtggaggagctggactgcagcttcaacgaggtggaggccctgcccagcagcatcggccagctgaccaacctgagaaccttcgccgccgaccacaactacctgcagcagctgccccccgagatcggcagctggaagaacatcaccgtgctgttcctgcacagcaacaagctggagaccctgcccgaggagatgggcgacatgcagaagctgaaggtgatcaacctgagcgacaacagactgaagaacctgcccttcagcttcaccaagctgcagcagctgaccgccatgtggctgagcgacaaccagagcaagcccctgatccccctgcagaaggagaccgacagcgagacccagaagatggtgctgaccaactacatgttcccccagcagcccagaaccgaggacgtgatgttcatcagcgacaacgagagcttcaaccccagcctgtgggaggagcagagaaagcagagagcccaggtggccttcgagtgcgacgaggacaaggacgagagagaggccccccccagagagggcaacctgaagagataccccaccccctaccccgacgagctgaagaacatggtgaagaccgtgcagaccatcgtgcacagactgaaggacgaggagaccaacgaggacagcggcagagacctgaagccccacgaggaccagcaggacatcaacaaggacgtgggcgtgaagaccagcgagagcaccaccaccgtgaagagcaaggtggacgagagagagaagtacatgatcggcaacagcgtgcagaagatcagcgagcccgaggccgagatcagccccggcagcctgcccgtgaccgccaacatgaaggccagcgagaacctgaagcacatcgtgaaccacgacgacgtgttcgaggagagcgaggagctgagcagcgacgaggagatgaagatggccgagatgagaccccccctgatcgagaccagcatcaaccagcccaaggtggtggccctgagcaacaacaagaaggacgacaccaaggagaccgacagcctgagcgacgaggtgacccacaacagcaaccagaacaacagcaactgcagcagccccagcagaatgagcgacagcgtgagcctgaacaccgacagcagccaggacaccagcctgtgcagccccgtgaagcagacccacatcgacatcaacagcaagatcagacaggaggacgagaacttcaacagcctgctgcagaacggcgacatcctgaacagcagcaccgaggagaagttcaaggcccacgacaagaaggacttcaacctgcccgagtacgacctgaacgtggaggagagactggtgctgatcgagaagagcgtggacagcaccgccaccgccgacgacacccacaagctggaccacatcaacatgaacctgaacaagctgatcaccaacgacaccttccagcccgagatcatggagagaagcaagacccaggacatcgtgctgggcaccagcttcctgagcatcaacagcaaggaggagaccgagcacctggagaacggcaacaagtaccccaacctggagagcgtgaacaaggtgaacggccacagcgaggagaccagccagagccccaacagaaccgagccccacgacagcgactgcagcgtggacctgggcatcagcaagagcaccgaggacctgagcccccagaagagcggccccgtgggcagcgtggtgaagagccacagcatcaccaacatggagatcggcggcctgaagatctacgacatcctgagcgacaacggcccccagcagcccagcaccaccgtgaagatcaccagcgccgtggacggcaagaacatcgtgagaagcaagagcgccaccctgctgtacgaccagcccctgcaggtgttcaccggcagcagcagcagcagcgacctgatcagcggcaccaaggccatcttcaagttcgacagcaaccacaaccccgaggagcccaacatcatcagaggccccaccagcggcccccagagcgccccccagatctacggccccccccagtacaacatccagtacagcagcagcgccgccgtgaaggacaccctgtggcacagcaagcagaacccccagatcgaccacgccagcttccccccccagctgctgcccagaagcgagagcaccgagaaccagagctacgccaagcacagcgccaacatgaacttcagcaaccacaacaacgtgagagccaacaccgcctaccacctgcaccagagactgggccccgccagacacggcgagatgtgggccatcagccccaacgacagactgatccccgccgtgaccagaagcaccatccagagacagagcagcgtgagcagcaccgccagcgtgaacctgggcgaccccggcagcaccagaagagcccagatccccgagggcgactacctgagctacagagagttccacagcgccggcagaaccccccccatgatgcccggcagccagagacccctgagcgccagaacctacagcatcgacggccccaacgccagcagaccccagagcgccagacccagcatcaacgagatccccgagagaaccatgagcgtgagcgacttcaactacagcagaaccagccccagcaagagacccaacgccagagtgggcagcgagcacagcctgctggacccccccggcaagagcaaggtgcccagagactggagagagcaggtgctgagacacatcgaggccaagaagctggagaagatgcccctgagcaacggccagatgggccagcccctgagaccccaggccaactacagccagatccaccaccccccccaggccagcgtggccagacaccccagcagagagcagctgatcgactacctgatgctgaaggtggcccaccagcccccctacacccagccccactgcagccccagacagggccacgagctggccaagcaggagggcatcttcgtgaccagagtgcagcccgagggccccgccagcaagctgctgcagcccggcgacaagatcatccaggccaacggctacagcttcatcaacatcgagcacggccaggccgtgagcctgctgaagaccttccagaacaccgtggagctgatcatcgtgagagaggtgagcagctag

SEQ ID NO: 80576 - DNA, 4041 bp, synthetic construct
  misc_feature 1..4041: note = Description of Artificial Sequence: Synthetic coding sequence
  source 1..4041: mol_type = other DNA
atgaccaccaagagaagcctgttcgtgagactggtgccctgcagatgcctgagaggcgaggaggagaccgtgaccaccctggactacagccactgcagcctggagcaggtgcccaaggagatcttcaccttcgagaagaccctggaggagctgtacctggacgccaaccagatcgaggagctgcccaagcagctgttcaactgccagagcctgcacaagctgagcctgcccgacaacgacctgaccaccctgcccgccagcatcgccaacctgatcaacctgagagagctggacgtgagcaagaacggcatccaggagttccccgagaacatcaagaactgcaaggtgctgaccatcgtggaggccagcgtgaaccccatcagcaagctgcccgacggcttcagccagctgctgaacctgacccagctgtacctgaacgacgccttcctggagttcctgcccgccaacttcggcagactgaccaagctgcagatcctggagctgagagagaaccagctgaagatgctgcccaagaccatgaacagactgacccagctggagagactggacctgggcagcaacgagttcaccgaggtgcccgaggtgctggagcagctgagcggcctgaaggagttctggatggacgccaacagactgaccttcatccccggcttcatcggcagcctgaagcagctgacctacctggacgtgagcaagaacaacatcgagatggtggaggagggcatcagcacctgcgagaacctgcaggacctgctgctgagcagcaacagcctgcagcagctgcccgagaccatcggcagcctgaagaacatcaccaccctgaagatcgacgagaaccagctgatgtacctgcccgacagcatcggcggcctgatcagcgtggaggagctggactgcagcttcaacgaggtggaggccctgcccagcagcatcggccagctgaccaacctgagaaccttcgccgccgaccacaactacctgcagcagctgccccccgagatcggcagctggaagaacatcaccgtgctgttcctgcacagcaacaagctggagaccctgcccgaggagatgggcgacatgcagaagctgaaggtgatcaacctgagcgacaacagactgaagaacctgcccttcagcttcaccaagctgcagcagctgaccgccatgtggctgagcgacaaccagagcaagcccctgatccccctgcagaaggagaccgacagcgagacccagaagatggtgctgaccaactacatgttcccccagcagcccagaaccgaggacgtgatgttcatcagcgacaacgagagcttcaaccccagcctgtgggaggagcagagaaagcagagagcccaggtggccttcgagtgcgacgaggacaaggacgagagagaggccccccccagagagggcaacctgaagagataccccaccccctaccccgacgagctgaagaacatggtgaagaccgtgcagaccatcgtgcacagactgaaggacgaggagaccaacgaggacagcggcagagacctgaagccccacgaggaccagcaggacatcaacaaggacgtgggcgtgaagaccagcgagagcaccaccaccgtgaagagcaaggtggacgagagagagaagtacatgatcggcaacagcgtgcagaagatcagcgagcccgaggccgagatcagccccggcagcctgcccgtgaccgccaacatgaaggccagcgagaacctgaagcacatcgtgaaccacgacgacgtgttcgaggagagcgaggagctgagcagcgacgaggagatgaagatggccgagatgagaccccccctgatcgagaccagcatcaaccagcccaaggtggtggccctgagcaacaacaagaaggacgacaccaaggagaccgacagcctgagcgacgaggtgacccacaacagcaaccagaacaacagcaactgcagcagccccagcagaatgagcgacagcgtgagcctgaacaccgacagcagccaggacaccagcctgtgcagccccgtgaagcagacccacatcgacatcaacagcaagatcagacaggaggacgagaacttcaacagcctgctgcagaacggcgacatcctgaacagcagcaccgaggagaagttcaaggcccacgacaagaaggacttcaacctgcccgagtacgacctgaacgtggaggagagactggtgctgatcgagaagagcgtggacagcaccgccaccgccgacgacacccacaagctggaccacatcaacatgaacctgaacaagctgatcaccaacgacaccttccagcccgagatcatggagagaagcaagacccaggacatcgtgctgggcaccagcttcctgagcatcaacagcaaggaggagaccgagcacctggagaacggcaacaagtaccccaacctggagagcgtgaacaaggtgaacggccacagcgaggagaccagccagagccccaacagaaccgagccccacgacagcgactgcagcgtggacctgggcatcagcaagagcaccgaggacctgagcccccagaagagcggccccgtgggcagcgtggtgaagagccacagcatcaccaacatggagatcggcggcctgaagatctacgacatcctgagcgacaacggcccccagcagcccagcaccaccgtgaagatcaccagcgccgtggacggcaagaacatcgtgagaagcaagagcgccaccctgctgtacgaccagcccctgcaggtgttcaccggcagcagcagcagcagcgacctgatcagcggcaccaaggccatcttcaagttcgacagcaaccacaaccccgaggagcccaacatcatcagaggccccaccagcggcccccagagcgccccccagatctacggccccccccagtacaacatccagtacagcagcagcgccgccgtgaaggacaccctgtggcacagcaagcagaacccccagatcgaccacgccagcttccccccccagctgctgcccagaagcgagagcaccgagaaccagagctacgccaagcacagcgccaacatgaacttcagcaaccacaacaacgtgagagccaacaccgcctaccacctgcaccagagactgggccccgccagacacggcgagatgtgggccatcagccccaacgacagactgatccccgccgtgaccagaagcaccatccagagacagagcagcgtgagcagcaccgccagcgtgaacctgggcgaccccggcagcaccagaagagcccagatccccgagggcgactacctgagctacagagagttccacagcgccggcagaaccccccccatgatgcccggcagccagagacccctgagcgccagaacctacagcatcgacggccccaacgccagcagaccccagagcgccagacccagcatcaacgagatccccgagagaaccatgagcgtgagcgacttcaactacagcagaaccagccccagcaagagacccaacgccagagtgggcagcgagcacagcctgctggacccccccggcaagagcaaggtgcccagagactggagagagcaggtgctgagacacatcgaggccaagaagctggagaagatgcccctgagcaacggccagatgggccagcccctgagaccccaggccaactacagccagatccaccaccccccccaggccagcgtggccagacaccccagcagagagcagctgatcgactacctgatgctgaaggtggcccaccagcccccctacacccagccccactgcagccccagacagggccacgagctggccaagcaggagatcagagtgagagtggagaaggaccccgagctgggcttcagcatcagcggcggcgtgggcggcagaggcaaccccttcagacccgacgacgacgccaacggctacagcttcatcaacatcgagcacggccaggccgtgagcctgctgaagaccttccagaacaccgtggagctgatcatcgtgagagaggtgagcagctag

SEQ ID NO: 80577 - DNA, 4083 bp, synthetic construct
  misc_feature 1..4083: note = Description of Artificial Sequence: Synthetic coding sequence
  source 1..4083: mol_type = other DNA
atgaccaccaagagaagcctgttcgtgagactggtgccctgcagatgcctgagaggcgaggaggagaccgtgaccaccctggactacagccactgcagcctggagcaggtgcccaaggagatcttcaccttcgagaagaccctggaggagctgtacctggacgccaaccagatcgaggagctgcccaagcagctgttcaactgccagagcctgcacaagctgagcctgcccgacaacgacctgaccaccctgcccgccagcatcgccaacctgatcaacctgagagagctggacgtgagcaagaacggcatccaggagttccccgagaacatcaagaactgcaaggtgctgaccatcgtggaggccagcgtgaaccccatcagcaagctgcccgacggcttcagccagctgctgaacctgacccagctgtacctgaacgacgccttcctggagttcctgcccgccaacttcggcagactgaccaagctgcagatcctggagctgagagagaaccagctgaagatgctgcccaagaccatgaacagactgacccagctggagagactggacctgggcagcaacgagttcaccgaggtgcccgaggtgctggagcagctgagcggcctgaaggagttctggatggacgccaacagactgaccttcatccccggcttcatcggcagcctgaagcagctgacctacctggacgtgagcaagaacaacatcgagatggtggaggagggcatcagcacctgcgagaacctgcaggacctgctgctgagcagcaacagcctgcagcagctgcccgagaccatcggcagcctgaagaacatcaccaccctgaagatcgacgagaaccagctgatgtacctgcccgacagcatcggcggcctgatcagcgtggaggagctggactgcagcttcaacgaggtggaggccctgcccagcagcatcggccagctgaccaacctgagaaccttcgccgccgaccacaactacctgcagcagctgccccccgagatcggcagctggaagaacatcaccgtgctgttcctgcacagcaacaagctggagaccctgcccgaggagatgggcgacatgcagaagctgaaggtgatcaacctgagcgacaacagactgaagaacctgcccttcagcttcaccaagctgcagcagctgaccgccatgtggctgagcgacaaccagagcaagcccctgatccccctgcagaaggagaccgacagcgagacccagaagatggtgctgaccaactacatgttcccccagcagcccagaaccgaggacgtgatgttcatcagcgacaacgagagcttcaaccccagcctgtgggaggagcagagaaagcagagagcccaggtggccttcgagtgcgacgaggacaaggacgagagagaggccccccccagagagggcaacctgaagagataccccaccccctaccccgacgagctgaagaacatggtgaagaccgtgcagaccatcgtgcacagactgaaggacgaggagaccaacgaggacagcggcagagacctgaagccccacgaggaccagcaggacatcaacaaggacgtgggcgtgaagaccagcgagagcaccaccaccgtgaagagcaaggtggacgagagagagaagtacatgatcggcaacagcgtgcagaagatcagcgagcccgaggccgagatcagccccggcagcctgcccgtgaccgccaacatgaaggccagcgagaacctgaagcacatcgtgaaccacgacgacgtgttcgaggagagcgaggagctgagcagcgacgaggagatgaagatggccgagatgagaccccccctgatcgagaccagcatcaaccagcccaaggtggtggccctgagcaacaacaagaaggacgacaccaaggagaccgacagcctgagcgacgaggtgacccacaacagcaaccagaacaacagcaactgcagcagccccagcagaatgagcgacagcgtgagcctgaacaccgacagcagccaggacaccagcctgtgcagccccgtgaagcagacccacatcgacatcaacagcaagatcagacaggaggacgagaacttcaacagcctgctgcagaacggcgacatcctgaacagcagcaccgaggagaagttcaaggcccacgacaagaaggacttcaacctgcccgagtacgacctgaacgtggaggagagactggtgctgatcgagaagagcgtggacagcaccgccaccgccgacgacacccacaagctggaccacatcaacatgaacctgaacaagctgatcaccaacgacaccttccagcccgagatcatggagagaagcaagacccaggacatcgtgctgggcaccagcttcctgagcatcaacagcaaggaggagaccgagcacctggagaacggcaacaagtaccccaacctggagagcgtgaacaaggtgaacggccacagcgaggagaccagccagagccccaacagaaccgagccccacgacagcgactgcagcgtggacctgggcatcagcaagagcaccgaggacctgagcccccagaagagcggccccgtgggcagcgtggtgaagagccacagcatcaccaacatggagatcggcggcctgaagatctacgacatcctgagcgacaacggcccccagcagcccagcaccaccgtgaagatcaccagcgccgtggacggcaagaacatcgtgagaagcaagagcgccaccctgctgtacgaccagcccctgcaggtgttcaccggcagcagcagcagcagcgacctgatcagcggcaccaaggccatcttcaagttcgacagcaaccacaaccccgaggagcccaacatcatcagaggccccaccagcggcccccagagcgccccccagatctacggccccccccagtacaacatccagtacagcagcagcgccgccgtgaaggacaccctgtggcacagcaagcagaacccccagatcgaccacgccagcttccccccccagctgctgcccagaagcgagagcaccgagaaccagagctacgccaagcacagcgccaacatgaacttcagcaaccacaacaacgtgagagccaacaccgcctaccacctgcaccagagactgggccccgccagacacggcgagatgtgggccatcagccccaacgacagactgatccccgccgtgaccagaagcaccatccagagacagagcagcgtgagcagcaccgccagcgtgaacctgggcgaccccggcagcaccagaagagcccagatccccgagggcgactacctgagctacagagagttccacagcgccggcagaaccccccccatgatgcccggcagccagagacccctgagcgccagaacctacagcatcgacggccccaacgccagcagaccccagagcgccagacccagcatcaacgagatccccgagagaaccatgagcgtgagcgacttcaactacagcagaaccagccccagcaagagacccaacgccagagtgggcagcgagcacagcctgctggacccccccggcaagagcaaggtgcccagagactggagagagcaggtgctgagacacatcgaggccaagaagctggagaagatgcccctgagcaacggccagatgggccagcccctgagaccccaggccagcgtggccagacaccccagcagagagcagctgatcgactacctgatgctgaaggtggcccaccagcccccctacacccagccccactgcagccccagacagggccacgagctggccaagcaggagatcagagtgagagtggagaaggaccccgagctgggcttcagcatcagcggcggcgtgggcggcagaggcaaccccttcagacccgacgacgacggcatcttcgtgaccagagtgcagcccgagggccccgccagcaagctgctgcagcccggcgacaagatcatccaggccaacggctacagcttcatcaacatcgagcacggccaggccgtgagcctgctgaagaccttccagaacaccgtggagctgatcatcgtgagagaggtgagcagctag

SEQ ID NO: 80578 - DNA, 4116 bp, synthetic construct
  misc_feature 1..4116: note = Description of Artificial Sequence: Synthetic coding sequence
  source 1..4116: mol_type = other DNA
atgaccaccaagagaagcctgttcgtgagactggtgccctgcagatgcctgagaggcgaggaggagaccgtgaccaccctggactacagccactgcagcctggagcaggtgcccaaggagatcttcaccttcgagaagaccctggaggagctgtacctggacgccaaccagatcgaggagctgcccaagcagctgttcaactgccagagcctgcacaagctgagcctgcccgacaacgacctgaccaccctgcccgccagcatcgccaacctgatcaacctgagagagctggacgtgagcaagaacggcatccaggagttccccgagaacatcaagaactgcaaggtgctgaccatcgtggaggccagcgtgaaccccatcagcaagctgcccgacggcttcagccagctgctgaacctgacccagctgtacctgaacgacgccttcctggagttcctgcccgccaacttcggcagactgaccaagctgcagatcctggagctgagagagaaccagctgaagatgctgcccaagaccatgaacagactgacccagctggagagactggacctgggcagcaacgagttcaccgaggtgcccgaggtgctggagcagctgagcggcctgaaggagttctggatggacgccaacagactgaccttcatccccggcttcatcggcagcctgaagcagctgacctacctggacgtgagcaagaacaacatcgagatggtggaggagggcatcagcacctgcgagaacctgcaggacctgctgctgagcagcaacagcctgcagcagctgcccgagaccatcggcagcctgaagaacatcaccaccctgaagatcgacgagaaccagctgatgtacctgcccgacagcatcggcggcctgatcagcgtggaggagctggactgcagcttcaacgaggtggaggccctgcccagcagcatcggccagctgaccaacctgagaaccttcgccgccgaccacaactacctgcagcagctgccccccgagatcggcagctggaagaacatcaccgtgctgttcctgcacagcaacaagctggagaccctgcccgaggagatgggcgacatgcagaagctgaaggtgatcaacctgagcgacaacagactgaagaacctgcccttcagcttcaccaagctgcagcagctgaccgccatgtggctgagcgacaaccagagcaagcccctgatccccctgcagaaggagaccgacagcgagacccagaagatggtgctgaccaactacatgttcccccagcagcccagaaccgaggacgtgatgttcatcagcgacaacgagagcttcaaccccagcctgtgggaggagcagagaaagcagagagcccaggtggccttcgagtgcgacgaggacaaggacgagagagaggccccccccagagagggcaacctgaagagataccccaccccctaccccgacgagctgaagaacatggtgaagaccgtgcagaccatcgtgcacagactgaaggacgaggagaccaacgaggacagcggcagagacctgaagccccacgaggaccagcaggacatcaacaaggacgtgggcgtgaagaccagcgagagcaccaccaccgtgaagagcaaggtggacgagagagagaagtacatgatcggcaacagcgtgcagaagatcagcgagcccgaggccgagatcagccccggcagcctgcccgtgaccgccaacatgaaggccagcgagaacctgaagcacatcgtgaaccacgacgacgtgttcgaggagagcgaggagctgagcagcgacgaggagatgaagatggccgagatgagaccccccctgatcgagaccagcatcaaccagcccaaggtggtggccctgagcaacaacaagaaggacgacaccaaggagaccgacagcctgagcgacgaggtgacccacaacagcaaccagaacaacagcaactgcagcagccccagcagaatgagcgacagcgtgagcctgaacaccgacagcagccaggacaccagcctgtgcagccccgtgaagcagacccacatcgacatcaacagcaagatcagacaggaggacgagaacttcaacagcctgctgcagaacggcgacatcctgaacagcagcaccgaggagaagttcaaggcccacgacaagaaggacttcaacctgcccgagtacgacctgaacgtggaggagagactggtgctgatcgagaagagcgtggacagcaccgccaccgccgacgacacccacaagctggaccacatcaacatgaacctgaacaagctgatcaccaacgacaccttccagcccgagatcatggagagaagcaagacccaggacatcgtgctgggcaccagcttcctgagcatcaacagcaaggaggagaccgagcacctggagaacggcaacaagtaccccaacctggagagcgtgaacaaggtgaacggccacagcgaggagaccagccagagccccaacagaaccgagccccacgacagcgactgcagcgtggacctgggcatcagcaagagcaccgaggacctgagcccccagaagagcggccccgtgggcagcgtggtgaagagccacagcatcaccaacatggagatcggcggcctgaagatctacgacatcctgagcgacaacggcccccagcagcccagcaccaccgtgaagatcaccagcgccgtggacggcaagaacatcgtgagaagcaagagcgccaccctgctgtacgaccagcccctgcaggtgttcaccggcagcagcagcagcagcgacctgatcagcggcaccaaggccatcttcaagttcgacagcaaccacaaccccgaggagcccaacatcatcagaggccccaccagcggcccccagagcgccccccagatctacggccccccccagtacaacatccagtacagcagcagcgccgccgtgaaggacaccctgtggcacagcaagcagaacccccagatcgaccacgccagcttccccccccagctgctgcccagaagcgagagcaccgagaaccagagctacgccaagcacagcgccaacatgaacttcagcaaccacaacaacgtgagagccaacaccgcctaccacctgcaccagagactgggccccgccagacacggcgagatgtgggccatcagccccaacgacagactgatccccgccgtgaccagaagcaccatccagagacagagcagcgtgagcagcaccgccagcgtgaacctgggcgaccccggcagcaccagaagagcccagatccccgagggcgactacctgagctacagagagttccacagcgccggcagaaccccccccatgatgcccggcagccagagacccctgagcgccagaacctacagcatcgacggccccaacgccagcagaccccagagcgccagacccagcatcaacgagatccccgagagaaccatgagcgtgagcgacttcaactacagcagaaccagccccagcaagagacccaacgccagagtgggcagcgagcacagcctgctggacccccccggcaagagcaaggtgcccagagactggagagagcaggtgctgagacacatcgaggccaagaagctggagaagatgcccctgagcaacggccagatgggccagcccctgagaccccaggccaactacagccagatccaccaccccccccaggccagcgtggccagacaccccagcagagagcagctgatcgactacctgatgctgaaggtggcccaccagcccccctacacccagccccactgcagccccagacagggccacgagctggccaagcaggagatcagagtgagagtggagaaggaccccgagctgggcttcagcatcagcggcggcgtgggcggcagaggcaaccccttcagacccgacgacgacggcatcttcgtgaccagagtgcagcccgagggccccgccagcaagctgctgcagcccggcgacaagatcatccaggccaacggctacagcttcatcaacatcgagcacggccaggccgtgagcctgctgaagaccttccagaacaccgtggagctgatcatcgtgagagaggtgagcagctag

SEQ ID NO: 80579 - DNA, 3909 bp, synthetic construct; identical to SEQ ID NO: 80574
  misc_feature 1..3909: note = Description of Artificial Sequence: Synthetic coding sequence
  source 1..3909: mol_type = other DNA

SEQ ID NO: 80580 - DNA, 4260 bp, synthetic construct
  misc_feature 1..4260: note = Description of Artificial Sequence: Synthetic coding sequence
  source 1..4260: mol_type = other DNA
atgaccaccaagagaagcctgttcgtgagactggtgccctgcagatgcctgagaggcgaggaggagaccgtgaccaccctggactacagccactgcagcctggagcaggtgcccaaggagatcttcaccttcgagaagaccctggaggagctgtacctggacgccaaccagatcgaggagctgcccaagcagctgttcaactgccagagcctgcacaagctgagcctgcccgacaacgacctgaccaccctgcccgccagcatcgccaacctgatcaacctgagagagctggacgtgagcaagaacggcatccaggagttccccgagaacatcaagaactgcaaggtgctgaccatcgtggaggccagcgtgaaccccatcagcaagctgcccgacggcttcagccagctgctgaacctgacccagctgtacctgaacgacgccttcctggagttcctgcccgccaacttcggcagactgaccaagctgcagatcctggagctgagagagaaccagctgaagatgctgcccaagaccatgaacagactgacccagctggagagactggacctgggcagcaacgagttcaccgaggtgcccgaggtgctggagcagctgagcggcctgaaggagttctggatggacgccaacagactgaccttcatccccggcttcatcggcagcctgaagcagctgacctacctggacgtgagcaagaacaacatcgagatggtggaggagggcatcagcacctgcgagaacctgcaggacctgctgctgagcagcaacagcctgcagcagctgcccgagaccatcggcagcctgaagaacatcaccaccctgaagatcgacgagaaccagctgatgtacctgcccgacagcatcggcggcctgatcagcgtggaggagctggactgcagcttcaacgaggtggaggccctgcccagcagcatcggccagctgaccaacctgagaaccttcgccgccgaccacaactacctgcagcagctgccccccgagatcggcagctggaagaacatcaccgtgctgttcctgcacagcaacaagctggagaccctgcccgaggagatgggcgacatgcagaagctgaaggtgatcaacctgagcgacaacagactgaagaacctgcccttcagcttcaccaagctgcagcagctgaccgccatgtggctgagcgacaaccagagcaagcccctgatccccctgcagaaggagaccgacagcgagacccagaagatggtgctgaccaactacatgttcccccagcagcccagaaccgaggacgtgatgttcatcagcgacaacgagagcttcaaccccagcctgtgggaggagcagagaaagcagagagcccaggtggccttcgagtgcgacgaggacaaggacgagagagaggccccccccagagagggcaacctgaagagataccccaccccctaccccgacgagctgaagaacatggtgaagaccgtgcagaccatcgtgcacagactgaaggacgaggagaccaacgaggacagcggcagagacctgaagccccacgaggaccagcaggacatcaacaaggacgtgggcgtgaagaccagcgagagcaccaccaccgtgaagagcaaggtggacgagagagagaagtacatgatcggcaacagcgtgcagaagatcagcgagcccgaggccgagatcagccccggcagcctgcccgtgaccgccaacatgaaggccagcgagaacctgaagcacatcgtgaaccacgacgacgtgttcgaggagagcgaggagctgagcagcgacgaggagatgaagatggccgagatgagaccccccctgatcgagaccagcatcaaccagcccaaggtggtggccctgagcaacaacaagaaggacgacaccaaggagaccgacagcctgagcgacgaggtgacccacaacagcaaccagaacaacagcaactgcagcagccccagcagaatgagcgacagcgtgagcctgaacaccgacagcagccaggacaccagcctgtgcagccccgtgaagcagacccacatcgacatcaacagcaagatcagacaggaggacgagaacttcaacagcctgctgcagaacggcgacatcctgaacagcagcaccgaggagaagttcaaggcccacgacaagaaggacttcaacctgcccgagtacgacctgaacgtggaggagagactggtgctgatcgagaagagcgtggacagcaccgccaccgccgacgacacccacaagctggaccacatcaacatgaacctgaacaagctgatcaccaacgacaccttccagcccgagatcatggagagaagcaagacccaggacatcgtgctgggcaccagcttcctgagcatcaacagcaaggaggagaccgagcacctggagaacggcaacaagtaccccaacctggagagcgtgaacaaggtgaacggccacagcgaggagaccagccagagccccaacagaaccgagccccacgacagcgactgcagcgtggacctgggcatcagcaagagcaccgaggacctgagcccccagaagagcggccccgtgggcagcgtggtgaagagccacagcatcaccaacatggagatcggcggcctgaagatctacgacatcctgagcgacaacggcccccagcagcccagcaccaccgtgaagatcaccagcgccgtggacggcaagaacatcgtgagaagcaagagcgccaccctgctgtacgaccagcccctgcaggtgttcaccggcagcagcagcagcagcgacctgatcagcggcaccaaggccatcttcaagttcgacagcaaccacaaccccgaggagcccaacatcatcagaggccccaccagcggcccccagagcgccccccagatctacggccccccccagtacaacatccagtacagcagcagcgccgccgtgaaggacaccctgtggcacagcaagcagaacccccagatcgaccacgccagcttccccccccagctgctgcccagaagcgagagcaccgagaaccagagctacgccaagcacagcgccaacatgaacttcagcaaccacaacaacgtgagagccaacaccgcctaccacctgcaccagagactgggccccgccagacacggcgagatgtgggccatcagccccaacgacagactgatccccgccgtgaccagaagcaccatccagagacagagcagcgtgagcagcaccgccagcgtgaacctgggcgaccccggcagcaccagaagagcccagatccccgagggcgactacctgagctacagagagttccacagcgccggcagaaccccccccatgatgcccggcagccagagacccctgagcgccagaacctacagcatcgacggccccaacgccagcagaccccagagcgccagacccagcatcaacgagatccccgagagaaccatgagcgtgagcgacttcaactacagcagaaccagccccagcaagagacccaacgccagagtgggcagcgagcacagcctgctggacccccccggcaagagcaaggtgcccagagactggagagagcaggtgctgagacacatcgaggccaagaagctggagaagagcatgctgagcagaagcttcaacagcaacttcaccaccgtgagcagcttccactgcggcagcagcagagacctgcacggcagccagggcagcctggccctgagcgtggccgacagaagaggcagcggcggccacatcttcagaatgcccctgagcaacggccagatgggccagcccctgagaccccaggccaactacagccagatccaccaccccccccaggccagcgtggccagacaccccagcagagagcagctgatcgactacctgatgctgaaggtggcccaccagcccccctacacccagccccactgcagccccagacagggccacgagctggccaagcaggagatcagagtgagagtggagaaggaccccgagctgggcttcagcatcagcggcggcgtgggcggcagaggcaaccccttcagacccgacgacgacggcatcttcgtgaccagagtgcagcccgagggccccgccagcaagctgctgcagcccggcgacaagatcatccaggccaacggctacagcttcatcaacatcgagcacggccaggccgtgagcctgctgaagaccttccagaacaccgtggagctgatcatcgtgagagaggtgagcagctag

SEQ ID NO: 80581 - DNA, 1158 bp, synthetic construct
  misc_feature 1..1158: note = Description of Artificial Sequence: Synthetic coding sequence
  source 1..1158: mol_type = other DNA
atgaaggaggaggagggcttccccgaggacgaggccaccgagagcgagaccctgagcctggtgaaggagctggacgccttccccaaggtgcccgagagctacgtggagaccagcgccagcggcggcaccgtgagcctgatcgccttcaccaccatggccctgctgaccatcatggagttcagcgtgtaccaggacacctggatgaagtacgagtacgaggtggacaaggacttcagcagcaagctgagaatcaacatcgacatcaccgtggccatgaagtgccagtacgtgggcgccgacgtgctggacctggccgagaccatggtggccagcgccgacggcctggtgtacgagcccaccgtgttcgacctgagcccccagcagaaggagtggcagagaatgctgcagctgatccagagcagactgcaggaggagcacagcctgcaggacgtgatcttcaagagcgccttcaagagcaccagcaccgccctgccccccagagaggacgacagcagccagagccccaacgcctgcagaatccacggccacctgtacgtgaacaaggtggccggcaacttccacatcaccgtgggcaaggccatcccccaccccagaggccacgcccacctggccgccctggtgaaccacgagagctacaacttcagccacagaatcgaccacctgagcttcggcgagctggtgcccgccatcatcaaccccctggacggcaccgagaagatcgccatcgaccacaaccagatgttccagtacttcatcaccgtggtgcccaccaagctgcacacctacaagatcagcgccgacacccaccagttcagcgtgaccgagagagagagaatcatcaaccacgccgccggcagccacggcgtgagcggcatcttcatgaagtacgacctgagcagcctgatggtgaccgtgaccgaggagcacatgcccttctggcagttcttcgtgagactgtgcggcatcgtgggcggcatcttcagcaccaccggcatgctgcacggcatcggcaagttcatcgtggagatcatctgctgcagattcagactgggcagctacaagcccgtgaacagcgtgcccttcgaggacggccacaccgacaaccacctgcccctgctggagaacaacacccactag

SEQ ID NO: 80582 - DNA, 1134 bp, synthetic construct
  misc_feature 1..1134: note = Description of Artificial Sequence: Synthetic coding sequence
  source 1..1134: mol_type = other DNA
atgagaagactgaacagaaagaagaccctgagcctggtgaaggagctggacgccttccccaaggtgcccgagagctacgtggagaccagcgccagcggcggcaccgtgagcctgatcgccttcaccaccatggccctgctgaccatcatggagttcagcgtgtaccaggacacctggatgaagtacgagtacgaggtggacaaggacttcagcagcaagctgagaatcaacatcgacatcaccgtggccatgaagtgccagtacgtgggcgccgacgtgctggacctggccgagaccatggtggccagcgccgacggcctggtgtacgagcccaccgtgttcgacctgagcccccagcagaaggagtggcagagaatgctgcagctgatccagagcagactgcaggaggagcacagcctgcaggacgtgatcttcaagagcgccttcaagagcaccagcaccgccctgccccccagagaggacgacagcagccagagccccaacgcctgcagaatccacggccacctgtacgtgaacaaggtggccggcaacttccacatcaccgtgggcaaggccatcccccaccccagaggccacgcccacctggccgccctggtgaaccacgagagctacaacttcagccacagaatcgaccacctgagcttcggcgagctggtgcccgccatcatcaaccccctggacggcaccgagaagatcgccatcgaccacaaccagatgttccagtacttcatcaccgtggtgcccaccaagctgcacacctacaagatcagcgccgacacccaccagttcagcgtgaccgagagagagagaatcatcaaccacgccgccggcagccacggcgtgagcggcatcttcatgaagtacgacctgagcagcctgatggtgaccgtgaccgaggagcacatgcccttctggcagttcttcgtgagactgtgcggcatcgtgggcggcatcttcagcaccaccggcatgctgcacggcatcggcaagttcatcgtggagatcatctgctgcagattcagactgggcagctacaagcccgtgaacagcgtgcccttcgaggacggccacaccgacaaccacctgcccctgctggagaacaacacccactag

SEQ ID NO: 80583 - DNA, 663 bp, synthetic construct
  misc_feature 1..663: note = Description of Artificial Sequence: Synthetic coding sequence
  source 1..663: mol_type = other DNA
atgagaagactgaacagaaagaagaccctgagcctggtgaaggagctggacgccttccccaaggtgcccgagagctacgtggagaccagcgccagcggcggcaccgtgagcctgatcgccttcaccaccatggccctgctgaccatcatggagttcagcgtgtaccaggacacctggatgaagtacgagtacgaggtggacaaggacttcagcagcaagctgagaatcaacatcgacatcaccgtggccatgaagtgccagtacgtgggcgccgacgtgctggacctggccgagaccatggtggccagcgccgacggcctggtgtacgagcccaccgtgttcgacctgagcccccagcagaaggagtggcagagaatgctgcagctgatccagagcagactgcaggaggagcacagcctgcaggacgtgatcttcaagagcgccttcaagagcaccagcaccgccctgccccccagagaggacgacagcagccagagccccaacgcctgcagaatccacggccacctgtacgtgaacaaggtggccggcaacttccacatcaccgtgggcaaggccatcccccaccccagaggccacgcccacctggccgccctggtgaaccacgagagctacaacttcagccacagaatcgaccacctgtag

SEQ ID NO: 80584 - DNA, 216 bp, synthetic construct
  misc_feature 1..216: note = Description of Artificial Sequence: Synthetic coding sequence
  source 1..216: mol_type = other DNA
atgagaagactgaacagaaagaagaccctgagcctggtgaaggagctggacgccttccccaaggtgcccgagagctacgtggagaccagcgccagcggcggcaccgtgagcctgatcgccttcaccaccatggccctgctgaccatcatggagttcagcgtgtaccaggacacctggatgaagtacgagtacgaggtggacaaggacttcagctag

SEQ ID NO: 80585 - DNA, 528 bp, synthetic construct
  misc_feature 1..528: note = Description of Artificial Sequence: Synthetic coding sequence
  source 1..528: mol_type = other DNA
atgagaagactgaacagaaagaagaccctgagcctggtgaaggagctggacgccttccccaaggtgcccgagagctacgtggagaccagcgccagcggcggcaccgtgagcctgatcgccttcaccaccatggccctgctgaccatcatggagttcagcgtgtaccaggacacctggatgaagtacgagtacgaggtggacaaggacttcagcagcaagctgagaatcaacatcgacatcaccgtggccatgaagtgccagtacgtgggcgccgacgtgctggacctggccgagaccatggtggccagcgccgacggcctggtgtacgagcccaccgtgttcgacctgagcccccagcagaaggagtggcagagaatgctgcagctgatccagagcagactgcaggaggagcacagcctgcaggacgtgatcttcaagagcgccttcaagagcaccagcaccgccctgccccccagagaggacgacagcagccagagccccaacgcctgcagaatccacggccactag

SEQ ID NO: 80586 - DNA, 1158 bp, synthetic construct
  misc_feature 1..1158: note = Description of Artificial Sequence: Synthetic coding sequence
  source 1..1158: mol_type = other DNA
atgcccgagtacaagggcagaaccgtgctggtgagagacgcccaggagggcagcgtgaccctgcagatcctggacgtgagactggaggaccagggcagctacagatgcctgatccaggtgggcaacctgagcaaggaggacaccgtgatcctgcaggtggccgcccccagcgtgggcagcctgagccccagcgccgtggccctggccgtgatcctgcccgtgctggtgctgctgatcatggtgtgcctgtgcctgatctggaagcagagaagagccaaggagaagctgctgtacgagcacgtgaccgaggtggacaacctgctgagcgaccacgccaaggagaagggcaagctgcacaaggccgtgaagaagctgagaagcgagctgaagctgaagagagccgccgccaacagcggctggagaagagccagactgcacttcgtggccgtgaccctggaccccgacaccgcccaccccaagctgatcctgagcgaggaccagagatgcgtgagactgggcgacagaagacagcccgtgcccgacaacccccagagattcgacttcgtggtgagcatcctgggcagcgagtacttcaccaccggctgccactactgggaggtgtacgtgggcgacaagaccaagtggatcctgggcgtgtgcagcgagagcgtgagcagaaagggcaaggtgaccgccagccccgccaacggccactggctgctgagacagagcagaggcaacgagtacgaggccctgaccagcccccagaccagcttcagactgaaggagccccccagatgcgtgggcatcttcctggactacgaggccggcgtgatcagcttctacaacgtgaccaacaagagccacatcttcaccttcacccacaacttcagcggccccctgagacccttcttcgagccctgcctgcacgacggcggcaagaacaccgcccccctggtgatctgcagcgagctgcacaagagcgaggagagcatcgtgcccagacccgagggcaagggccacgccaacggcgacgtgagcctgaaggtgaacagcagcctgctgccccccaaggcccccgagctgaaggacatcatcctgagcctgccccccgacctgggccccgccctgcaggagctgaaggcccccagcttctag

SEQ ID NO: 80587 - DNA, 1428 bp, synthetic construct
  misc_feature 1..1428: note = Description of Artificial Sequence: Synthetic coding sequence
  source 1..1428: mol_type = other DNA
atggagatggccagcagcgccggcagctggctgagcggctgcctgatccccctggtgttcctgagactgagcgtgcacgtgagcggccacgccggcgacgccggcaagttccacgtggccctgctgggcggcaccgccgagctgctgtgccccctgagcctgtggcccggcaccgtgcccaaggaggtgagatggctgagaagccccttcccccagagaagccaggccgtgcacatcttcagagacggcaaggaccaggacgaggacctgatgcccgagtacaagggcagaaccgtgctggtgagagacgcccaggagggcagcgtgaccctgcagatcctggacgtgagactggaggaccagggcagctacagatgcctgatccaggtgggcaacctgagcaaggaggacaccgtgatcctgcaggtggccgcccccagcgtgggcagcctgagccccagcgccgtggccctggccgtgatcctgcccgtgctggtgctgctgatcatggtgtgcctgtgcctgatctggaagcagagaagagccaaggagaagctgctgtacgagcacgtgaccgaggtggacaacctgctgagcgaccacgccaaggagaagggcaagctgcacaaggccgtgaagaagctgagaagcgagctgaagctgaagagagccgccgccaacagcggctggagaagagccagactgcacttcgtggccgtgaccctggaccccgacaccgcccaccccaagctgatcctgagcgaggaccagagatgcgtgagactgggcgacagaagacagcccgtgcccgacaacccccagagattcgacttcgtggtgagcatcctgggcagcgagtacttcaccaccggctgccactactgggaggtgtacgtgggcgacaagaccaagtggatcctgggcgtgtgcagcgagagcgtgagcagaaagggcaaggtgaccgccagccccgccaacggccactggctgctgagacagagcagaggcaacgagtacgaggccctgaccagcccccagaccagcttcagactgaaggagccccccagatgcgtgggcatcttcctggactacgaggccggcgtgatcagcttctacaacgtgaccaacaagagccacatcttcaccttcacccacaacttcagcggccccctgagacccttcttcgagccctgcctgcacgacggcggcaagaacaccgcccccctggtgatctgcagcgagctgcacaagagcgaggagagcatcgtgcccagacccgagggcaagggccacgccaacggcgacgtgagcctgaaggtgaacagcagcctgctgccccccaaggcccccgagctgaaggacatcatcctgagcctgccccccgacctgggccccgccctgcaggagctgaaggcccccagcttctag

SEQ ID NO: 80588 - DNA, 1428 bp, synthetic construct; identical to SEQ ID NO: 80587
  misc_feature 1..1428: note = Description of Artificial Sequence: Synthetic coding sequence
  source 1..1428: mol_type = other DNA

SEQ ID NO: 80589 - DNA, 2595 bp, synthetic construct
  misc_feature 1..2595: note = Description of Artificial Sequence: Synthetic coding sequence
  source 1..2595: mol_type = other DNA
atgaccaccgagaagagcctggtgaccgaggccgagaacagccagcaccagcagaaggaggagggcgaggaggccatcaacagcggccagcaggagccccagcaggaggagagctgccagaccgccgccgagggcgacaactggtgcgagcagaagctgaaggccagcaacggcgacacccccacccacgaggacctgaccaagaacaaggagagaaccagcgagagcagaggcctgagcagactgttcagcagcttcctgaagagacccaagagccaggtgagcgaggaggagggcaaggaggtggagagcgacaaggagaagggcgagggcggccagaaggagatcgagttcggcaccagcctggacgaggagatcatcctgaaggcccccatcgccgcccccgagcccgagctgaagaccgaccccagcctggacctgcacagcctgagcagcgccgagacccagcccgcccaggaggagctgagagaggaccccgacttcgagatcaaggagggcgagggcctggaggagtgcagcaagatcgaggtgaaggaggagagcccccagagcaaggccgagaccgagctgaaggccagccagaagcccatcagaaagcacagaaacatgcactgcaaggtgagcctgctggacgacaccgtgtacgagtgcgtggtggagaagcacgccaagggccaggacctgctgaagagagtgtgcgagcacctgaacctgctggaggaggactacttcggcctggccatctgggacaacgccaccagcaagacctggctggacagcgccaaggagatcaagaagcaggtgagaggcgtgccctggaacttcaccttcaacgtgaagttctacccccccgaccccgcccagctgaccgaggacatcaccagatactacctgtgcctgcagctgagacaggacatcgtggccggcagactgccctgcagcttcgccaccctggccctgctgggcagctacaccatccagagcgagctgggcgactacgaccccgagctgcacggcgtggactacgtgagcgacttcaagctggcccccaaccagaccaaggagctggaggagaaggtgatggagctgcacaagagctacagaagcatgacccccgcccaggccgacctggagttcctggagaacgccaagaagctgagcatgtacggcgtggacctgcacaaggccaaggacctggagggcgtggacatcatcctgggcgtgtgcagcagcggcctgctggtgtacaaggacaagctgagaatcaacagattcccctggcccaaggtgctgaagatcagctacaagagaagcagcttcttcatcaagatcagacccggcgagcaggagcagtacgagagcaccatcggcttcaagctgcccagctacagagccgccaagaagctgtggaaggtgtgcgtggagcaccacaccttcttcagactgaccagcaccgacaccatccccaagagcaagttcctggccctgggcagcaagttcagatacagcggcagaacccaggcccagaccagacaggccagcgccctgatcgacagacccgccccccacttcgagagaaccgccagcaagagagccagcagaagcctggacggcgccgccgccgtggacagcgccgacagaagccccagacccaccagcgcccccgccatcacccagggccaggtggccgagggcggcgtgctggacgccagcgccaagaagaccgtggtgcccaaggcccagaaggagaccgtgaaggccgaggtgaagaaggaggacgagccccccgagcaggccgagcccgagcccaccgaggcctggaaggtggagaagacccacatcgaggtgaccgtgcccaccagcaacggcgaccagacccagaagctggccgagaagaccgaggacctgatcagaatgagaaagaagaagagagagagactggacggcgagaacatctacatcagacacagcaacctgatgctggaggacctggacaagagccaggaggagatcaagaagcaccacgccagcatcagcgagctgaagaagaacttcatggagagcgtgcccgagcccagacccagcgagtgggacaagagactgagcacccacagccccttcagaaccctgaacatcaacggccagatccccaccggcgagggcccccccctggtgaagacccagaccgtgaccatcagcgacaacgccaacgccgtgaagagcgagatccccaccaaggacgtgcccatcgtgcacaccgagaccaagaccatcacctacgaggccgcccagaccgacgacaacagcggcgacctggaccccggcgtgctgctgaccgcccagaccatcaccagcgagacccccagcagcaccaccaccacccagatcaccaagaccgtgaagggcggcatcagcgagaccagaatcgagaagagaatcgtgatcaccggcgacgccgacatcgaccacgaccaggtgctggtgcaggccatcaaggaggccaaggagcagcaccccgacatgagcgtgaccaaggtggtggtgcaccaggagaccgagatcgccgacgagtag

SEQ ID NO: 80590 - DNA, 2328 bp, synthetic construct
  misc_feature 1..2328: note = Description of Artificial Sequence: Synthetic coding sequence
  source 1..2328: mol_type = other DNA
atgaccaccgagaagagcctggtgaccgaggccgagaacagccagcaccagcagaaggaggagggcgaggaggccatcaacagcggccagcaggagccccagcaggaggagagctgccagaccgccgccgagggcgacaactggtgcgagcagaagctgaaggccagcaacggcgacacccccacccacgaggacctgaccaagaacaaggagagaaccagcgagagcagaggcctgagcagactgttcagcagcttcctgaagagacccaagagccaggtgagcgaggaggagggcaaggaggtggagagcgacaaggagaagggcgagggcggccagaaggagatcgagttcggcaccagcctggacgaggagatcatcctgaaggcccccatcgccgcccccgagcccgagctgaagaccgaccccagcctggacctgcacagcctgagcagcgccgagacccagcccgcccaggaggagctgagagaggaccccgacttcgagatcaaggagggcgagggcctggaggagtgcagcaagatcgaggtgaaggaggagagcccccagagcaaggccgagaccgagctgaaggccagccagaagcccatcagaaagcacagaaacatgcactgcaaggtgagcctgctggacgacaccgtgtacgagtgcgtggtggagacctggctggacagcgccaaggagatcaagaagcaggtgagaggcgtgccctggaacttcaccttcaacgtgaagttctacccccccgaccccgcccagctgaccgaggacatcaccagatactacctgtgcctgcagctgagacaggacatcgtggccggcagactgccctgcagcttcgccaccctggccctgctgggcagctacaccatccagagcgagctgggcgactacgaccccgagctgcacggcgtggactacgtgagcgacttcaagctggcccccaaccagaccaaggagctggaggagaaggtgatggagctgcacaagagctacagaagcatgacccccgcccaggccgacctggagttcctggagaacgccaagaagctgagcatgtacggcgtggacctgcacaaggccaaggacctggagggcgtggacatcatcctgggcgtgtgcagcagcggcctgctggtgtacaaggacaagctgagaatcaacagattcccctggcccaaggtgctgaagatcagctacaagagaagcagcttcttcatcaagatcagacccggcgagcaggagcagtacgagagcaccatcggcttcaagctgcccagctacagagccgccaagaagctgtggaaggtgtgcgtggagcaccacaccttcttcagactgaccagcaccgacaccatccccaagagcaagttcctggccctgggcagcaagttcagatacagcggcagaacccaggcccagaccagacaggccagcgccctgatcgacagacccgccccccacttcgagagaaccgccagcaagagagccagcagaagcctggacggcgccgccgccgtggacagcgccgacagaagccccagacccaccagcgcccccgccatcacccagggccaggtggccgagggcggcgtgctggacgccagcgccaagaagaccgtggtgcccaaggcccagaaggagaccgtgaaggccgaggtgaagaaggaggacgagccccccgagcaggccgagcccgagcccaccgaggcctggaaggacctggacaagagccaggaggagatcaagaagcaccacgccagcatcagcgagctgaagaagaacttcatggagagcgtgcccgagcccagacccagcgagtgggacaagagactgagcacccacagccccttcagaaccctgaacatcaacggccagatccccaccggcgagggcccccccctggtgaagacccagaccgtgaccatcagcgacaacgccaacgccgtgaagagcgagatccccaccaaggacgtgcccatcgtgcacaccgagaccaagaccatcacctacgaggccgcccagaccgacgacaacagcggcgacctggaccccggcgtgctgctgaccgcccagaccatcaccagcgagacccccagcagcaccaccaccacccagatcaccaagaccgtgaagggcggcatcagcgagaccagaatcgagaagagaatcgtgatcaccggcgacgccgacatcgaccacgaccaggtgctggtgcaggccatcaaggaggccaaggagcagcaccccgacatgagcgtgaccaaggtggtggtgcaccaggagaccgagatcgccgacgagtag

SEQ ID NO: 80591 - DNA, 1926 bp, synthetic construct
  misc_feature 1..1926: note = Description of Artificial Sequence: Synthetic coding sequence
  source 1..1926: mol_type = other DNA
atgcactgcaaggtgagcctgctggacgacaccgtgtacgagtgcgtggtggagaagcacgccaagggccaggacctgctgaagagagtgtgcgagcacctgaacctgctggaggaggactacttcggcctggccatctgggacaacgccaccagcaagacctggctggacagcgccaaggagatcaagaagcaggtgagaggcgtgccctggaacttcaccttcaacgtgaagttctacccccccgaccccgcccagctgaccgaggacatcaccagatactacctgtgcctgcagctgagacaggacatcgtggccggcagactgccctgcagcttcgccaccctggccctgctgggcagctacaccatccagagcgagctgggcgactacgaccccgagctgcacggcgtggactacgtgagcgacttcaagctggcccccaaccagaccaaggagctggaggagaaggtgatggagctgcacaagagctacagaagcatgacccccgcccaggccgacctggagttcctggagaacgccaagaagctgagcatgtacggcgtggacctgcacaaggccaaggacctggagggcgtggacatcatcctgggcgtgtgcagcagcggcctgctggtgtacaaggacaagctgagaatcaacagattcccctggcccaaggtgctgaagatcagctacaagagaagcagcttcttcatcaagatcagacccggcgagcaggagcagtacgagagcaccatcggcttcaagctgcccagctacagagccgccaagaagctgtggaaggtgtgcgtggagcaccacaccttcttcagactgaccagcaccgacaccatccccaagagcaagttcctggccctgggcagcaagttcagatacagcggcagaacccaggcccagaccagacaggccagcgccctgatcgacagacccgccccccacttcgagagaaccgccagcaagagagccagcagaagcctggacggcgccgccgccgtggacagcgccgacagaagccccagacccaccagcgcccccgccatcacccagggccaggtggccgagggcggcgtgctggacgccagcgccaagaagaccgtggtgcccaaggcccagaaggagaccgtgaaggccgaggtgaagaaggaggacgagccccccgagcaggccgagcccgagcccaccgaggcctggaaggtggagaagacccacatcgaggtgaccgtgcccaccagcaacggcgaccagacccagaagaagagagagagactggacggcgagaacatctacatcagacacagcaacctgatgctggaggacctggacaagagccaggaggagatcaagaagcaccacgccagcatcagcgagctgaagaagaacttcatggagagcgtgcccgagcccagacccagcgagtgggacaagagactgagcacccacagccccttcagaaccctgaacatcaacggccagatccccaccggcgagggcccccccctggtgaagacccagaccgtgaccatcagcgacaacgccaacgccgtgaagagcgagatccccaccaaggacgtgcccatcgtgcacaccgagaccaagaccatcacctacgaggccgcccagaccgacgacaacagcggcgacctggaccccggcgtgctgctgaccgcccagaccatcaccagcgagacccccagcagcaccaccaccacccagatcaccaagaccgtgaagggcggcatcagcgagaccagaatcgagaagagaatcgtgatcaccggcgacgccgacatcgaccacgaccaggtgctggtgcaggccatcaaggaggccaaggagcagcaccccgacatgagcgtgaccaaggtggtggtgcaccaggagaccgagatcgccgacgagtag

SEQ ID NO: 80592 - DNA, 2496 bp, synthetic construct
  misc_feature 1..2496: note = Description of Artificial Sequence: Synthetic coding sequence
  source 1..2496: mol_type = other DNA
atgaccaccgagaagagcctggtgaccgaggccgagaacagccagcaccagcagaaggaggagggcgaggaggccatcaacagcggccagcaggagccccagcaggaggagagctgccagaccgccgccgagggcgacaactggtgcgagcagaagctgaaggccagcaacggcgacacccccacccacgaggacctgaccaagaacaaggagagaaccagcgagagcagaggcctgagcagactgttcagcagcttcctgaagagacccaagagccaggtgagcgaggaggagggcaaggaggtggagagcgacaaggagaagggcgagggcggccagaaggagatcgagttcggcaccagcctggacgaggagatcatcctgaaggcccccatcgccgcccccgagcccgagctgaagaccgaccccagcctggacctgcacagcctgagcagcgccgagacccagcccgcccaggaggagctgagagaggaccccgacttcgagatcaaggagggcgagggcctggaggagtgcagcaagatcgaggtgaaggaggagagcccccagagcaaggccgagaccgagctgaaggccagccagaagcccatcagaaagcacagaaacatgcactgcaaggtgagcctgctggacgacaccgtgtacgagtgcgtggtggagaagcacgccaagggccaggacctgctgaagagagtgtgcgagcacctgaacctgctggaggaggactacttcggcctggccatctgggacaacgccaccagcaagacctggctggacagcgccaaggagatcaagaagcaggtgagaggcgtgccctggaacttcaccttcaacgtgaagttctacccccccgaccccgcccagctgaccgaggacatcaccagatactacctgtgcctgcagctgagacaggacatcgtggccggcagactgccctgcagcttcgccaccctggccctgctgggcagctacaccatccagagcgagctgggcgactacgaccccgagctgcacggcgtggactacgtgagcgacttcaagctggcccccaaccagaccaaggagctggaggagaaggtgatggagctgcacaagagctacagaagcatgacccccgcccaggccgacctggagttcctggagaacgccaagaagctgagcatgtacggcgtggacctgcacaaggccaaggacctggagggcgtggacatcatcctgggcgtgtgcagcagcggcctgctggtgtacaaggacaagctgagaatcaacagattcccctggcccaaggtgctgaagatcagctacaagagaagcagcttcttcatcaagatcagacccggcgagcaggagcagtacgagagcaccatcggcttcaagctgcccagctacagagccgccaagaagctgtggaaggtgtgcgtggagcaccacaccttcttcagactgaccagcaccgacaccatccccaagagcaagttcctggccctgggcagcaagttcagatacagcggcagaacccaggcccagaccagacaggccagcgccctgatcgacagacccgccccccacttcgagagaaccgccagcaagagagccagcagaagcctggacggcgccgccgccgtggacagcgccgacagaagccccagacccaccagcgcccccgccatcacccagggccaggtggccgagggcggcgtgctggacgccagcgccaagaagaccgtggtgcccaaggcccagaaggagaccgtgaaggccgaggtgaagaaggaggacgagccccccgagcaggccgagcccgagcccaccgaggcctggaagaagaagagagagagactggacggcgagaacatctacatcagacacagcaacctgatgctggaggacctggacaagagccaggaggagatcaagaagcaccacgccagcatcagcgagctgaagaagaacttcatggagagcgtgcccgagcccagacccagcgagtgggacaagagactgagcacccacagccccttcagaaccctgaacatcaacggccagatccccaccggcgagggcccccccctggtgaagacccagaccgtgaccatcagcgacaacgccaacgccgtgaagagcgagatccccaccaaggacgtgcccatcgtgcacaccgagaccaagaccatcacctacgaggccgcccagaccgacgacaacagcggcgacctggaccccggcgtgctgctgaccgcccagaccatcaccagcgagacccccagcagcaccaccaccacccagatcaccaagaccgtgaagggcggcatcagcgagaccagaatcgagaagagaatcgtgatcaccggcgacgccgacatcgaccacgaccaggtgctggtgcaggccatcaaggaggccaaggagcagcaccccgacatgagcgtgaccaaggtggtggtgcaccaggagaccgagatcgccgacgagtag

SEQ ID NO: 80593 - DNA, 2484 bp, synthetic construct
  misc_feature 1..2484: note = Description of Artificial Sequence: Synthetic coding sequence
  source 1..2484: mol_type = other DNA
agagccagagccgccagaagccagaacgccgtgggccccgtgcccgccgcccccagccccgagaagagcctggtgaccgaggccgagaacagccagcaccagcagaaggaggagggcgaggaggccatcaacagcggccagcaggagccccagcaggaggagagctgccagaccgccgccgagggcgacaactggtgcgagcagaagctgaaggccagcaacggcgacacccccacccacgaggacctgaccaagaacaaggagagaaccagcgagagcagaggcctgagcagactgttcagcagcttcctgaagagacccaagagccaggtgagcgaggaggagggcaaggaggtggagagcgacaaggagaagggcgagggcggccagaaggagatcgagttcggcaccagcctggacgaggagatcatcctgaaggcccccatcgccgcccccgagcccgagctgaagaccgaccccagcctggacctgcacagcctgagcagcgccgagacccagcccgcccaggaggagctgagagaggaccccgacttcgagatcaaggagggcgagggcctggaggagtgcagcaagatcgaggtgaaggaggagagcccccagagcaaggccgagaccgagctgaaggccagccagaagcccatcagaaagcacagaaacatgcactgcaaggtgagcctgctggacgacaccgtgtacgagtgcgtggtggagaagcacgccaagggccaggacctgctgaagagagtgtgcgagcacctgaacctgctggaggaggactacttcggcctggccatctgggacaacgccaccagcaagacctggctggacagcgccaaggagatcaagaagcaggtgagaggcgtgccctggaacttcaccttcaacgtgaagttctacccccccgaccccgcccagctgaccgaggacatcaccagatactacctgtgcctgcagctgagacaggacatcgtggccggcagactgccctgcagcttcgccaccctggccctgctgggcagctacaccatccagagcgagctgggcgactacgaccccgagctgcacggcgtggactacgtgagcgacttcaagctggcccccaaccagaccaaggagctggaggagaaggtgatggagctgcacaagagctacagaagcatgacccccgcccaggccgacctggagttcctggagaacgccaagaagctgagcatgtacggcgtggacctgcacaaggccaaggacctggagggcgtggacatcatcctgggcgtgtgcagcagcggcctgctggtgtacaaggacaagctgagaatcaacagattcccctggcccaaggtgctgaagatcagctacaagagaagcagcttcttcatcaagatcagacccggcgagcaggagcagtacgagagcaccatcggcttcaagctgcccagctacagagccgccaagaagctgtggaaggtgtgcgtggagcaccacaccttcttcagactgaccagcaccgacaccatccccaagagcaagttcctggccctgggcagcaagttcagatacagcggcagaacccaggcccagaccagacaggccagcgccctgatcgacagacccgccccccacttcgagagaaccgccagcaagagagccagcagaagcctggacggcgccgccgccgtggacagcgccgacagaagccccagacccaccagcgcccccgccatcacccagggccaggtggccgagggcggcgtgctggacgccagcgccaagaagaccgtggtgcccaaggcccagaaggagaccgtgaaggccgaggtgaagaaggaggacgagccccccgagcaggccgagcccgagcccaccgaggcctggaaggacctggacaagagccaggaggagatcaagaagcaccacgccagcatcagcgagctgaagaagaacttcatggagagcgtgcccgagcccagacccagcgagtgggacaagagactgagcacccacagccccttcagaaccctgaacatcaacggccagatccccaccggcgagggcccccccctggtgaagacccagaccgtgaccatcagcgacaacgccaacgccgtgaagagcgagatccccaccaaggacgtgcccatcgtgcacaccgagaccaagaccatcacctacgaggccgcccagaccgacgacaacagcggcgacctggaccccggcgtgctgctgaccgcccagaccatcaccagcgagacccccagcagcaccaccaccacccagatcaccaagaccgtgaagggcggcatcagcgagaccagaatcgagaagagaatcgtgatcaccggcgacgccgacatcgaccacgaccaggtgctggtgcaggccatcaaggaggccaaggagcagcaccccgacatgagcgtgaccaaggtggtggtgcaccaggagaccgagatcgccgacgagtag

SEQ ID NO: 80594 - DNA, 2163 bp, synthetic construct
  misc_feature 1..2163: note = Description of Artificial Sequence: Synthetic coding sequence
  source 1..2163: mol_type = other DNA
atgaccaccgagaagagcctggtgaccgaggccgagaacagccagcaccagcagaaggaggagggcgaggaggccatcaacagcggccagcaggagccccagcaggaggagagctgccagaccgccgccgagggcgacaactggtgcgagcagaagctgaaggccagcaacggcgacacccccacccacgaggacctgaccaagaacaaggagagaaccagcgagagcagaggcctgagcagactgttcagcagcttcctgaagagacccaagagccaggtgagcgaggaggagggcaaggaggtggagagcgacaaggagaagggcgagggcggccagaaggagatcgagttcggcaccagcctggacgaggagatcatcctgaaggcccccatcgccgcccccgagcccgagctgaagaccgaccccagcctggacctgcacagcctgagcagcgccgagacccagcccgcccaggaggagctgagagaggaccccgacttcgagatcaaggagggcgagggcctggaggagtgcagcaagatcgaggtgaaggaggagagcccccagagcaaggccgagaccgagctgaaggccagccagaagcccatcagaaagcacagaaacatgcactgcaaggtgagcctgctggacgacaccgtgtacgagtgcgtggtggagaagcacgccaagggccaggacctgctgaagagagtgtgcgagcacctgaacctgctggaggaggactacttcggcctggccatctgggacaacgccaccagcaagacctggctggacagcgccaaggagatcaagaagcaggtgagaggcgtgccctggaacttcaccttcaacgtgaagttctacccccccgaccccgcccagctgaccgaggacatcaccagatactacctgtgcctgcagctgagacaggacatcgtggccggcagactgccctgcagcttcgccaccctggccctgctgggcagctacaccatccagagcgagctgggcgactacgaccccgagctgcacggcgtggactacgtgagcgacttcaagctggcccccaaccagaccaaggagctggaggagaaggtgatggagctgcacaagagctacagaagcatgacccccgcccaggccgacctggagttcctggagaacgccaagaagctgagcatgtacggcgtggacctgcacaaggccaaggacctggagggcgtggacatcatcctgggcgtgtgcagcagcggcctgctggtgtacaaggacaagctgagaatcaacagattcccctggcccaaggtgctgaagatcagctacaagagaagcagcttcttcatcaagatcagacccggcgagcaggagcagtacgagagcaccatcggcttcaagctgcccagctacagagccgccaagaagctgtggaaggtgtgcgtggagcaccacaccttcttcagactgaccagcaccgacaccatccccaagagcaagttcctggccctgggcagcaagttcagatacagcggcagaacccaggcccagaccagacaggccagcgccctgatcgacagacccgccccccacttcgagagaaccgccagcaagagagccagcagaagcctggacggcgccgccgccgtggacagcgccgacagaagccccagacccaccagcgcccccgccatcacccagggccaggtggccgagggcggcgtgctggacgccagcgccaagaagaccgtggtgcccaaggcccagaaggagaccgtgaaggccgaggtgaagaaggaggacgagccccccgagcaggccgagcccgagcccaccgaggcctggaaggtggagaagacccacatcgaggtgaccgtgcccaccagcaacggcgaccagacccagaagaagagagagagactggacggcgagaacatctacatcagacacagcaacctgatgctggaggacctggacaagagccaggaggagatcaagaagcaccacgccagcatcagcgagctgaagaagaacttcatggagagcgtgcccgagcccagacccagcgagtgggacaagagactgagcacccacagccccttcagaaccctgaacatcaacggccagatccccaccggcgagggcgtgagcaccctgagcacctag

SEQ ID NO: 80595 - DNA, 2595 bp, synthetic construct; identical to SEQ ID NO: 80589
  misc_feature 1..2595: note = Description of Artificial Sequence: Synthetic coding sequence
  source 1..2595: mol_type = other DNA

SEQ ID NO: 80596 - DNA, 1767 bp, synthetic construct
  misc_feature 1..1767: note = Description of Artificial Sequence: Synthetic coding sequence
  source 1..1767: mol_type = other DNA
atgcactgcaaggtgagcctgctggacgacaccgtgtacgagtgcgtggtggagaagcacgccaagggccaggacctgctgaagagagtgtgcgagcacctgaacctgctggaggaggactacttcggcctggccatctgggacaacgccaccagcaagacctggctggacagcgccaaggagatcaagaagcaggtgagaggcgtgccctggaacttcaccttcaacgtgaagttctacccccccgaccccgcccagctgaccgaggacatcaccagatactacctgtgcctgcagctgagacaggacatcgtggccggcagactgccctgcagcttcgccaccctggccctgctgggcagctacaccatccagagcgagctgggcgactacgaccccgagctgcacggcgtggactacgtgagcgacttcaagctggcccccaaccagaccaaggagctggaggagaaggtgatggagctgcacaagagctacagaagcatgacccccgcccaggccgacctggagttcctggagaacgccaagaagctgagcatgtacggcgtggacctgcacaaggccaaggacctggagggcgtggacatcatcctgggcgtgtgcagcagcggcctgctggtgtacaaggacaagctgagaatcaacagattcccctggcccaaggtgctgaagatcagctacaagagaagcagcttcttcatcaagatcagacccggcgagcaggagcagtacgagagcaccatcggcttcaagctgcccagctacagagccgccaagaagctgtggaaggtgtgcgtggagcaccacaccttcttcagactgaccagcaccgacaccatccccaagagcaagttcctggccctgggcagcaagttcagatacagcggcagaacccaggcccagaccagacaggccagcgccctgatcgacagacccgccccccacttcgagagaaccgccagcaagagagccagcagaagcctggacggcgccgccgccgtggacagcgccgacagaagccccagacccaccagcgcccccgccatcacccagggccaggtggccgagggcggcgtgctggacgccagcgccaagaagaccgtggtgcccaaggcccagaaggagaccgtgaaggccgaggtgaagaaggaggacgagccccccgagcaggccgagcccgagcccaccgaggcctggaagaagaagagagagagactggacggcgagaacatctacatcagacacagcaacctgatgctggaggacctggacaagagccaggaggagatcaagaagcaccacgccagcatcagcgagctgaagaagaacttcatggagagcgtgcccgagcccagacccagcgagtgggacaagagactgagcacccacagccccttcagaaccctgaacatcaacggccagatccccaccggcgagggcccccccctggtgaagacccagaccgtgaccatcagcgacaacgccaacgccgtgaagagcgagatccccaccaaggacgtgcccatcgtgcacaccgagaccaagaccatcacctacgaggccgcccagaccgtgaagggcggcatcagcgagaccagaatcgagaagagaatcgtgatcaccggcgacgccgacatcgaccacgaccaggtgctggtgcaggccatcaaggaggccaaggagcagcaccccgacatgagcgtgaccaaggtggtggtgcaccaggagaccgagatcgccgacgagtag

SEQ ID NO: 80597 - DNA, 2115 bp, synthetic construct
  misc_feature 1..2115: note = Description of Artificial Sequence: Synthetic coding sequence
  source 1..2115: mol_type = other DNA
atgaccaccgagaagagcctggtgaccgaggccgagaacagccagcaccagcagaaggaggagggcgaggaggccatcaacagcggccagcaggagccccagcaggaggagagctgccagaccgccgccgagggcgacaactggtgcgagcagaagctgaaggccagcaacggcgacacccccacccacgaggacctgaccaagaacaaggagagaaccagcgagagcagaggcctgagcagactgttcagcagcttcctgaagagacccaagagccaggtgagcgaggaggagggcaaggaggtggagagcgacaaggagaagggcgagggcggccagaaggagatcgagttcggcaccagcctggacgaggagatcatcctgaaggcccccatcgccgcccccgagcccgagctgaagaccgaccccagcctggacctgcacagcctgagcagcgccgagacccagacctggctggacagcgccaaggagatcaagaagcaggtgagaggcgtgccctggaacttcaccttcaacgtgaagttctacccccccgaccccgcccagctgaccgaggacatcaccagatactacctgtgcctgcagctgagacaggacatcgtggccggcagactgccctgcagcttcgccaccctggccctgctgggcagctacaccatccagagcgagctgggcgactacgaccccgagctgcacggcgtggactacgtgagcgacttcaagctggcccccaaccagaccaaggagctggaggagaaggtgatggagctgcacaagagctacagaagcatgacccccgcccaggccgacctggagttcctggagaacgccaagaagctgagcatgtacggcgtggacctgcacaaggccaaggacctggagggcgtggacatcatcctgggcgtgtgcagcagcggcctgctggtgtacaaggacaagctgagaatcaacagattcccctggcccaaggtgctgaagatcagctacaagagaagcagcttcttcatcaagatcagacccggcgagcaggagcagtacgagagcaccatcggcttcaagctgcccagctacagagccgccaagaagctgtggaaggtgtgcgtggagcaccacaccttcttcagactgaccagcaccgacaccatccccaagagcaagttcctggccctgggcagcaagttcagatacagcggcagaacccaggcccagaccagacaggccagcgccctgatcgacagacccgccccccacttcgagagaaccgccagcaagagagccagcagaagcctggacggcgccgccgccgtggacagcgccgacagaagccccagacccaccagcgcccccgccatcacccagggccaggtggccgagggcggcgtgctggacgccagcgccaagaagaccgtggtgcccaaggcccagaaggagaccgtgaaggccgaggtgaagaaggaggacgagccccccgagcaggccgagcccgagcccaccgaggcctggaaggacctggacaagagccaggaggagatcaagaagcaccacgccagcatcagcgagctgaagaagaacttcatggagagcgtgcccgagcccagacccagcgagtgggacaagagactgagcacccacagccccttcagaaccctgaacatcaacggccagatccccaccggcgagggcccccccctggtgaagacccagaccgtgaccatcagcgacaacgccaacgccgtgaagagcgagatccccaccaaggacgtgcccatcgtgcacaccgagaccaagaccatcacctacgaggccgcccagaccgacgacaacagcggcgacctggaccccggcgtgctgctgaccgcccagaccatcaccagcgagacccccagcagcaccaccaccacccagatcaccaagaccgtgaagggcggcatcagcgagaccagaatcgagaagagaatcgtgatcaccggcgacgccgacatcgaccacgaccaggtgctggtgcaggccatcaaggaggccaaggagcagcaccccgacatgagcgtgaccaaggtggtggtgcaccaggagaccgagatcgccgacgagtag

SEQ ID NO: 80598 - DNA, 2304 bp, synthetic construct
  misc_feature 1..2304: note = Description of Artificial Sequence: Synthetic coding sequence
  source 1..2304: mol_type = other DNA
atgaccaccgagaagagcctggtgaccgaggccgagaacagccagcaccagcagaaggaggagggcgaggaggccatcaacagcggccagcaggagccccagcaggaggagagctgccagaccgccgccgagggcgacaactggtgcgagcagaagctgaaggccagcaacggcgacacccccacccacgaggacctgaccaagaacaaggagagaaccagcgagagcagaggcctgagcagactgttcagcagcttcctgaagagacccaagagccaggtgagcgaggaggagggcaaggaggtggagagcgacaaggagaagggcgagggcggccagaaggagatcgagttcggcaccagcctggacgaggagatcatcctgaaggcccccatcgccgcccccgagcccgagctgaagaccgaccccagcctggacctgcacagcctgagcagcgccgagacccagcccgcccaggaggagctgagagaggaccccgacttcgagatcaaggagggcgagggcctggaggagtgcagcaagatcgaggtgaaggaggagagcccccagagcaaggccgagaccgagctgaaggccagccagaagcccatcagaaagcacagaaacatgcactgcaaggtgagcctgctggacgacaccgtgtacgagtgcgtggtggagaagcacgccaagggccaggacctgctgaagagagtgtgcgagcacctgaacctgctggaggaggactacttcggcctggccatctgggacaacgccaccagcaagacctggctggacagcgccaaggagatcaagaagcaggtgagaggcgtgccctggaacttcaccttcaacgtgaagttctacccccccgaccccgcccagctgaccgaggacatcaccagatactacctgtgcctgcagctgagacaggacatcgtggccggcagactgccctgcagcttcgccaccctggccctgctgggcagctacaccatccagagcgagctgggcgactacgaccccgagctgcacggcgtggactacgtgagcgacttcaagctggcccccaaccagaccaaggagctggaggagaaggtgatggagctgcacaagagctacagaagcatgacccccgcccaggccgacctggagttcctggagaacgccaagaagctgagcatgtacggcgtggacctgcacaaggccaaggacctggagggcgtggacatcatcctgggcgtgtgcagcagcggcctgctggtgtacaaggacaagctgagaatcaacagattcccctggcccaaggtgctgaagatcagctacaagagaagcagcttcttcatcaagatcagacccggcgagcaggagcagtacgagagcaccatcggcttcaagctgcccagctacagagccgccaagaagctgtggaaggtgtgcgtggagcaccacaccttcttcagactgaccagcaccgacaccatccccaagagcaagttcctggccctgggcagcaagttcagatacagcggcagaacccaggcccagaccagacaggccagcgccctgatcgacagacccgccccccacttcgagagaaccgccagcaagagagccagcagaagcctggacggcgccgccgccgtggacagcgccgacagaagccccagacccaccagcgcccccgccatcacccagggccaggtggccgagggcggcgtgctggacgccagcgccaagaagaccgtggtgcccaaggcccagaaggagaccgtgaaggccgaggtgaagaaggaggacgagccccccgagcaggccgagcccgagcccaccgaggcctggaaggacctggacaagagccaggaggagatcaagaagcaccacgccagcatcagcgagctgaagaagaacttcatggagagcgtgcccgagcccagacccagcgagtgggacaagagactgagcacccacagccccttcagaaccctgaacatcaacggccagatccccaccggcgagggcaccgacgacaacagcggcgacctggaccccggcgtgctgctgaccgcccagaccatcaccagcgagacccccagcagcaccaccaccacccagatcaccaagaccgtgaagggcggcatcagcgagaccagaatcgagaagagaatcgtgatcaccggcgacgccgacatcgaccacgaccaggtgctggtgcaggccatcaaggaggccaaggagcagcaccccgacatgagcgtgaccaaggtggtggtgcaccaggagaccgagatcgccgacgagtag

SEQ ID NO: 80599 - DNA, 2145 bp, synthetic construct
  misc_feature 1..2145: note = Description of Artificial Sequence: Synthetic coding sequence
  source 1..2145: mol_type = other DNA
atgaccaccgagaagagcctggtgaccgaggccgagaacagccagcaccagcagaaggaggagggcgaggaggccatcaacagcggccagcaggagccccagcaggaggagagctgccagaccgccgccgagggcgacaactggtgcgagcagaagctgaaggccagcaacggcgacacccccacccacgaggacctgaccaagaacaaggagagaaccagcgagagcagaggcctgagcagactgttcagcagcttcctgaagagacccaagagccaggtgagcgaggaggagggcaaggaggtggagagcgacaaggagaagggcgagggcggccagaaggagatcgagttcggcaccagcctggacgaggagatcatcctgaaggcccccatcgccgcccccgagcccgagctgaagaccgaccccagcctggacctgcacagcctgagcagcgccgagacccagcccgcccaggaggagctgagagaggaccccgacttcgagatcaaggagggcgagggcctggaggagtgcagcaagatcgaggtgaaggaggagagcccccagagcaaggccgagaccgagctgaaggccagccagaagcccatcagaaagcacagaaacatgcactgcaaggtgagcctgctggacgacaccgtgtacgagtgcgtggtggagaagcacgccaagggccaggacctgctgaagagagtgtgcgagcacctgaacctgctggaggaggactacttcggcctggccatctgggacaacgccaccagcaagacctggctggacagcgccaaggagatcaagaagcaggtgagaggcgtgccctggaacttcaccttcaacgtgaagttctacccccccgaccccgcccagctgaccgaggacatcaccagatactacctgtgcctgcagctgagacaggacatcgtggccggcagactgccctgcagcttcgccaccctggccctgctgggcagctacaccatccagagcgagctgggcgactacgaccccgagctgcacggcgtggactacgtgagcgacttcaagctggcccccaaccagaccaaggagctggaggagaaggtgatggagctgcacaagagctacagaagcatgacccccgcccaggccgacctggagttcctggagaacgccaagaagctgagcatgtacggcgtggacctgcacaaggccaaggacctggagggcgtggacatcatcctgggcgtgtgcagcagcggcctgctggtgtacaaggacaagctgagaatcaacagattcccctggcccaaggtgctgaagatcagctacaagagaagcagcttcttcatcaagatcagacccggcgagcaggagcagtacgagagcaccatcggcttcaagctgcccagctacagagccgccaagaagctgtggaaggtgtgcgtggagcaccacaccttcttcagactgaccagcaccgacaccatccccaagagcaagttcctggccctgggcagcaagttcagatacagcggcagaacccaggcccagaccagacaggccagcgccctgatcgacagacccgccccccacttcgagagaaccgccagcaagagagccagcagaagcctggacggcgccgccgccgtggacagcgccgacagaagccccagacccaccagcgcccccgccatcacccagggccaggtggccgagggcggcgtgctggacgccagcgccaagaagaccgtggtgcccaaggcccagaaggagaccgtgaaggccgaggtgaagaaggaggacgagccccccgagcaggccgagcccgagcccaccgaggcctggaaggtggagaagacccacatcgaggtgaccgtgcccaccagcaacggcgaccagacccagaagaagagagagagactggacggcgagaacatctacatcagacacagcaacctgatgctggaggacctggacaagagccaggaggagatcaagaagcaccacgccagcatcagcgagctgaagaagaacttcatggagagcgtgcccgagcccagacccagcgagtgggacaagagactgagcacccacagccccttcagaaccctgaacatcaacggccagatccccaccggcgagggctag

SEQ ID NO: 80600 - DNA, 2061 bp, synthetic construct
  misc_feature 1..2061: note = Description of Artificial Sequence: Synthetic coding sequence
  source 1..2061: mol_type = other DNA
atgggctgcttctgcgccgtgcccgaggagttctactgcgaggtgctgctgctggacgagagcaagctgaccctgaccacccagcagcagggcatcaagaagagcaccaagggcagcgtggtgctggaccacgtgttccaccacgtgaacctggtggagatcgactacttcggcctgagatactgcgacagaagccaccagacctactggctggaccccgccaagaccctggccgagcacaaggagctgatcaacaccggccccccctacaccctgtacttcggcatcaagttctacgccgaggacccctgcaagctgaaggaggagatcaccagataccagttcttcctgcaggtgaagcaggacgtgctgcagggcagactgccctgccccgtgaacaccgccgcccagctgggcgcctacgccatccagagcgagctgggcgactacgacccctacaagcacaccgccggctacgtgagcgagtacagattcgtgcccgaccagaaggaggagctggaggaggccatcgagagaatccacaagaccctgatgggccagatccccagcgaggccgagctgaactacctgagaaccgccaagagcctggagatgtacggcgtggacctgcaccccgtgtacggcgagaacaagagcgagtacttcctgggcctgacccccgtgggcgtggtggtgtacaagaacaagaagcaggtgggcaagtacttctggcccagaatcaccaaggtgcacttcaaggagacccagttcgagctgagagtgctgggcaaggactgcaacgagaccagcttcttcttcgaggccagaagcaagaccgcctgcaagcacctgtggaagtgcagcgtggagcaccacaccttcttcagaatgcccgagaacgagagcaacagcctgagcagaaagctgagcaagttcggcagcatcagatacaagcacagatacagcggcagaaccgccctgcagatgagcagagacctgagcatccagctgcccagacccgaccagaacgtgaccagaagcagaagcaagacctaccccaagagaatcgcccagacccagcccgccgagagcaacagcatcagcagaatcaccgccaacatggagaacggcgagaacgagggcaccatcaagatcatcgcccccagccccgtgaagagcttcaagaaggccaagaacgagaacagccccgacacccagagaagcaagagccacgccccctgggaggagaacggcccccagagcggcctgtacaacagccccagcgacagaaccaagagccccaagttcccctacaccagaagaagaaaccccagctgcggcagcgacaacgacagcgtgcagcccgtgagaagaagaaaggcccacaacagcggcgaggacagcgacctgaagcagagaagaagaagcagaagcagatgcaacaccagcagcggcagcgagagcgagaacagcaacagagagtacagaaagaagagaaacagaatcagacaggagaacgacatggtggacagcgccccccagtgggaggccgtgctgagaagacagaaggagaagaaccaggccgaccccaacaacagaagaagcagacacagaagcagaagcagaagccccgacatccaggccaaggaggagctgtggaagcacatccagaaggagctggtggaccccagcggcctgagcgaggagcagctgaaggagatcccctacaccaagatcgagacccagggcgaccccatcagaatcagacacagccacagccccagaagctacagacagtacagaagaagccagtgcagcgacggcgagagaagcgtgctgagcgaggtgaacagcaagaccgacctggtgccccccctgcccgtgaccagaagcagcgacgcccagggcagcggcgacgccaccgtgcaccagagaagaaacggcagcaaggacagcctgatggaggagaagccccagaccagcaccaacaacctggccggcaagcacaccgccaagaccatcaagaccatccaggccagcagactgaagaccgagacctag

SEQ ID NO: 80601 - DNA, 1836 bp, synthetic construct
  misc_feature 1..1836: note = Description of Artificial Sequence: Synthetic coding sequence
  source 1..1836: mol_type = other DNA
atggacttcaagaagagcaagctgaccctggtggtggtggaggacgacgaccagggcagagagcaggagcacaccttcgtgttcagactggacagcgccagaacctgcaagcacctgtggaagtgcgccgtggagcaccacgccttcttcagactgagaacccccggcaacagcaagagcaacagaagcgacttcatcagactgggcagcagattcagattcagcggcagaaccgagtaccaggccacccacggcagcagactgagaagaaccagcaccttcgagagaaagcccagcaagagataccccagcagaagacacagcaccttcaaggccagcaaccccgtgatcgccgcccagctgtgcagcaagaccaaccccgaggtgcacaactaccagccccagtaccaccccaacatccaccccagccagcccagatggcacccccacagccccaacgtgagctaccccctgcccagccccgtgctgagcagcagcgacagactgcccttcggcatcgaggagaacggcggcacccccttcctgaccgccgccagcggcagacaccaccaccagcaccagcaccagcaccagcaccagcaccacagcaactacagcctgagcctgaccctggagaacaaggagggccccctgagaagccccaacagcagcagcaagagcctgaccaagctgagccccggcacccccgccctgttcagcgaggccgccgcccacctgaagaagctggagctggagaccgtgaaggccgccggcccctggccccccctgcacatcaacatcaacaaggccgaggagaagaaggtgagcgagaagaccctgcagacccccctgctgcccagccccgtggccgaccacgtgaagtgcaacatcctgaaggcccagctggagaacgccagcagagtgaacatccagggcggcaaggaggagagccccttcgtgaacatcaacaagaagagcagcctgcaggacgccagcgtgagaagccccatccccatcagagtggagaccgcccagcccgccgtggagaagcccgagatcaagccccccagagtgagaaagctgaccagacagtacagcttcgacgaggacgacctgccccccgacctggccgaggccgtgggcgtgaccaccagcaccaccaccaacaccaccaccgccgccacccaggtgagcgtgcccctgcccagccccaaggtgcagaacgtgagcagcccccacaagagcgagggcaagggcctgctgagccccggcgccaagagccccagcgacagaggcggcgccttcaccctggagcccggcgacctgctgatggacttcaccgaggccacccccctggccgagcccgccagcaacccccactgcgcccacagcagatgcagcccccccctgagcctgcccatgaaggaggagaccaccggcgtgtgcatgtacccccccatcaagaccagactgatcaagaccttccccgtggacaccatgaaccccttccccgacaccttcaccaccggcccccagttcaccgccgacttcagagacagcaagctgcagtgctgccccggccccaccagccccctgatccccgccgccaccctgagacccctgaccgagaccgtgcacagcgccgaccacctgcaccaccccgagacctgcttcagcggcagccagtgcagagacacccccgccggcaccggcgagagagaggacgacgagaagaccgtggacgacagaaccgtgaagttcagcccctgccacctggaggacggcatggtgcccagcgtgagactgctgagcagcggcttcgtgtgcagcctgtag

SEQ ID NO: 80602 - DNA, 1323 bp, synthetic construct
  misc_feature 1..1323: note = Description of Artificial Sequence: Synthetic coding sequence
  source 1..1323: mol_type = other DNA
atgaagttcctgctgatcaaggacgcccccggcaagaagaagagaaagaacctgatgctgagcttcaagagaaagcacgccaagggccaggacctgttcgaccagatcgtgtaccacctggacctggtggagaccgactacttcggcctgcagttcctggacagcgcccaggtggcccactggctggaccacgccaagcccatcaagaagcagatgaagatcggccccgcctacgccctgcacttcagagtgaagtactacagcagcgagcccaacaacctgagagaggagttcaccagatacctgttcgtgctgcagctgagacacgacatcctgagcggcaagctgaagtgcccctacgagaccgccgtggagctggccgccctgtgcctgcaggccgagctgggcgagtgcgagctgcccgagcacacccccgagctggtgagcgagttcagattcatccccaaccagaccgaggccatggagttcgacatcttccagagatggaaggagtgcagaggcaagagccccgcccaggccgagctgagctacctgaacaaggccaagtggctggagatgtacggcgtggacatgcacgtggtgagaggcagagacggctgcgagtacagcctgggcctgacccccaccggcatcctgatcttcgagggcgccaacaagatcggcctgttcttctggcccaagatcaccaagatggacttcaagaagagcaagctgaccctggtggtggtggaggacgacgaccagggcagagagcaggagcacaccttcgtgttcagactggacagcgccagaacctgcaagcacctgtggaagtgcgccgtggagcaccacgccttcttcagactgagaacccccggcaacagcaagagcaacagaagcgacttcatcagactgggcagcagattcagattcagcggcagaaccgagtaccaggccacccacggcagcagactgagaagaaccagcaccttcgagagaaagcccagcaagagataccccagcagaagacacagcaccttcaaggccagcaaccccgtgatcgccgcccagctgtgcagcaagaccaaccccgaggtgcacaactaccagccccagtaccaccccaacatccaccccagccagcccagatggcacccccacagccccaacgtgagacccagcttccaggacgacagaagccactggaaggccagcgccagcggcgacgacagccacttcgactacgtgcacgaccagaaccagaagaacctgggcggcatgcagagcatgatgtacagagacaagctgatgaccgccctgtag

SEQ ID NO: 80603 - DNA, 1557 bp, synthetic construct
  misc_feature 1..1557: note = Description of Artificial Sequence: Synthetic coding sequence
  source 1..1557: mol_type = other DNA
atgctgagattcctgagaagaaccttcggcagaagaagcatgcagagatacgccagaggcgccgccggcagaggcgccgccggcctgggcgacgagagagacggcggccccagaggcggccccgccgccgccgccagcagcagcgccctgcccgccgcccccggcggcagcgtgttccccgccggcggcggccccctgctgaccggcggcgccgccgtgcacatcagcgccgccggcgccgccaaggccaccctgtactgcagagtgttcctgctggacggcaccgaggtgagcgtggacctgcccaagcacgccaagggccaggacctgttcgaccagatcgtgtaccacctggacctggtggagaccgactacttcggcctgcagttcctggacagcgcccaggtggcccactggctggaccacgccaagcccatcaagaagcagatgaagatcggccccgcctacgccctgcacttcagagtgaagtactacagcagcgagcccaacaacctgagagaggagttcaccagatacctgttcgtgctgcagctgagacacgacatcctgagcggcaagctgaagtgcccctacgagaccgccgtggagctggccgccctgtgcctgcaggccgagctgggcgagtgcgagctgcccgagcacacccccgagctggtgagcgagttcagattcatccccaaccagaccgaggccatggagttcgacatcttccagagatggaaggagtgcagaggcaagagccccgcccaggccgagctgagctacctgaacaaggccaagtggctggagatgtacggcgtggacatgcacgtggtgagaggcagagacggctgcgagtacagcctgggcctgacccccaccggcatcctgatcttcgagggcgccaacaagatcggcctgttcttctggcccaagatcaccaagatggacttcaagaagagcaagctgaccctggtggtggtggaggacgacgaccagggcagagagcaggagcacaccttcgtgttcagactggacagcgccagaacctgcaagcacctgtggaagtgcgccgtggagcaccacgccttcttcagactgagaacccccggcaacagcaagagcaacagaagcgacttcatcagactgggcagcagattcagattcagcggcagaaccgagtaccaggccacccacggcagcagactgagaagaaccagcaccttcgagagaaagcccagcaagagataccccagcagaagacacagcaccttcaaggccagcaaccccgtgatcgccgcccagctgtgcagcaagaccaaccccgaggtgcacaactaccagccccagtaccaccccaacatccaccccagccagcccagatggcacccccacagccccaacgtgagacccagcttccaggacgacagaagccactggaaggccagcgccagcggcgacgacagccacttcgactacgtgcacgaccagaaccagaagaacctgggcggcatgcagagcatgatgtacagagacaagctgatgaccgccctgtag

SEQ ID NO: 80604 - DNA, 2703 bp, synthetic construct
  misc_feature 1..2703: note = Description of Artificial Sequence: Synthetic coding sequence
  source 1..2703: mol_type = other DNA
atgctgagattcctgagaagaaccttcggcagaagaagcatgcagagatacgccagaggcgccgccggcagaggcgccgccggcctgggcgacgagagagacggcggccccagaggcggccccgccgccgccgccagcagcagcgccctgcccgccgcccccggcggcagcgtgttccccgccggcggcggccccctgctgaccggcggcgccgccgtgcacatcagcgccgccggcgccgccaaggccaccctgtactgcagagtgttcctgctggacggcaccgaggtgagcgtggacctgcccaagcacgccaagggccaggacctgttcgaccagatcgtgtaccacctggacctggtggagaccgactacttcggcctgcagttcctggacagcgcccaggtggcccactggctggaccacgccaagcccatcaagaagcagatgaagatcggccccgcctacgccctgcacttcagagtgaagtactacagcagcgagcccaacaacctgagagaggagttcaccagatacctgttcgtgctgcagctgagacacgacatcctgagcggcaagctgaagtgcccctacgagaccgccgtggagctggccgccctgtgcctgcaggccgagctgggcgagtgcgagctgcccgagcacacccccgagctggtgagcgagttcagattcatccccaaccagaccgaggccatggagttcgacatcttccagagatggaaggagtgcagaggcaagagccccgcccaggccgagctgagctacctgaacaaggccaagtggctggagatgtacggcgtggacatgcacgtggtgagaggcagagacggctgcgagtacagcctgggcctgacccccaccggcatcctgatcttcgagggcgccaacaagatcggcctgttcttctggcccaagatcaccaagatggacttcaagaagagcaagctgaccctggtggtggtggaggacgacgaccagggcagagagcaggagcacaccttcgtgttcagactggacagcgccagaacctgcaagcacctgtggaagtgcgccgtggagcaccacgccttcttcagactgagaacccccggcaacagcaagagcaacagaagcgacttcatcagactgggcagcagattcagattcagcggcagaaccgagtaccaggccacccacggcagcagactgagaagaaccagcaccttcgagagaaagcccagcaagagataccccagcagaagacacagcaccttcaaggccagcaaccccgtgatcgccgcccagctgtgcagcaagaccaaccccgaggtgcacaactaccagccccagtaccaccccaacatccaccccagccagcccagatggcacccccacagccccaacgtgagctaccccctgcccagccccgtgctgagcagcagcgacagactgcccttcggcatcgaggagaacggcggcacccccttcctgaccgccgccagcggcagacaccaccaccagcaccagcaccagcaccagcaccagcaccacagcaactacagcctgagcctgaccctggagaacaaggagggccccctgagaagccccaacagcagcagcaagagcctgaccaagctgagccccggcacccccgccctgttcagcgaggccgccgcccacctgaagaagctggagctggagaccgtgaaggccgccggcccctggccccccctgcacatcaacatcaacaaggccgaggagaagaaggtgagcgagaagaccctgcagacccccctgctgcccagccccgtggccgaccacgtgaagtgcaacatcctgaaggcccagctggagaacgccagcagagtgaacatccagggcggcaaggaggagagccccttcgtgaacatcaacaagaagagcagcctgcaggacgccagcgtgagaagccccatccccatcagagtggagaccgcccagcccgccgtggagaagcccgagatcaagccccccagagtgagaaagctgaccagacagtacagcttcgacgaggacgacctgccccccgacctggccgaggccgtgggcgtgaccaccagcaccaccaccaacaccaccaccgccgccacccaggtgagcgtgcccctgcccagccccaaggtgcagaacgtgagcagcccccacaagagcgagggcaagggcctgctgagccccggcgccaagagccccagcgacagaggcggcgccttcaccctggagcccggcgacctgctgatggacttcaccgaggccacccccctggccgagcccgccagcaacccccactgcgcccacagcagatgcagcccccccctgagcctgcccatgaaggaggagaccaccggcgtgtgcatgtacccccccatcaagaccagactgatcaagaccttccccgtggacaccatgaaccccttccccgacaccttcaccaccggcccccagttcaccgccgacttcagagacagcaagctgcagtgctgccccggccccaccagccccctgatccccgccgccaccctgagacccctgaccgagaccgtgagcaccgtgcagaccatctacaccaccagaaagcccgtgagcctggccgccagcgccgagaccctgagacaggagctggagagagagaagatgatgaagagactgctgatgaccgagctgtag

SEQ ID NO: 80605 - DNA, 2202 bp, synthetic construct
  misc_feature 1..2202: note = Description of Artificial Sequence: Synthetic coding sequence
  source 1..2202: mol_type = other DNA
atgctgagcttcttcagaagaaccctgggcagaagaagcatgagaaagcacgccgagaaggagagactgagagaggcccagagagccgccacccacatccccgccgccggcgacagcaagagcatcatcacctgcagagtgagcctgctggacggcaccgacgtgagcgtggacctgcccaagaaggccaagggccaggagctgttcgaccagatcatgtaccacctggacctgatcgagagcgactacttcggcctgagattcatggacagcgcccaggtggcccactggctggacggcaccaagagcatcaagaagcaggtgaagatcggcagcccctactgcctgcacctgagagtgaagttctacagcagcgagcccaacaacctgagagaggagctgaccagatacctgttcgtgctgcagctgaagcaggacatcctgagcggcaagctggactgccccttcgacaccgccgtgcagctggccgcctacaacctgcaggccgagctgggcgactacgacctggccgagcacagccccgagctggtgagcgagttcagattcgtgcccatccagaccgaggagatggagctggccatcttcgagaagtggaaggagtacagaggccagacccccgcccaggccgagaccaactacctgaacaaggccaagtggctggagatgtacggcgtggacatgcacgtggtgaaggccagagacggcaacgactacagcctgggcctgacccccaccggcgtgctggtgttcgagggcgacaccaagatcggcctgttcttctggcccaagatcaccagactggacttcaagaagaacaagctgaccctggtggtggtggaggacgacgaccagggcaaggagcaggagcacaccttcgtgttcagactggaccaccccaaggcctgcaagcacctgtggaagtgcgccgtggagcaccacgccttcttcagactgagaggccccgtgcagaagagcagccacagaagcggcttcatcagactgggcagcagattcagatacagcggcaagaccgagtaccagaccaccaagaccaacaaggccagaagaagcaccagcttcgagagaagacccagcaagagatacagcagaagaaccctgcagatgaaggcctgcgccaccaagcccgaggagctgagcgtgcacaacaacgtgagcacccagagcaacggcagccagcaggcctggggcatgagaagcgccctgcccgtgagccccagcatcagcagcgcccccgtgcccgtggagatcgagaacctgccccagagccccggcaccgaccagcacgacagaaagtgcatccccctgaacatcgacctgctgaacagccccgacctgctggaggccaccatcggcgacgtgatcggcgccagcgacaccatggagaccagccaggccctgaacgacgtgaacgtggccaccagactgcccggcctgggcgagcccgaggtggagtacgagaccctgaaggacaccagcgagaagctgaagcagctggagatggagaacagccccctgctgagccccagaagcaacatcgacgtgaacatcaacagccaggaggaggtggtgaagctgaccgagaagtgcctgaacaacgtgatcgagagccccggcctgaacgtgatgagagtgccccccgacttcaagagcaacatcctgaaggcccaggtggaggccgtgcacaaggtgaccaaggaggacagcctgctgagccacaagaacgccaacgtgcaggacgccgccaccaacagcgccgtgctgaacgagaacaacgtgcccctgcccaaggagagcctggagaccctgatgctgatcacccccgccgacagcggcagcgtgctgaaggaggccaccgacgagctggacgccctgctggccagcctgaccgagaacctgatcgaccacaccgtggccccccaggtgagcagcaccagcatgatcacccccagatggatcgtgccccagagcggcgccatgagcaacggcctggccggctgcgagatgctgctgaccggcaaggagggccacggcaacaaggacggcatcagcctgatcagcccccccgcccccttcctggtggacgccgtgaccagcagcggccccatcctggccgaggaggccgtgctgaagcagaagtgcctgctgaccaccgagctgtag

SEQ ID NO: 80606 - DNA, 1518 bp, synthetic construct
  misc_feature 1..1518: note = Description of Artificial Sequence: Synthetic coding sequence
  source 1..1518: mol_type = other DNA
atgctgagcttcttcagaagaaccctgggcagaagaagcatgagaaagcacgccgagaaggagagactgagagaggcccagagagccgccacccacatccccgccgccggcgacagcaagagcatcatcacctgcagagtgagcctgctggacggcaccgacgtgagcgtggacctgcccaagaaggccaagggccaggagctgttcgaccagatcatgtaccacctggacctgatcgagagcgactacttcggcctgagattcatggacagcgcccaggtggcccactggctggacggcaccaagagcatcaagaagcaggtgaagatcggcagcccctactgcctgcacctgagagtgaagttctacagcagcgagcccaacaacctgagagaggagctgaccagatacctgttcgtgctgcagctgaagcaggacatcctgagcggcaagctggactgccccttcgacaccgccgtgcagctggccgcctacaacctgcaggccgagctgggcgactacgacctggccgagcacagccccgagctggtgagcgagttcagattcgtgcccatccagaccgaggagatggagctggccatcttcgagaagtggaaggagtacagaggccagacccccgcccaggccgagaccaactacctgaacaaggccaagtggctggagatgtacggcgtggacatgcacgtggtgaaggccagagacggcaacgactacagcctgggcctgacccccaccggcgtgctggtgttcgagggcgacaccaagatcggcctgttcttctggcccaagatcaccagactggacttcaagaagaacaagctgaccctggtggtggtggaggacgacgaccagggcaaggagcaggagcacaccttcgtgttcagactggaccaccccaaggcctgcaagcacctgtggaagtgcgccgtggagcaccacgccttcttcagactgagaggccccgtgcagaagagcagccacagaagcggcttcatcagactgggcagcagattcagatacagcggcaagaccgagtaccagaccaccaagaccaacaaggccagaagaagcaccagcttcgagagaagacccagcaagagatacagcagaagaaccctgcagatgaaggcctgcgccaccaagcccgaggagctgagcgtgcacaacaacgtgagcacccagagcaacggcagccagcaggcctggggcatgagaagcgccctgcccgtgagccccagcatcagcagcgcccccgtgcccgtggagatcgagaacctgccccagagccccggcaccgaccagcacgacagaaagtggctgagcgccgccagcgactgctgccagagaggcggcaaccagtggaacaccagagccctgccccccccccagaccgcccacagaaactacaccgacttcgtgcacgagcacaacgtgaagaacgccggcatcagacacgacgtgcacttccccggccacaccgccatgaccgagatctag

SEQ ID NO: 80607 - DNA, 1518 bp, synthetic construct; identical to SEQ ID NO: 80606
  misc_feature 1..1518: note = Description of Artificial Sequence: Synthetic coding sequence
  source 1..1518: mol_type = other DNA

SEQ ID NO: 80608 - DNA, 2064 bp, synthetic construct
  misc_feature 1..2064: note = Description of Artificial Sequence: Synthetic coding sequence
  source 1..2064: mol_type = other DNA
atgctgagcttcttcagaagaaccctgggcagaagaagcatgagaaagcacgccgagaaggagagactgagagaggcccagagagccgccacccacatccccgccgccggcgacagcaagagcatcatcacctgcagagtgagcctgctggacggcaccgacgtgagcgtggacctgcccaagaaggccaagggccaggagctgttcgaccagatcatgtaccacctggacctgatcgagagcgactacttcggcctgagattcatggacagcgcccaggtggcccactggctggacggcaccaagagcatcaagaagcaggtgaagatcggcagcccctactgcctgcacctgagagtgaagttctacagcagcgagcccaacaacctgagagaggagctgaccagatacctgttcgtgctgcagctgaagcaggacatcctgagcggcaagctggactgccccttcgacaccgccgtgcagctggccgcctacaacctgcaggccgagctgggcgactacgacctggccgagcacagccccgagctggtgagcgagttcagattcgtgcccatccagaccgaggagatggagctggccatcttcgagaagtggaaggagtacagaggccagacccccgcccaggccgagaccaactacctgaacaaggccaagtggctggagatgtacggcgtggacatgcacgtggtgaaggccagagacggcaacgactacagcctgggcctgacccccaccggcgtgctggtgttcgagggcgacaccaagatcggcctgttcttctggcccaagatcaccagactggacttcaagaagaacaagctgaccctggtggtggtggaggacgacgaccagggcaaggagcaggagcacaccttcgtgttcagactggaccaccccaaggcctgcaagcacctgtggaagtgcgccgtggagcaccacgccttcttcagactgagaggccccgtgcagaagagcagccacagaagcggcttcatcagactgggcagcagattcagatacagcggcaagaccgagtaccagaccaccaagaccaacaaggccagaagaagcaccagcttcgagagaagacccagcaagagatacagcagaagaaccctgcagatgaaggcctgcgccaccaagcccgaggagctgagcgtgcacaacaacgtgagcacccagagcaacggcagccagcaggcctggggcatgagaagcgccctgcccgtgagccccagcatcagcagcgcccccgtgcccgtggagatcgagaacctgccccagagccccggcaccgaccagcacgacagaaagtgcatccccctgaacatcgacctgctgaacagccccgacctgctggaggccaccatcggcgacgtgatcggcgccagcgacaccatggagaccagccaggccctgaacgacgtgaacgtggccaccagactgcccggcctgggcgagcccgaggtggagtacgagaccctgaaggacaccagcgagaagctgaagcagctggagatggagaacagccccctgctgagccccagaagcaacatcgacgtgaacatcaacagccaggaggaggtggtgaagctgaccgagaagtgcctgaacaacgtgatcgagagccccggcctgaacgtgatgagagtgccccccgacttcaagagcaacatcctgaaggcccaggtggaggccgtgcacaaggtgaccaaggaggacagcctgctgagccacaagaacgccaacgtgcaggacgccgccaccaacagcgccgtgctgaacgagaacaacgtgcccctgcccaaggagagcctggagaccctgatgctgatcacccccgccgacagcggcagcgtgctgaaggaggccaccgacgagctggacgccctgctggccagcctgaccgagaacctgatcgaccacaccgtggccccccaggtgagcagcaccagcatgatcacccccagatggatcgtgcccctgtggagccacttcggcagaagaagctgccccgaggccgaggtgttcaccgaccactag

SEQ ID NO: 80609 - DNA, 2199 bp, synthetic construct
  misc_feature 1..2199: note = Description of Artificial Sequence: Synthetic coding sequence
  source 1..2199: mol_type = other DNA
atgctgagcttcttcagaagaaccctgggcagaagaagcatgagaaagcacgccgagaaggagagactgagagaggcccagagagccgccacccacatccccgccgccggcgacagcaagagcatcatcacctgcagagtgagcctgctggacggcaccgacgtgagcgtggacctgcccaagaaggccaagggccaggagctgttcgaccagatcatgtaccacctggacctgatcgagagcgactacttcggcctgagattcatggacagcgcccaggtggcccactggctggacggcaccaagagcatcaagaagcaggtgaagatcggcagcccctactgcctgcacctgagagtgaagttctacagcagcgagcccaacaacctgagagaggagctgaccagatacctgttcgtgctgcagctgaagcaggacatcctgagcggcaagctggactgccccttcgacaccgccgtgcagctggccgcctacaacctgcaggccgagctgggcgactacgacctggccgagcacagccccgagctggtgagcgagttcagattcgtgcccatccagaccgaggagatggagctggccatcttcgagaagtggaaggagtacagaggccagacccccgcccaggccgagaccaactacctgaacaaggccaagtggctggagatgtacggcgtggacatgcacgtggtgaaggccagagacggcaacgactacagcctgggcctgacccccaccggcgtgctggtgttcgagggcgacaccaagatcggcctgttcttctggcccaagatcaccagactggacttcaagaagaacaagctgaccctggtggtggtggaggacgacgaccagggcaaggagcaggagcacaccttcgtgttcagactggaccaccccaaggcctgcaagcacctgtggaagtgcgccgtggagcaccacgccttcttcagactgagaggccccgtgcagaagagcagccacagaagcggcttcatcagactgggcagcagattcagatacagcggcaagaccgagtaccagaccaccaagaccaacaaggccagaagaagcaccagcttcgagagaagacccagcaagagatacagcagaagaaccctgcagatgaaggcctgcgccaccaagcccgaggagctgagcgtgcacaacaacgtgagcacccagagcaacggcagccagcaggcctggggcatgagaagcgccctgcccgtgagccccagcatcagcagcgcccccgtgcccgtggagatcgagaacctgccccagagccccggcaccgaccagcacgacagaaagtgcatccccctgaacatcgacctgctgaacagccccgacctgctggaggccaccatcggcgacgtgatcggcgccagcgacaccatggagaccagccaggccctgaacgacgtgaacgtggccaccagactgcccggcctgggcgagcccgaggtggagtacgagaccctgaaggacaccagcgagaagctgaagcagctggagatggagaacagccccctgctgagccccagaagcaacatcgacgtgaacatcaacagccaggaggaggtggtgaagctgaccgagaagtgcctgaacaacgtgatcgagagccccggcctgaacgtgatgagagtgccccccgacttcaagagcaacatcctgaaggcccaggtggaggccgtgcacaaggtgaccaaggaggacagcctgctgagccacaagaacgccaacgtgcaggacgccgccaccaacagcgccgtgctgaacgagaacaacgtgcccctgcccaaggagagcctggagaccctgatgctgatcacccccgccgacagcggcagcgtgctgaaggaggccaccgacgagctggacgccctgctggccagcctgaccgagaacctgatcgaccacaccgtggccccccaggtgagcagcaccagcatgatcacccccagatggatcgtgcccagcggcgccatgagcaacggcctggccggctgcgagatgctgctgaccggcaaggagggccacggcaacaaggacggcatcagcctgatcagcccccccgcccccttcctggtggacgccgtgaccagcagcggccccatcctggccgaggaggccgtgctgaagcagaagtgcctgctgaccaccgagctgtag

SEQ ID NO: 80610 - DNA, 2340 bp, synthetic construct
  misc_feature 1..2340: note = Description of Artificial Sequence: Synthetic coding sequence
  source 1..2340: mol_type = other DNA
atggaggagaaggactacagcgaggccgacggcctgagcgagagaaccacccccagcaaggcccagaagagcccccagaagatcgccaagaagtacaagagcgccatctgcagagtgaccctgctggacgccagcgagtacgagtgcgaggtggagaagcacggcagaggccaggtgctgttcgacctggtgtgcgagcacctgaacctgctggagaaggactacttcggcctgaccttctgcgacgccgacagccagaagaactggctggaccccagcaaggagatcaagaagcagatcagaagcagcccctggaacttcgccttcaccgtgaagttctacccccccgaccccgcccagctgaccgaggacatcaccagatactacctgtgcctgcagctgagagccgacatcatcaccggcagactgccctgcagcttcgtgacccacgccctgctgggcagctacgccgtgcaggccgagctgggcgactacgacgccgaggagcacgtgggcaactacgtgagcgagctgagattcgcccccaaccagaccagagagctggaggagagaatcatggagctgcacaagacctacagaggcatgacccccggcgaggccgagatccacttcctggagaacgccaagaagctgagcatgtacggcgtggacctgcaccacgccaaggacagcgagggcatcgacatcatgctgggcgtgtgcgccaacggcctgctgatctacagagacagactgagaatcaacagattcgcctggcccaagatcctgaagatcagctacaagagaagcaacttctacatcaagatcagacccggcgagtacgagcagttcgagagcaccatcggcttcaagctgcccaaccacagaagcgccaagagactgtggaaggtgtgcatcgagcaccacaccttcttcagactggtgagccccgagcccccccccaagggcttcctggtgatgggcagcaagttcagatacagcggcagaacccaggcccagaccagacaggccagcgccctgatcgacagacccgcccccttcttcgagagaagcagcagcaagagatacaccatgagcagaagcctggacggcgccgagttcagcagacccgccagcgtgagcgagaaccacgacgccggccccgacggcgacaagagagacgaggacggcgagagcggcggccagagaagcgaggccgaggagggcgaggtgagaacccccaccaagatcaaggagctgaagttcctggacaagcccgaggacgtgctgctgaagcaccaggccagcatcaacgagctgaagagaaccctgaaggagcccaacagcaagctgatccacagagacagagactgggagagagagagaagactgcccagcagccccgccagccccagccccaagggcacccccgagaaggccaacgagagagccggcctgagagagggcagcgaggagaaggtgaagccccccagacccagagcccccgagagcgacaccggcgacgaggaccaggaccaggagagagacaccgtgttcctgaaggacaaccacctggccatcgagagaaagtgcagcagcatcaccgtgagcagcaccagcagcctggaggccgaggtggacttcaccgtgatcggcgactaccacggcagcgccttcgaggacttcagcagaagcctgcccgagctggacagagacaagagcgacagcgacaccgagggcctgctgttcagcagagacctgaacaagggcgcccccagccaggacgacgagagcggcggcatcgaggacagccccgacagaggcgcctgcagcacccccgacatgccccagttcgagcccgtgaagaccgagaccatgaccgtgagcagcctggccatcagaaagaagatcgagcccgaggccgtgctgcagaccagagtgagcgccatggacaacacccaggagaacagcctgaagagcggcaagggcgccgccgccatgatccccggcccccagaccgtggccaccgagatcagaagcctgagccccatcatcggcaaggacgtgctgaccagcacctacggcgccaccgccgagaccctgagcaccagcaccaccacccacgtgaccaagaccgtgaagggcggcttcagcgagaccagaatcgagaagagaatcatcatcaccggcgacgaggacgtggaccaggaccaggccctggccctggccatcaaggaggccaagctgcagcaccccgacatgctggtgaccaaggccgtggtgtacagagagaccgaccccagccccgaggagagagacaagaagccccaggagagctag

SEQ ID NO: 80611 - DNA, 2646 bp, synthetic construct
  misc_feature 1..2646: note = Description of Artificial Sequence: Synthetic coding sequence
  source 1..2646: mol_type = other DNA
atgaccaccgagaccggccccgacagcgaggtgaagaaggcccaggaggaggccccccagcagcccgaggccgccgccgccgtgaccacccccgtgacccccgccggccacggccaccccgaggccaacagcaacgagaagcaccccagccagcaggacaccagacccgccgagcagagcctggacatggaggagaaggactacagcgaggccgacggcctgagcgagagaaccacccccagcaaggcccagaagagcccccagaagatcgccaagaagtacaagagcgccatctgcagagtgaccctgctggacgccagcgagtacgagtgcgaggtggagaagcacggcagaggccaggtgctgttcgacctggtgtgcgagcacctgaacctgctggagaaggactacttcggcctgaccttctgcgacgccgacagccagaagaactggctggaccccagcaaggagatcaagaagcagatcagaagcagcccctggaacttcgccttcaccgtgaagttctacccccccgaccccgcccagctgaccgaggacatcaccagatactacctgtgcctgcagctgagagccgacatcatcaccggcagactgccctgcagcttcgtgacccacgccctgctgggcagctacgccgtgcaggccgagctgggcgactacgacgccgaggagcacgtgggcaactacgtgagcgagctgagattcgcccccaaccagaccagagagctggaggagagaatcatggagctgcacaagacctacagaggcatgacccccggcgaggccgagatccacttcctggagaacgccaagaagctgagcatgtacggcgtggacctgcaccacgccaaggacagcgagggcatcgacatcatgctgggcgtgtgcgccaacggcctgctgatctacagagacagactgagaatcaacagattcgcctggcccaagatcctgaagatcagctacaagagaagcaacttctacatcaagatcagacccggcgagtacgagcagttcgagagcaccatcggcttcaagctgcccaaccacagaagcgccaagagactgtggaaggtgtgcatcgagcaccacaccttcttcagactggtgagccccgagcccccccccaagggcttcctggtgatgggcagcaagttcagatacagcggcagaacccaggcccagaccagacaggccagcgccctgatcgacagacccgcccccttcttcgagagaagcagcagcaagagatacaccatgagcagaagcctggacggcgccgagttcagcagacccgccagcgtgagcgagaaccacgacgccggccccgacggcgacaagagagacgaggacggcgagagcggcggccagagaagcgaggccgaggagggcgaggtgagaacccccaccaagatcaaggagctgaagcccgagcaggagaccacccccagacacaagcaggagttcctggacaagcccgaggacgtgctgctgaagcaccaggccagcatcaacgagctgaagagaaccctgaaggagcccaacagcaagctgatccacagagacagagactgggagagagagagaagactgcccagcagccccgccagccccagccccaagggcacccccgagaaggccaacgagagagccggcctgagagagggcagcgaggagaaggtgaagccccccagacccagagcccccgagagcgacaccggcgacgaggaccaggaccaggagagagacaccgtgttcctgaaggacaaccacctggccatcgagagaaagtgcagcagcatcaccgtgagcagcaccagcagcctggaggccgaggtggacttcaccgtgatcggcgactaccacggcagcgccttcgaggacttcagcagaagcctgcccgagctggacagagacaagagcgacagcgacaccgagggcctgctgttcagcagagacctgaacaagggcgcccccagccaggacgacgagagcggcggcatcgaggacagccccgacagaggcgcctgcagcacccccgacatgccccagttcgagcccgtgaagaccgagaccatgaccgtgagcagcctggccatcagaaagaagatcgagcccgaggccgtgctgcagaccagagtgagcgccatggacaacacccagcaggtggacggcagcgccagcgtgggcagagagttcatcgccaccacccccagcatcaccaccgagaccatcagcaccaccatggagaacagcctgaagagcggcaagggcgccgccgccatgatccccggcccccagaccgtggccaccgagatcagaagcctgagccccatcatcggcaaggacgtgctgaccagcacctacggcgccaccgccgagaccctgagcaccagcaccaccacccacgtgaccaagaccgtgaagggcggcttcagcgagaccagaatcgagaagagaatcatcatcaccggcgacgaggacgtggaccaggaccaggccctggccctggccatcaaggaggccaagctgcagcaccccgacatgctggtgaccaaggccgtggtgtacagagagaccgaccccagccccgaggagagagacaagaagccccaggagagctag

SEQ ID NO: 80612 - DNA, 2877 bp, synthetic construct
  misc_feature 1..2877: note = Description of Artificial Sequence: Synthetic coding sequence
  source 1..2877: mol_type = other DNA
atgagcagaagcctggacggcgccgagttcagcagacccgccagcgtgagcgagaaccacgacgccggccccgacggcgacaagagagacgaggacggcgagagcggcggccagagaagcgaggccgaggagggcgaggtgagaacccccaccaagatcaaggagctgaagcccgagcaggagaccacccccagacacaagcaggagttcctggacaagcccgaggacgtgctgctgaagcaccaggccagcatcaacgagctgaagagaaccctgaaggagcccaacagcaagctgatccacagagacagagactgggagagagagagaagactgcccagcagccccgccagccccagccccaagggcacccccgagaaggccaacgagagccagagaacccaggacatcagccagagagacctggtgcccgagcccggcgccgccgccggcctggaggtgttcacccagaagagcctggccgccagccccgagggcagcgagcactgggtgttcatcgagagagagtacaccagacccgaggagctgggcctgctgaaggtgaccaccatgcagcaggaggagagacaggccggcctggccggcatcctggccaacggcagactgagcaaggtggacgtgctggtggacaagttcaaggtggaggtggccaccgaggagatggtgggcaacagaagagccaacacccagcagcagggcaagatgatcgccagccccgaggacttcgagagcgtgggcgaggagggcccctggatcagagagagccccggcggcgccgccctggccagcggcagaaccctggccgagaagctgctggagggcagcgagctgagagccgacaccagagaggccaccatcagaaacagatgcatgagcgacggccagcccgagggccagaccgagctgagaaagggcctggaggagccccacacctgcggcagacccaccgcccccggcaccagacccgccgaggtggacgtgctgagccccgccagcgacaagggcggcctgcagagcttcctgctggaccccgcccacgccgaggccagagccgagctgagcaacgagaccgacaccagcttcgccgagagaagcttctacctgaactacgaggagaaggacagcgaggaccaggtgctgcccccccccctggaggagagaaagggcagactggacgccccccccggcggcgagcccagacccaccctgaacagcctggacctgagagtgagcgccgccgccagcagcagaagcaaggacgaggcccacatgaccagccccaaggagggcgccggcacccccaagaaccacggcggccccggcgacctgaagggcagccccgccggccagaccttcgccgagggctgggaggacgcccagtggggcgtggagggcgagttcccccacctgaccgccagcgccgccagagaggagggcacccccgtgagcggcgacctgctgggcaaggccgaggagagccccaccgaggagctgaagaagcaccccccccacagaggccagggcgtgcaccccgacccccaggcctgcgccctgcccagagccatccccctgaacgtgagaaagcccgtgaagcccgacagaggcaacttcccccccaaggagagaggcgtggtgcccacccagaagggcggcgccgagctgaaggacagagaggccagcgccttcctgcacatggaggtgatcatccccctgcccgccagccccggccacagcgaggacctggccgccctggaggaggccagccccagccccaccagccacggcagcggcgagcccagcgagctgagagagcccttcctgagacacgtgcacctgagcaaggccagccccgagcccaaggaccaggtgggcttcgtggtgagccccgccaccggcggcgagagaagacccccccccatcaccagcagaaagcccagagtggtgcccgaggaggccgagggcagaatccccctgggcttcggcttccccagcggcaagagaagagagatgaccagcttccaggccggcgaccaggagggcagcctggaggacatcagcaagaccagcgtggccaacaagatcagaatcttcgagacccacggcgccgagaccagaagaatgagcgagggcgaggccagaagcctgcccaacgacgtgagcagcgaggcccccgtgggccaggccgagcagcagagaagcaccctgagcgacctgggcttcgcccagctgcagccccccggcgacttcgccagccccaaggccacccacagcaccgtgatccccctggccaccagacacttcagagaggacaccagcgccagctaccaggaggcccacaccgagctggagcccgtgagccccaacagcggctgcgagaccaccctggccgaggccaccggcaccggcaacaagagcggcgacgccgtgagagaggagaagagaagcaccaacctggccgccaacacccccggcaagggcggcagactgagattcgccagccccagcggcccccagagagccggcctgagagagggcagcgaggagaaggtgaagccccccagacccagagcccccgagagcgacaccggcgacgaggaccaggaccaggagagagacaccgtgttcctgaaggacaaccacctggccatcgagagaaagtgcagcagcatcaccgtgagcagcaccagcagcctggaggccgaggtggacttcaccgtgatcggcgactaccacggcagcgccttcgaggacttcagcagaagcctgcccgagctggacagagacaagagcgacagcgacaccgagggcctgctgttcagcagagacctgaacaagggcgcccccagccaggactag

SEQ ID NO: 80613 - DNA, 2643 bp, synthetic construct
  misc_feature 1..2643: note = Description of Artificial Sequence: Synthetic coding sequence
  source 1..2643: mol_type = other DNA
atgaccaccgagaccggccccgacagcgaggtgaagaaggcccaggaggaggccccccagcagcccgaggccgccgccgccgtgaccacccccgtgacccccgccggccacggccaccccgaggccaacagcaacgagaagcaccccagccagcaggacaccagacccgccgagcagagcctggacatggaggagaaggactacagcgaggccgacggcctgagcgagagaaccacccccagcaaggcccagaagagcccccagaagatcgccaagaagtacaagagcgccatctgcagagtgaccctgctggacgccagcgagtacgagtgcgaggtggagaagcacggcagaggccaggtgctgttcgacctggtgtgcgagcacctgaacctgctggagaaggactacttcggcctgaccttctgcgacgccgacagccagaagaactggctggaccccagcaaggagatcaagaagcagatcagaagcagcccctggaacttcgccttcaccgtgaagttctacccccccgaccccgcccagctgaccgaggacatcaccagatactacctgtgcctgcagctgagagccgacatcatcaccggcagactgccctgcagcttcgtgacccacgccctgctgggcagctacgccgtgcaggccgagctgggcgactacgacgccgaggagcacgtgggcaactacgtgagcgagctgagattcgcccccaaccagaccagagagctggaggagagaatcatggagctgcacaagacctacagaggcatgacccccggcgaggccgagatccacttcctggagaacgccaagaagctgagcatgtacggcgtggacctgcaccacgccaaggacagcgagggcatcgacatcatgctgggcgtgtgcgccaacggcctgctgatctacagagacagactgagaatcaacagattcgcctggcccaagatcctgaagatcagctacaagagaagcaacttctacatcaagatcagacccggcgagtacgagcagttcgagagcaccatcggcttcaagctgcccaaccacagaagcgccaagagactgtggaaggtgtgcatcgagcaccacaccttcttcagactggtgagccccgagcccccccccaagggcttcctggtgatgggcagcaagttcagatacagcggcagaacccaggcccagaccagacaggccagcgccctgatcgacagacccgcccccttcttcgagagaagcagcagcaagagatacaccatgagcagaagcctggacggcgccgagttcagcagacccgccagcgtgagcgagaaccacgacgccggccccgacggcgacaagagagacgaggacggcgagagcggcggccagagaagcgaggccgaggagggcgaggtgagaacccccaccaagatcaaggagctgaagcccgagcaggagaccacccccagacacaagcaggagttcctggacaagcccgaggacgtgctgctgaagcaccaggccagcatcaacgagctgaagagaaccctgaaggagcccaacagcaagctgatccacagagacagagactgggagagagagagaagactgcccagcagccccgccagccccagccccaagggcacccccgagaaggccaacgagagagccggcctgagagagggcagcgaggagaaggtgaagccccccagacccagagcccccgagagcgacaccggcgacgaggaccaggaccaggagagagacaccgtgttcctgaaggacaaccacctggccatcgagagaaagtgcagcagcatcaccgtgagcagcaccagcagcctggaggccgaggtggacttcaccgtgatcggcgactaccacggcagcgccttcgaggacttcagcagaagcctgcccgagctggacagagacaagagcgacagcgacaccgagggcctgctgttcagcagagacctgaacaagggcgcccccagccaggacgacgagagcggcggcatcgaggacagccccgacagaggcgcctgcagcacccccgacatgccccagttcgagcccgtgaagaccgagaccatgaccgtgagcagcctggccatcagaaagaagatcgagcccgaggccgtgctgcagaccagagtgagcgccatggacaacacccaggtggacggcagcgccagcgtgggcagagagttcatcgccaccacccccagcatcaccaccgagaccatcagcaccaccatggagaacagcctgaagagcggcaagggcgccgccgccatgatccccggcccccagaccgtggccaccgagatcagaagcctgagccccatcatcggcaaggacgtgctgaccagcacctacggcgccaccgccgagaccctgagcaccagcaccaccacccacgtgaccaagaccgtgaagggcggcttcagcgagaccagaatcgagaagagaatcatcatcaccggcgacgaggacgtggaccaggaccaggccctggccctggccatcaaggaggccaagctgcagcaccccgacatgctggtgaccaaggccgtggtgtacagagagaccgaccccagccccgaggagagagacaagaagccccaggagagctag

SEQ ID NO: 80614 - DNA, 600 bp, synthetic construct
  misc_feature 1..600: note = Description of Artificial Sequence: Synthetic coding sequence
  source 1..600: mol_type = other DNA
atggaggagaaggactacagcgaggccgacggcctgagcgagagaaccacccccagcaaggcccagaagagcccccagaagatcgccaagaagtacaagagcgccatctgcagagtgaccctgctggacgccagcgagtacgagtgcgaggtggagaagcacggcagaggccaggtgctgttcgacctggtgtgcgagcacctgaacctgctggagaaggactacttcggcctgaccttctgcgacgccgacagccagaagaactggctggaccccagcaaggagatcaagaagcagatcagaagcagcccctggaacttcgccttcaccgtgaagttctacccccccgaccccgcccagctgaccgaggacatcaccagatactacctgtgcctgcagctgagagccgacatcatcaccggcagactgccctgcagcttcgtgacccacgccctgctgggcagctacgccgtgcaggccgagctgggcgactacgacgccgaggagcacgtgggcaactacgtgagcgagctgagattcgcccccaaccagaccagagagctggaggagagaatcatggagctgcacaagacctactag

SEQ ID NO: 80615 - DNA, 2106 bp, synthetic construct
  misc_feature 1..2106: note = Description of Artificial Sequence: Synthetic coding sequence
  source 1..2106: mol_type = other DNA
atggtgttcctgggcagaatcaacgaggtggagcccgccaagggcctggccgagagcctggcccccaccgagagaagcgtgaagagcctggacatggaggagaaggactacagcgaggccgacggcctgagcgagagaaccacccccagcaaggcccagaagagcccccagaagatcgccaagaagtacaagagcgccatctgcagagtgaccctgctggacgccagcgagtacgagtgcgaggtggagaagcacggcagaggccaggtgctgttcgacctggtgtgcgagcacctgaacctgctggagaaggactacttcggcctgaccttctgcgacgccgacagccagaagaactggctggaccccagcaaggagatcaagaagcagatcagaagcagcccctggaacttcgccttcaccgtgaagttctacccccccgaccccgcccagctgaccgaggacatcaccagatactacctgtgcctgcagctgagagccgacatcatcaccggcagactgccctgcagcttcgtgacccacgccctgctgggcagctacgccgtgcaggccgagctgggcgactacgacgccgaggagcacgtgggcaactacgtgagcgagctgagattcgcccccaaccagaccagagagctggaggagagaatcatggagctgcacaagacctacagaggcatgacccccggcgaggccgagatccacttcctggagaacgccaagaagctgagcatgtacggcgtggacctgcaccacgccaaggacagcgagggcatcgacatcatgctgggcgtgtgcgccaacggcctgctgatctacagagacagactgagaatcaacagattcgcctggcccaagatcctgaagatcagctacaagagaagcaacttctacatcaagatcagacccggcgagtacgagcagttcgagagcaccatcggcttcaagctgcccaaccacagaagcgccaagagactgtggaaggtgtgcatcgagcaccacaccttcttcagactggtgagccccgagcccccccccaagggcttcctggtgatgggcagcaagttcagatacagcggcagaacccaggcccagaccagacaggccagcgccctgatcgacagacccgcccccttcttcgagagaagcagcagcaagagatacaccatgagcagaagcctggacggcgccgagttcagcagacccgccagcgtgagcgagaaccacgacgccggccccgacggcgacaagagagacgaggacggcgagagcggcggccagagaagcgaggccgaggagggcgaggtgagaacccccaccaagatcaaggagctgaagttcctggacaagcccgaggacgtgctgctgaagcaccaggccagcatcaacgagctgaagagaaccctgaaggagcccaacagcaagctgatccacagagacagagactgggagagagagagaagactgcccagcagccccgccagccccagccccaagggcacccccgagaaggccaacgagcccgtgaagaccgagaccatgaccgtgagcagcctggccatcagaaagaagatcgagcccgaggccgtgctgcagaccagagtgagcgccatggacaacacccagcaggtggacggcagcgccagcgtgggcagagagttcatcgccaccacccccagcatcaccaccgagaccatcagcaccaccatggagaacagcctgaagagcggcaagggcgccgccgccatgatccccggcccccagaccgtggccaccgagatcagaagcctgagccccatcatcggcaaggacgtgctgaccagcacctacggcgccaccgccgagaccctgagcaccagcaccaccacccacgtgaccaagaccgtgaagggcggcttcagcgagaccagaatcgagaagagaatcatcatcaccggcgacgaggacgtggaccaggaccaggccctggccctggccatcaaggaggccaagctgcagcaccccgacatgctggtgaccaaggccgtggtgtacagagagaccgaccccagccccgaggagagagacaagaagccccaggagagctag

SEQ ID NO: 80616 - DNA, 2319 bp, synthetic construct
  misc_feature 1..2319: note = Description of Artificial Sequence: Synthetic coding sequence
  source 1..2319: mol_type = other DNA
atggaggagaaggactacagcgaggccgacggcctgagcgagagaaccacccccagcaaggcccagaagagcccccagaagatcgccaagaagtacaagagcgccatctgcagagtgaccctgctggacgccagcgagtacgagtgcgaggtggagaactggctggaccccagcaaggagatcaagaagcagatcagaagcagcccctggaacttcgccttcaccgtgaagttctacccccccgaccccgcccagctgaccgaggacatcaccagatactacctgtgcctgcagctgagagccgacatcatcaccggcagactgccctgcagcttcgtgacccacgccctgctgggcagctacgccgtgcaggccgagctgggcgactacgacgccgaggagcacgtgggcaactacgtgagcgagctgagattcgcccccaaccagaccagagagctggaggagagaatcatggagctgcacaagacctacagaggcatgacccccggcgaggccgagatccacttcctggagaacgccaagaagctgagcatgtacggcgtggacctgcaccacgccaaggacagcgagggcatcgacatcatgctgggcgtgtgcgccaacggcctgctgatctacagagacagactgagaatcaacagattcgcctggcccaagatcctgaagatcagctacaagagaagcaacttctacatcaagatcagacccggcgagtacgagcagttcgagagcaccatcggcttcaagctgcccaaccacagaagcgccaagagactgtggaaggtgtgcatcgagcaccacaccttcttcagactggtgagccccgagcccccccccaagggcttcctggtgatgggcagcaagttcagatacagcggcagaacccaggcccagaccagacaggccagcgccctgatcgacagacccgcccccttcttcgagagaagcagcagcaagagatacaccatgagcagaagcctggacggcgccgagttcagcagacccgccagcgtgagcgagaaccacgacgccggccccgacggcgacaagagagacgaggacggcgagagcggcggccagagaagcgaggccgaggagggcgaggtgagaacccccaccaagatcaaggagctgaagttcctggacaagcccgaggacgtgctgctgaagcaccaggccagcatcaacgagctgaagagaaccctgaaggagcccaacagcaagctgatccacagagacagagactgggagagagagagaagactgcccagcagccccgccagccccagccccaagggcacccccgagaaggccaacgagagagccggcctgagagagggcagcgaggagaaggtgaagccccccagacccagagcccccgagagcgacaccggcgacgaggaccaggaccaggagagagacaccgtgttcctgaaggacaaccacctggccatcgagagaaagtgcagcagcatcaccgtgagcagcaccagcagcctggaggccgaggtggacttcaccgtgatcggcgactaccacggcagcgccttcgaggacttcagcagaagcctgcccgagctggacagagacaagagcgacagcgacaccgagggcctgctgttcagcagagacctgaacaagggcgcccccagccaggacgacgagagcggcggcatcgaggacagccccgacagaggcgcctgcagcacccccgacatgccccagttcgagcccgtgaagaccgagaccatgaccgtgagcagcctggccatcagaaagaagatcgagcccgaggccgtgctgcagaccagagtgagcgccatggacaacacccagcaggtggacggcagcgccagcgtgggcagagagttcatcgccaccacccccagcatcaccaccgagaccatcagcaccaccatggagaacagcctgaagagcggcaagggcgccgccgccatgatccccggcccccagaccgtggccaccgagatcagaagcctgagccccatcatcggcaaggacgtgctgaccagcacctacggcgccaccgccgagaccctgagcaccagcaccaccacccacgtgaccaagaccgtgaagggcggcttcagcgagaccagaatcgagaagagaatcatcatcaccggcgacgaggacgtggaccaggaccaggccctggccctggccatcaaggaggccaagctgcagcaccccgacatgctggtgaccaaggccgtggtgtacagagagaccgaccccagccccgaggagagagacaagaagccccaggagagctag

SEQ ID NO: 80617 - DNA, 2319 bp, synthetic construct; identical to SEQ ID NO: 80616
  misc_feature 1..2319: note = Description of Artificial Sequence: Synthetic coding sequence
  source 1..2319: mol_type = other DNA

SEQ ID NO: 80618 - DNA, 600 bp, synthetic construct; identical to SEQ ID NO: 80614
  misc_feature 1..600: note = Description of Artificial Sequence: Synthetic coding sequence
  source 1..600: mol_type = other DNA

SEQ ID NO: 80619 - DNA, 2385 bp, synthetic construct
  misc_feature 1..2385: note = Description of Artificial Sequence: Synthetic coding sequence
  source 1..2385: mol_type = other DNA
atgaccaccgagaccggccccgacagcgaggtgaagaaggcccaggaggaggccccccagcagcccgaggccgccgccgccgtgaccacccccgtgacccccgccggccacggccaccccgaggccaacagcaacgagaagcaccccagccagcaggacaccagacccgccgagcagagcctggacatggaggagaaggactacagcgaggccgacggcctgagcgagagaaccacccccagcaaggcccagaagagcccccagaagatcgccaagaagtacaagagcgccatctgcagagtgaccctgctggacgccagcgagtacgagtgcgaggtggagaagcacggcagaggccaggtgctgttcgacctggtgtgcgagcacctgaacctgctggagaaggactacttcggcctgaccttctgcgacgccgacagccagaagaactggctggaccccagcaaggagatcaagaagcagatcagaagcagcccctggaacttcgccttcaccgtgaagttctacccccccgaccccgcccagctgaccgaggacatcaccagatactacctgtgcctgcagctgagagccgacatcatcaccggcagactgccctgcagcttcgtgacccacgccctgctgggcagctacgccgtgcaggccgagctgggcgactacgacgccgaggagcacgtgggcaactacgtgagcgagctgagattcgcccccaaccagaccagagagctggaggagagaatcatggagctgcacaagacctacagaggcatgacccccggcgaggccgagatccacttcctggagaacgccaagaagctgagcatgtacggcgtggacctgcaccacgccaaggacagcgagggcatcgacatcatgctgggcgtgtgcgccaacggcctgctgatctacagagacagactgagaatcaacagattcgcctggcccaagatcctgaagatcagctacaagagaagcaacttctacatcaagatcagacccggcgagtacgagcagttcgagagcaccatcggcttcaagctgcccaaccacagaagcgccaagagactgtggaaggtgtgcatcgagcaccacaccttcttcagactggtgagccccgagcccccccccaagggcttcctggtgatgggcagcaagttcagatacagcggcagaacccaggcccagaccagacaggccagcgccctgatcgacagacccgcccccttcttcgagagaagcagcagcaagagatacaccatgagcagaagcctggacggcgccgagttcagcagacccgccagcgtgagcgagaaccacgacgccggccccgacggcgacaagagagacgaggacggcgagagcggcggccagagaagcgaggccgaggagggcgaggtgagaacccccaccaagatcaaggagctgaagcccgagcaggagaccacccccagacacaagcaggagttcctggacaagcccgaggacgtgctgctgaagcaccaggccagcatcaacgagctgaagagaaccctgaaggagcccaacagcaagctgatccacagagacagagactgggagagagagagaagactgcccagcagccccgccagccccagccccaagggcacccccgagaaggccaacgagagagccggcctgagagagggcagcgaggagaaggtgaagccccccagacccagagcccccgagagcgacaccggcgacgaggaccaggaccaggagagagacaccgtgttcctgaaggacaaccacctggccatcgagagaaagtgcagcagcatcaccgtgagcagcaccagcagcctggaggccgaggtggacttcaccgtgatcggcgactaccacggcagcgccttcgaggacttcagcagaagcctgcccgagctggacagagacaagagcgacagcgacaccgagggcctgctgttcagcagagacctgaacaagggcgcccccagccaggacgacgagagcggcggcatcgaggacagccccgacagaggcgcctgcagcacccccgacatgccccagttcgagcccgtgaagaccgagaccatgaccgtgagcagcctggccatcagaaagaagatcgagcccgaggccgtgctgcagaccagagtgagcgccatggacaacacccaggagaacagcctgaagagcggcaagggcgccgccgccatgatccccggcccccagaccgtggccaccgagatcagaagcctgagccccagcgccgaccacagagagagatgcccccaccagcacctgagaagacactgcggcaaccccctgaacctgcaccaccacccctgccaccagaactgcgagagaagagtgttctag

SEQ ID NO: 80620 - DNA, 507 bp, synthetic construct
  misc_feature 1..507: note = Description of Artificial Sequence: Synthetic coding sequence
  source 1..507: mol_type = other DNA
atgaccaccgagaccggccccgacagcgaggtgaagaaggcccaggaggaggccccccagcagcccgaggccgccgccgccgtgaccacccccgtgacccccgccggccacggccaccccgaggccaacagcaacgagaagcaccccagccagcaggacaccagacccgccgagcagagcctggacatggaggagaaggactacagcgaggccgacggcctgagcgagagaaccacccccagcaaggcccagaagagcccccagaagatcgccaagaagtacaagagcgccatctgcagagtgaccctgctggacgccagcgagtacgagtgcgaggtggagaagcacggcagaggccaggtgctgttcgacctggtgtgcgagcacctgaacctgctggagaaggactacttcggcctgaccttctgcgacgccgacagccagaagaactggctggaccccagcaaggagatcaagaagcagatcagaagcagcccctggaactag

SEQ ID NO: 80621 - DNA, 180 bp, synthetic construct
  misc_feature 1..180: note = Description of Artificial Sequence: Synthetic coding sequence
  source 1..180: mol_type = other DNA
atgaccaccgagaccggccccgacagcgaggtgaagaaggcccaggaggaggccccccagcagcccgaggccgccgccgccgtgaccacccccgtgacccccgccggccacggccaccccgaggccaacagcaacgagaagcaccccagccagcaggacaccagacccgccgagcagtag

SEQ ID NO: 80622 - DNA, 774 bp, synthetic construct
  misc_feature 1..774: note = Description of Artificial Sequence: Synthetic coding sequence
  source 1..774: mol_type = other DNA
atggaggagaaggactacagcgaggccgacggcctgagcgagagaaccacccccagcaaggcccagaagagcccccagaagatcgccaagaagtacaagagcgccatctgcagagtgaccctgctggacgccagcgagtacgagtgcgaggtggagaagcacggcagaggccaggtgctgttcgacctggtgtgcgagcacctgaacctgctggagaaggactacttcggcctgaccttctgcgacgccgacagccagaagaactggctggaccccagcaaggagatcaagaagcagatcagaagcagcccctggaacttcgccttcaccgtgaagttctacccccccgaccccgcccagctgaccgaggacatcaccagatactacctgtgcctgcagctgagagccgacatcatcaccggcagactgccctgcagcttcgtgacccacgccctgctgggcagctacgccgtgcaggccgagctgggcgactacgacgccgaggagcacgtgggcaactacgtgagcgagctgagattcgcccccaaccagaccagagagctggaggagagaatcatggagctgcacaagacctacagaggcatgacccccggcgaggccgagatccacttcctggagaacgccaagaagctgagcatgtacggcgtggacctgcaccacgccaaggacagcgagggcatcgacatcatgctgggcgtgtgcgccaacggcctgctgatctacagagacagactgagaatcaacagattctag

SEQ ID NO: 80623 - DNA, 114 bp, synthetic construct
  misc_feature 1..114: note = Description of Artificial Sequence: Synthetic coding sequence
  source 1..114: mol_type = other DNA
atggaggagaaggactacagcgaggccgacggcctgagcgagagaaccacccccagcaaggcccagaagagcccccagaagatcgccaagaagtacaagagcgccatctgctag

SEQ ID NO: 80624 - DNA, 360 bp, synthetic construct
  misc_feature 1..360: note = Description of Artificial Sequence: Synthetic coding sequence
  source 1..360: mol_type = other DNA
tgaagcgtgggcagagagttcatcgccaccacccccagcatcaccaccgagaccatcagcaccaccatgatcatcggcaaggacgtgctgaccagcacctacggcgccaccgccgagaccctgagcaccagcaccaccacccacgtgaccaagaccgtgaagggcggcttcagcgagaccagaatcgagaagagaatcatcatcaccggcgacgaggacgtggaccaggaccaggccctggccctggccatcaaggaggccaagctgcagcaccccgacatgctggtgaccaaggccgtggtgtacagagagaccgaccccagccccgaggagagagacaagaagccccaggagagctag

SEQ ID NO: 80625 - DNA, 2340 bp, synthetic construct; identical to SEQ ID NO: 80610
  misc_feature 1..2340: note = Description of Artificial Sequence: Synthetic coding sequence
  source 1..2340: mol_type = other DNA

SEQ ID NO: 80626 - DNA, 345 bp, synthetic construct
  misc_feature 1..345: note = Description of Artificial Sequence: Synthetic coding sequence
  source 1..345: mol_type = other DNA
atgaccaccgagaccggccccgacagcgaggtgaagaaggcccaggaggaggccccccagcagcccgaggccgccgccgccgtgaccacccccgtgacccccgccggccacggccaccccgaggccaacagcaacgagaagcaccccagccagcaggacaccagacccgccgagcagagcctggacatggaggagaaggactacagcgaggccgacggcctgagcgagagaaccacccccagcaaggcccagaagagcccccagaagatcgccaagaagtacaagagcgccatctgcagagtgaccctgctggacgccagcgagtacgagtgcgaggtggagtag

SEQ ID NO: 80627 - DNA, 567 bp, synthetic construct
  misc_feature 1..567: note = Description of Artificial Sequence: Synthetic coding sequence
  source 1..567: mol_type = other DNA
atgaccaccgagaccggccccgacagcgaggtgaagaaggcccaggaggaggccccccagcagcccgaggccgccgccgccgtgaccacccccgtgacccccgccggccacggccaccccgaggccaacagcaacgagaagcaccccagccagcaggacaccagacccgccgagcagagcctggacatggaggagaaggactacagcgaggccgacggcctgagcgagagaaccacccccagcaaggcccagaagagcccccagaagatcgccaagaagtacaagagcgccatctgcagagtgaccctgctggacgccagcgagtacgagtgcgaggtggagaagcacggcagaggccaggtgctgttcgacctggtgtgcgagcacctgaacctgctggagaaggactacttcggcctgaccttctgcgacgccgacagccagaagaactggctggaccccagcaaggagatcaagaagcagatcagaagcagcccctggaacttcgccttcaccgtgaagttctacccccccgaccccgcccagctgaccgaggacatcacctag

SEQ ID NO: 80628 - DNA, 705 bp, synthetic construct
  misc_feature 1..705: note = Description of Artificial Sequence: Synthetic coding sequence
  source 1..705: mol_type = other DNA
atggagagcacccccgagcccagacccaacgagtgggagaagagaagaatcacccccctgagcctgcagacccagggcagaaagggcgaccacctgttcaaggacatcctgagcgtgaaggagaagtacctgatgcccaccatctggaccgtggaggagaaggcccaggagaccgacaagaccagagcccccgagagcgagggcccctgcaccggcgccagagacgccgtgaagagcagccacgagaccctgaacatcgtggaggagaagaagagagccgaggtgggcaaggacgagagagtgatcaccgaggagatgaacggcaaggagatcagccccggcagcggccccggcgagatcagaaaggtggagcccgtgacccagaaggacagcaccagcctgagcagcgagagcagcagcagcagcagcgagagcgaggaggaggacgtgggcgagtacagaccccaccacagagtgaccgagggcaccatcagagaggagcaggagtacgaggaggaggtggaggaggagcccagacccgccgccaaggtggtggagagagaggaggccgtgcccgaggccagccccgtgacccaggccggcgccagcgtgatcaccgtggagaccgtgatccaggagaacgtgggcgcccagaagatccccggcgagaagagcgtgcacgagggcgccctgaagcaggactag

SEQ ID NO: 80629 - DNA, 3018 bp, synthetic construct
  misc_feature 1..3018: note = Description of Artificial Sequence: Synthetic coding sequence
  source 1..3018: mol_type = other DNA
atgaccaccgaggtgggcagcgtgagcgaggtgaagaaggacagcagccagctgggcaccgacgccaccaaggagaagcccaaggaggtggccgagaaccagcagaaccagagcagcgaccccgaggaggagaagggcagccagcccccccccgccgccgagagccagagcagcctgagaagacagaagagagagaaggagaccagcgagagcagaggcatcagcagattcatccccccctggctgaagaagcagaagagctacaccctggtggtggccaaggacggcggcgacaagaaggagcccacccaggccgtggtggaggagcaggtgctggacaaggaggagcccctgcccgaggagcagagacaggccaagggcgacgccgaggagatggcccagaagaagcaggagatcaaggtggaggtgaaggaggagaagcccagcgtgagcaaggaggagaagcccagcgtgagcaaggtggagatgcagcccaccgagctggtgagcaaggagagagaggagaaggtgaaggagacccaggaggacaagctggagggcggcgccgccaagagagagaccaaggaggtgcagaccaacgagctgaaggccgagaaggccagccagaaggtgaccaagaagaccaagaccgtgcagtgcaaggtgaccctgctggacggcaccgagtacagctgcgacctggagaagcacgccaagggccaggtgctgttcgacaaggtgtgcgagcacctgaacctgctggagaaggactacttcggcctgctgttccaggagagccccgagcagaagaactggctggaccccgccaaggagatcaagagacagctgagaaacctgccctggctgttcaccttcaacgtgaagttctacccccccgaccccagccagctgaccgaggacatcaccagatacttcctgtgcctgcagctgagacaggacatcgccagcggcagactgccctgcagcttcgtgacccacgccctgctgggcagctacaccctgcaggccgagctgggcgactacgaccccgaggagcacggcagcatcgacctgagcgagttccagttcgcccccacccagaccaaggagctggaggagaaggtggccgagctgcacaagacccacagaggcctgagccccgcccaggccgacagccagttcctggagaacgccaagagactgagcatgtacggcgtggacctgcaccacgccaaggacagcgagggcgtggacatcaagctgggcgtgtgcgccaacggcctgctgatctacaaggacagactgagaatcaacagattcgcctggcccaagatcctgaagatcagctacaagagaagcaacttctacatcaaggtgagacccgccgagctggagcagttcgagagcaccatcggcttcaagctgcccaaccacagagccgccaagagactgtggaaggtgtgcgtggagcaccacaccttctacagactggtgagccccgagcagccccccaaggccaagttcctgaccctgggcagcaagttcagatacagcggcagaacccaggcccagaccagacaggccagcaccctgatcgacagacccgccccccacttcgagagaaccagcagcaagagagtgagcagaagcctggacggcgcccccatcggcgtgatggaccagagcctgatgaaggacttccccggcgccgccggcgagatcagcgcctacggccccggcctggtgagcatcgccgtggtgcaggacggcgacggcagaagagaggtgagaagccccaccaaggccccccacctgcagctgatcgagggcaagaagaacagcctgagagtggagggcgacaacatctacgtgagacacagcaacctgatgctggaggagctggacaaggcccaggaggacatcctgaagcaccaggccagcatcagcgagctgaagagaaacttcatggagagcacccccgagcccagacccaacgagtgggagaagagaagaatcacccccctgagcctgcagacccagggcagcagccacgagaccctgaacatcgtggaggagaagaagagagccgaggtgggcaaggacgagagagtgatcaccgaggagatgaacggcaaggagatcagccccggcagcggccccggcgagatcagaaaggtggagcccgtgacccagaaggacagcaccagcctgagcagcgagagcagcagcagcagcagcgagagcgaggaggaggacgtgggcgagtacagaccccaccacagagtgaccgagggcaccatcagagaggagcaggagtacgaggaggaggtggaggaggagcccagacccgccgccaaggtggtggagagagaggaggccgtgcccgaggccagccccgtgacccaggccggcgccagcgtgatcaccgtggagaccgtgatccaggagaacgtgggcgcccagaagatccccggcgagaagagcgtgcacgagggcgccctgaagcaggacatgggcgaggaggccgaggaggagccccagaaggtgaacggcgaggtgagccacgtggacatcgacgtgctgccccagatcatctgctgcagcgagccccccgtggtgaagaccgagatggtgaccatcagcgacgccagccagagaaccgagatcagcaccaaggaggtgcccatcgtgcagaccgagaccaagaccatcacctacgagagcccccagatcgacggcggcgccggcggcgacagcggcaccctgctgaccgcccagaccatcaccagcgagagcgtgagcaccaccaccaccacccacatcaccaagaccgtgaagggcggcatcagcgagaccagaatcgagaagagaatcgtgatcaccggcgacggcgacatcgaccacgaccaggccctggcccaggccatcagagaggccagagagcagcaccccgacatgagcgtgaccagagtggtggtgcacaaggagaccgagctggccgaggagggcgaggactag

SEQ ID NO: 80630 - DNA, 3018 bp, synthetic construct; identical to SEQ ID NO: 80629
  misc_feature 1..3018: note = Description of Artificial Sequence: Synthetic coding sequence
  source 1..3018: mol_type = other DNA

SEQ ID NO: 80631 - DNA, 2022 bp, synthetic construct
  misc_feature 1..2022: note = Description of Artificial Sequence: Synthetic coding sequence
  source 1..2022: mol_type = other DNA
atgaccaccgaggtgggcagcgtgagcgaggtgaagaaggacagcagccagctgggcaccgacgccaccaaggagaagcccaaggaggtggccgagaaccagcagaaccagagcagcgaccccgaggaggagaagggcagccagcccccccccgccgccgagagccagagcagcctgagaagacagaagagagagaaggagaccagcgagagcagaggcatcagcagattcatccccccctggctgaagaagcagaagagctacaccctggtggtggccaaggacggcggcgacaagaaggagcccacccaggccgtggtggaggagcaggtgctggacaaggaggagcccctgcccgaggagcagagacaggccaagggcgacgccgaggagatggcccagaagaagcaggagatcaaggtggaggtgaaggaggagaagcccagcgtgagcaaggaggagaagcccagcgtgagcaaggtggagatgcagcccaccgagctggtgagcaaggagagagaggagaaggtgaaggagacccaggaggacaagctggagggcggcgccgccaagagagagaccaaggaggtgcagaccaacgagctgaaggccgagaaggccagccagaaggtgaccaagaagaccaagaccgtgcagtgcaaggtgaccctgctggacggcaccgagtacagctgcgacctggagaagcacgccaagggccaggtgctgttcgacaaggtgtgcgagcacctgaacctgctggagaaggactacttcggcctgctgttccaggagagccccgagcagaagaactggctggaccccgccaaggagatcaagagacagctgagaaacctgccctggctgttcaccttcaacgtgaagttctacccccccgaccccagccagctgaccgaggacatcaccagatacttcctgtgcctgcagctgagacaggacatcgccagcggcagactgccctgcagcttcgtgacccacgccctgctgggcagctacaccctgcaggccgagctgggcgactacgaccccgaggagcacggcagcatcgacctgagcgagttccagttcgcccccacccagaccaaggagctggaggagaaggtggccgagctgcacaagacccacagaggcctgagccccgcccaggccgacagccagttcctggagaacgccaagagactgagcatgtacggcgtggacctgcaccacgccaaggacagcgagggcgtggacatcaagctgggcgtgtgcgccaacggcctgctgatctacaaggacagactgagaatcaacagattcgcctggcccaagatcctgaagatcagctacaagagaagcaacttctacatcaaggtgagacccgccgagctggagcagttcgagagcaccatcggcttcaagctgcccaaccacagagccgccaagagactgtggaaggtgtgcgtggagcaccacaccttctacagactggtgagccccgagcagccccccaaggccaagttcctgaccctgggcagcaagttcagatacagcggcagaacccaggcccagaccagacaggccagcaccctgatcgacagacccgccccccacttcgagagaaccagcagcaagagagtgagcagaagcctggacggcgcccccatcggcgtgatggaccagagcctgatgaaggacttccccggcgccgccggcgagatcagcgcctacggccccggcctggtgagcatcgccgtggtgcaggacggcgacggcagaagagaggtgagaagccccaccaaggccccccacctgcagctgatcgagggcaagaccgtgaagggcggcatcagcgagaccagaatcgagaagagaatcgtgatcaccggcgacggcgacatcgaccacgaccaggccctggcccaggccatcagagaggccagagagcagcaccccgacatgagcgtgaccagagtggtggtgcacaaggagaccgagctggccgaggagggcgaggactag

SEQ ID NO: 80632 - DNA, 1902 bp, synthetic construct
  misc_feature 1..1902: note = Description of Artificial Sequence: Synthetic coding sequence
  source 1..1902: mol_type = other DNA
atgaccaccgaggtgggcagcgtgagcgaggtgaagaaggacagcagccagctgggcaccgacgccaccaaggagaagcccaaggaggtggccgagaaccagcagaaccagagcagcgaccccgaggaggagaagggcagccagcccccccccgccgccgagagccagagcagcctgagaagacagaagagagagaaggagaccagcgagagcagaggcatcagcagattcatccccccctggctgaagaagcagaagagctacaccctggtggtggccaaggacggcggcgacaagaaggagcccacccaggccgtggtggaggagcaggtgctggacaaggaggagcccctgcccgaggagcagagacaggccaagggcgacgccgaggagatggcccagaagaagcaggagatcaaggtggaggtgaaggaggagaagcccagcgtgagcaaggaggagaagcccagcgtgagcaaggtggagatgcagcccaccgagctggtgagcaaggagagagaggagaaggtgaaggagacccaggaggacaagctggagggcggcgccgccaagagagagaccaaggaggtgcagaccaacgagctgaaggccgagaaggccagccagaaggtgaccaagaagaccaagaccgtgcagtgcaaggtgaccctgctggacggcaccgagtacagctgcgacctggagaagcacgccaagggccaggtgctgttcgacaaggtgtgcgagcacctgaacctgctggagaaggactacttcggcctgctgttccaggagagccccgagcagaagaactggctggaccccgccaaggagatcaagagacagctgagaaacctgccctggctgttcaccttcaacgtgaagttctacccccccgaccccagccagctgaccgaggacatcaccagatacttcctgtgcctgcagctgagacaggacatcgccagcggcagactgccctgcagcttcgtgacccacgccctgctgggcagctacaccctgcaggccgagctgggcgactacgaccccgaggagcacggcagcatcgacctgagcgagttccagttcgcccccacccagaccaaggagctggaggagaaggtggccgagctgcacaagacccacagaggcctgagccccgcccaggccgacagccagttcctggagaacgccaagagactgagcatgtacggcgtggacctgcaccacgccaaggacagcgagggcgtggacatcaagctgggcgtgtgcgccaacggcctgctgatctacaaggacagactgagaatcaacagattcgcctggcccaagatcctgaagatcagctacaagagaagcaacttctacatcaaggtgagacccgccgagctggagcagttcgagagcaccatcggcttcaagctgcccaaccacagagccgccaagagactgtggaaggtgtgcgtggagcaccacaccttctacagactggtgagccccgagcagccccccaaggccaagttcctgaccctgggcagcaagttcagatacagcggcagaacccaggcccagaccagacaggccagcaccctgatcgacagacccgccccccacttcgagagaaccagcagcaagagagtgagcagaagcctggacggcgcccccatcggcgtgatggaccagagcctgatgaaggacttccccggcgccgccggcgagatcagcgcctacggccccggcctggtgagcatcgccgtggtgcaggacggcgacggcagaagagaggtgagaagccccaccaaggccccccacctgcagctgatcgagggcaagagcagccacgagaccctgaacatcgtggaggagaagagcggccagagactgggcaagaccaaggagtag

SEQ ID NO: 80633 - DNA, 2244 bp, synthetic construct
  misc_feature 1..2244: note = Description of Artificial Sequence: Synthetic coding sequence
  source 1..2244: mol_type = other DNA
atgaccaccgaggtgggcagcgtgagcgaggtgaagaaggacagcagccagctgggcaccgacgccaccaaggagaagcccaaggaggtggccgagaaccagcagaaccagagcagcgaccccgaggaggagaagggcagccagcccccccccgccgccgagagccagagcagcctgagaagacagaagagagagaaggagaccagcgagagcagaggcatcagcagattcatccccccctggctgaagaagcagaagagctacaccctggtggtggccaaggacggcggcgacaagaaggagcccacccaggccgtggtggaggagcaggtgctggacaaggaggagcccctgcccgaggagcagagacaggccaagggcgacgccgaggagatggcccagaagaagcaggagatcaaggtggaggtgaaggaggagaagcccagcgtgagcaaggaggagaagcccagcgtgagcaaggtggagatgcagcccaccgagctggtgagcaaggagagagaggagaaggtgaaggagacccaggaggacaagctggagggcggcgccgccaagagagagaccaaggaggtgcagaccaacgagctgaaggccgagaaggccagccagaaggtgaccaagaagaccaagaccgtgcagtgcaaggtgaccctgctggacggcaccgagtacagctgcgacctggagaagcacgccaagggccaggtgctgttcgacaaggtgtgcgagcacctgaacctgctggagaaggactacttcggcctgctgttccaggagagccccgagcagaagaactggctggaccccgccaaggagatcaagagacagctgagaaacctgccctggctgttcaccttcaacgtgaagttctacccccccgaccccagccagctgaccgaggacatcaccagatacttcctgtgcctgcagctgagacaggacatcgccagcggcagactgccctgcagcttcgtgacccacgccctgctgggcagctacaccctgcaggccgagctgggcgactacgaccccgaggagcacggcagcatcgacctgagcgagttccagttcgcccccacccagaccaaggagctggaggagaaggtggccgagctgcacaagacccacagaggcctgagccccgcccaggccgacagccagttcctggagaacgccaagagactgagcatgtacggcgtggacctgcaccacgccaaggacagcgagggcgtggacatcaagctgggcgtgtgcgccaacggcctgctgatctacaaggacagactgagaatcaacagattcgcctggcccaagatcctgaagatcagctacaagagaagcaacttctacatcaaggtgagacccgccgagctggagcagttcgagagcaccatcggcttcaagctgcccaaccacagagccgccaagagactgtggaaggtgtgcgtggagcaccacaccttctacagactggtgagccccgagcagccccccaaggccaagttcctgaccctgggcagcaagttcagatacagcggcagaacccaggcccagaccagacaggccagcaccctgatcgacagacccgccccccacttcgagagaaccagcagcaagagagtgagcagaagcctggacggcgcccccatcggcgtgatggaccagagcctgatgaaggacttccccggcgccgccggcgagatcagcgcctacggccccggcctggtgagcatcgccgtggtgcaggacggcgacggcagaagagaggtgagaagccccaccaaggccccccacctgcagctgatcgagggcaagccccccgtggtgaagaccgagatggtgaccatcagcgacgccagccagagaaccgagatcagcaccaaggaggtgcccatcgtgcagaccgagaccaagaccatcacctacgagagcccccagatcgacggcggcgccggcggcgacagcggcaccctgctgaccgcccagaccatcaccagcgagagcgtgagcaccaccaccaccacccacatcaccaagaccgtgaagggcggcatcagcgagaccagaatcgagaagagaatcgtgatcaccggcgacggcgacatcgaccacgaccaggccctggcccaggccatcagagaggccagagagcagcaccccgacatgagcgtgaccagagtggtggtgcacaaggagaccgagctggccgaggagggcgaggactag

SEQ ID NO: 80634 - DNA, 1143 bp, synthetic construct
  misc_feature 1..1143: note = Description of Artificial Sequence: Synthetic coding sequence
  source 1..1143: mol_type = other DNA
tgactgggcagcaagttcagatacagcggcagaacccaggcccagaccagacaggccagcaccctgatcgacagacccgccccccacttcgagagaaccagcagcaagagagtgagcagaagcctggacggcgcccccatcggcgtgatggaccagagcctgatgaaggacttccccggcgccgccggcgagatcagcgcctacggccccggcctggtgagcatcgccgtggtgcaggacggcgacggcagaagagaggtgagaagccccaccaaggccccccacctgcagctgatcgagggcaagaagaacagcctgagagtggagggcgacaacatctacgtgagacacagcaacctgatgctggaggagctggacaaggcccaggaggacatcctgaagcaccaggccagcatcagcgagctgaagagaaacttcatggagagcacccccgagcccagacccaacgagtgggagaagagaagaatcacccccctgagcctgcagacccagggcagaaagggcgaccacctgttcaaggacatcctgagcgtgaaggagaagtacctgatgcccaccatctggaccgtggaggagaaggcccaggagaccgacaagaccagagcccccgagagcgagggcccctgcaccggcgccagagacgccgtgaagagcagccacgagaccctgaacatcgtggaggagaagaagagagccgaggtgggcaaggacgagagagtgatcaccgaggagatgaacggcaaggagatcagccccggcagcggccccggcgagatcagaaaggtggagcccgtgacccagaaggacagcaccagcctgagcagcgagagcagcagcagcagcagcgagagcgaggaggaggacgtgggcgagtacagaccccaccacagagtgaccgagggcaccatcagagaggagcaggagtacgaggaggaggtggaggaggagcccagacccgccgccaaggtggtggagagagaggaggccgtgcccgaggccagccccgtgacccaggccggcgccagcgtgatcaccgtggagaccgtgatccaggagaacgtgggcgcccagaagatccccggcgagaagagcgtgcacgagggcgccctgaagcaggactag

SEQ ID NO: 80635 - DNA, 1152 bp, synthetic construct
  misc_feature 1..1152: note = Description of Artificial Sequence: Synthetic coding sequence
  source 1..1152: mol_type = other DNA
atggaggaggaggagacccagctggaggaggagctggacaaggcccaggaggacatcctgaagcaccaggccagcatcagcgagctgaagagaaacttcatggagagcacccccgagcccagacccaacgagtgggagaagagaagaatcacccccctgagcctgcagacccagggcagcagccacgagaccctgaacatcgtggaggagaagaagagagccgaggtgggcaaggacgagagagtgatcaccgaggagatgaacggcaaggagatcagccccggcagcggccccggcgagatcagaaaggtggagcccgtgacccagaaggacagcaccagcctgagcagcgagagcagcagcagcagcagcgagagcgaggaggaggacgtgggcgagtacagaccccaccacagagtgaccgagggcaccatcagagaggagcaggagtacgaggaggaggtggaggaggagcccagacccgccgccaaggtggtggagagagaggaggccgtgcccgaggccagccccgtgacccaggccggcgccagcgtgatcaccgtggagaccgtgatccaggagaacgtgggcgcccagaagatccccggcgagaagagcgtgcacgagggcgccctgaagcaggacatgggcgaggaggccgaggaggagccccagaaggtgaacggcgaggtgagccacgtggacatcgacgtgctgccccagatcatctgctgcagcgagccccccgtggtgaagaccgagatggtgaccatcagcgacgccagccagagaaccgagatcagcaccaaggaggtgcccatcgtgcagaccgagaccaagaccatcacctacgagagcccccagatcgacggcggcgccggcggcgacagcggcaccctgctgaccgcccagaccatcaccagcgagagcgtgagcaccaccaccaccacccacatcaccaagaccgtgaagggcggcatcagcgagaccagaatcgagaagagaatcgtgatcaccggcgacggcgacatcgaccacgaccaggccctggcccaggccatcagagaggccagagagcagcaccccgacatgagcgtgaccagagtggtggtgcacaaggagaccgagctggccgaggagggcgaggactag

SEQ ID NO: 80636 - DNA, 2022 bp, synthetic construct; identical to SEQ ID NO: 80631
  misc_feature 1..2022: note = Description of Artificial Sequence: Synthetic coding sequence
  source 1..2022: mol_type = other DNA

SEQ ID NO: 80637 - DNA, 462 bp, synthetic construct
  misc_feature 1..462: note = Description of Artificial Sequence: Synthetic coding sequence
  source 1..462: mol_type = other DNA
atgaccaccgaggtgggcagcgtgagcgaggtgaagaaggacagcagccagctgggcaccgacgccaccaaggagaagcccaaggaggtggccgagaaccagcagaaccagagcagcgaccccgaggaggagaagggcagccagcccccccccgccgccgagagccagagcagcctgagaagacagaagagagagaaggagaccagcgagagcagaggcatcagcagattcatccccccctggctgaagaagcagaagagctacaccctggtggtggccaaggacggcggcgacaagaaggagcccacccaggccgtggtggaggagcaggtgctggacaaggaggagcccctgcccgaggagcagagacaggccaagggcgacgccgaggagatggcccagaagaagcaggagatcaaggtggaggtgaaggaggagaagcccagcgtgagcaaggagtag

SEQ ID NO: 80638 - DNA, 2244 bp, synthetic construct; identical to SEQ ID NO: 80633
  misc_feature 1..2244: note = Description of Artificial Sequence: Synthetic coding sequence
  source 1..2244: mol_type = other DNA

SEQ ID NO: 80639 - DNA, 540 bp, synthetic construct
  misc_feature 1..540: note = Description of Artificial Sequence: Synthetic coding sequence
  source 1..540: mol_type = other DNA
atgaccaccgaggtgggcagcgtgagcgaggtgaagaaggacagcagccagctgggcaccgacgccaccaaggagaagcccaaggaggtggccgagaaccagcagaaccagagcagcgaccccgaggaggagaagggcagccagcccccccccgccgccgagagccagagcagcctgagaagacagaagagagagaaggagaccagcgagagcagaggcatcagcagattcatccccccctggctgaagaagcagaagagctacaccctggtggtggccaaggacggcggcgacaagaaggagcccacccaggccgtggtggaggagcaggtgctggacaaggaggagcccctgcccgaggagcagagacaggccaagggcgacgccgaggagatggcccagaagaagcaggagatcaaggtggaggtgaaggaggagaagcccagcgtgagcaaggaggagaagcccagcgtgagcaaggtggagatgcagcccaccgagctggtgagcaaggagagagaggagaaggtgaaggagtag

SEQ ID NO: 80640 - DNA, 2559 bp, synthetic construct
  misc_feature 1..2559: note = Description of Artificial Sequence: Synthetic coding sequence
  source 1..2559: mol_type = other DNA
atgaccaccgaggtgggcagcgtgagcgaggtgaagaaggacagcagccagctgggcaccgacgccaccaaggagaagcccaaggaggtggccgagaaccagcagaaccagagcagcgaccccgaggaggagaagggcagccagcccccccccgccgccgagagccagagcagcctgagaagacagaagagagagaaggagaccagcgagagcagaggcatcagcagattcatccccccctggctgaagaagcagaagagctacaccctggtggtggccaaggacggcggcgacaagaaggagcccacccaggccgtggtggaggagcaggtgctggacaaggaggagcccctgcccgaggagcagagacaggccaagggcgacgccgaggagatggcccagaagaagcaggagatcaaggtggaggtgaaggaggagaagcccagcgtgagcaaggaggagaagcccagcgtgagcaaggtggagatgcagcccaccgagctggtgagcaaggagagagaggagaaggtgaaggagacccaggaggacaagctggagggcggcgccgccaagagagagaccaaggaggtgcagaccaacgagctgaaggccgagaaggccagccagaaggtgaccaagaagaccaagaccgtgcagtgcaaggtgaccctgctggacggcaccgagtacagctgcgacctggagaagcacgccaagggccaggtgctgttcgacaaggtgtgcgagcacctgaacctgctggagaaggactacttcggcctgctgttccaggagagccccgagcagaagaactggctggaccccgccaaggagatcaagagacagctgagaaacctgccctggctgttcaccttcaacgtgaagttctacccccccgaccccagccagctgaccgaggacatcaccagatacttcctgtgcctgcagctgagacaggacatcgccagcggcagactgccctgcagcttcgtgacccacgccctgctgggcagctacaccctgcaggccgagctgggcgactacgaccccgaggagcacggcagcatcgacctgagcgagttccagttcgcccccacccagaccaaggagctggaggagaaggtggccgagctgcacaagacccacagaggcctgagccccgcccaggccgacagccagttcctggagaacgccaagagactgagcatgtacggcgtggacctgcaccacgccaaggacagcgagggcgtggacatcaagctgggcgtgtgcgccaacggcctgctgatctacaaggacagactgagaatcaacagattcgcctggcccaagatcctgaagatcagctacaagagaagcaacttctacatcaaggtgagacccgccgagctggagcagttcgagagcaccatcggcttcaagctgcccaaccacagagccgccaagagactgtggaaggtgtgcgtggagcaccacaccttctacagactggtgagccccgagcagccccccaaggccaagttcctgaccctgggcagcaagttcagatacagcggcagaacccaggcccagaccagacaggccagcaccctgatcgacagacccgccccccacttcgagagaaccagcagcaagagagtgagcagaagcctggacggcgcccccatcggcgtgatggaccagagcctgatgaaggacttccccggcgccgccggcgagatcagcgcctacggccccggcctggtgagcatcgccgtggtgcaggacggcgacggcagaagagaggtgagaagccccaccaaggccccccacctgcagctgatcgagggcaagagcagccacgagaccctgaacatcgtggaggagaagaagagagccgaggtgggcaaggacgagagagtgatcaccgaggagatgaacggcaaggagatcagccccggcagcggccccggcgagatcagaaaggtggagcccgtgacccagaaggacagcaccagcctgagcagcgagagcagcagcagcagcagcgagagcgaggaggaggacgtgggcgagtacagaccccaccacagagtgaccgagggcaccatcagagaggagcaggagtacgaggaggaggtggaggaggagcccagacccgccgccaagccccccgtggtgaagaccgagatggtgaccatcagcgacgccagccagagaaccgagatcagcaccaaggaggtgcccatcgtgcagaccgagaccaagaccatcacctacgagagcccccagatcgacggcggcgccggcggcgacagcggcaccctgctgaccgcccagaccatcaccagcgagagcgtgagcaccaccaccaccacccacatcaccaagaccgtgaagggcggcatcagcgagaccagaatcgagaagagaatcgtgatcaccggcgacggcgacatcgaccacgaccaggccctggcccaggccatcagagaggccagagagcagcaccccgacatgagcgtgaccagagtggtggtgcacaaggagaccgagctggccgaggagggcgaggactag

SEQ ID NO: 80641 - DNA, 357 bp, synthetic construct
  misc_feature 1..357: note = Description of Artificial Sequence: Synthetic coding sequence
  source 1..357: mol_type = other DNA
atgaccaccgaggtgggcagcgtgagcgaggtgaagaaggacagcagccagctgggcaccgacgccaccaaggagaagcccaaggaggtggccgagaaccagcagaaccagagcagcgaccccgaggaggagaagggcagccagcccccccccgccgccgagagccagagcagcctgagaagacagaagagagagaaggagaccagcgagagcagaggcatcagcagattcatccccccctggctgaagaagcagaagagctacaccctggtggtggccaaggacggcggcgacaagaaggagcccacccaggccgtggtggaggagcaggtgctggacaaggaggagcccctgtag

SEQ ID NO: 80642 - DNA, 606 bp, synthetic construct
  misc_feature 1..606: note = Description of Artificial Sequence: Synthetic coding sequence
  source 1..606: mol_type = other DNA
atggaggaggaggagacccagctggaggagaagaacagcctgagagtggagggcgacaacatctacgtgagacacagcaacctgatgctggaggagctggacaaggcccaggaggacatcctgaagcaccaggccagcatcagcgagctgaagagaaacttcatggagagcacccccgagcccagacccaacgagtgggagaagagaagaatcacccccctgagcctgcagacccagggcaccagagcccccgagagcgagggcccctgcaccggcgccagagacgccgtgaagccccccgtggtgaagaccgagatggtgaccatcagcgacgccagccagagaaccgagatcagcaccaaggaggtgcccatcgtgcagaccgagaccaagaccatcacctacgagagcccccagaccgtgaagggcggcatcagcgagaccagaatcgagaagagaatcgtgatcaccggcgacggcgacatcgaccacgaccaggccctggcccaggccatcagagaggccagagagcagcaccccgacatgagcgtgaccagagtggtggtgcacaaggagaccgagctggccgaggagggcgaggactag

SEQ ID NO: 80643 - DNA, 384 bp, synthetic construct
  misc_feature 1..384: note = Description of Artificial Sequence: Synthetic coding sequence
  source 1..384: mol_type = other DNA
atgaccaccgaggtgggcagcgtgagcgaggtgaagaaggacagcagccagctgggcaccgacgccaccaaggagaagcccaaggaggtggccgagaaccagcagaaccagagcagcgaccccgaggaggagaagggcagccagcccccccccgccgccgagagccagagcagcctgagaagacagaagagagagaaggagaccagcgagagcagaggcatcagcagattcatccccccctggctgaagaagcagaagagctacaccctggtggtggccaaggacggcggcgacaagaaggagcccacccaggccgtggtggaggagcaggtgctggacaaggaggagcccctgcccgaggagcagagacaggccaagggctag

SEQ ID NO: 80644 - DNA, 489 bp, synthetic construct
  misc_feature 1..489: note = Description of Artificial Sequence: Synthetic coding sequence
  source 1..489: mol_type = other DNA
atgaccaccgaggtgggcagcgtgagcgaggtgaagaaggacagcagccagctgggcaccgacgccaccaaggagaagcccaaggaggtggccgagaaccagcagaaccagagcagcgaccccgaggaggagaagggcagccagcccccccccgccgccgagagccagagcagcctgagaagacagaagagagagaaggagaccagcgagagcagaggcatcagcagattcatccccccctggctgaagaagcagaagagctacaccctggtggtggccaaggacggcggcgacaagaaggagcccacccaggccgtggtggaggagcaggtgctggacaaggaggagcccctgcccgaggagcagagacaggccaagggcgacgccgaggagatggcccagaagaagcaggagatcaaggtggaggtgaaggaggagaagcccagcgtgagcaaggaggagaagcccagcgtgagcaaggtggagtag

SEQ ID NO: 80645 - DNA, 3264 bp, synthetic construct
  misc_feature 1..3264: note = Description of Artificial Sequence: Synthetic coding sequence
  source 1..3264: mol_type = other DNA
atgaccaccgagagcggcagcgacagcgagagcaagcccgaccaggaggccgagccccaggaggccgccggcgcccagggcagagccggcgcccccgtgcccgagccccccaaggaggagcagcagcaggccctggagcagttcgccgccgccgccgcccacagcacccccgtgagaagagaggtgaccgacaaggagcaggagttcgccgccagagccgccaagcagctggagtaccagcagctggaggacgacaagctgagccagaagagcagcagcagcaagctgagcagaagccccctgaagatcgtgaagaagcccaagagcatgcagtgcaaggtgatcctgctggacggcagcgagtacacctgcgacgtggagaagagaagcagaggccaggtgctgttcgacaaggtgtgcgagcacctgaacctgctggagaaggactacttcggcctgacctacagagacgccgagaaccagaagaactggctggaccccgccaaggagatcaagaagcaggtgagaagcggcgcctggcacttcagcttcaacgtgaagttctacccccccgaccccgcccagctgagcgaggacatcaccagatactacctgtgcctgcagctgagagacgacatcgtgagcggcagactgccctgcagcttcgtgaccctggccctgctgggcagctacaccgtgcagagcgagctgggcgactacgaccccgacgagtgcggcagcgactacatcagcgagttcagattcgcccccaaccacaccaaggagctggaggacaaggtgatcgagctgcacaagagccacagaggcatgacccccgccgaggccgagatgcacttcctggagaacgccaagaagctgagcatgtacggcgtggacctgcaccacgccaaggacagcgagggcgtggagatcatgctgggcgtgtgcgccagcggcctgctgatctacagagacagactgagaatcaacagattcgcctggcccaaggtgctgaagatcagctacaagagaaacaacttctacatcaagatcagacccggcgagttcgagcagttcgagagcaccatcggcttcaagctgcccaaccacagagccgccaagagactgtggaaggtgtgcgtggagcaccacaccttcttcagactgctgctgcccgaggccccccccaagaagttcctgaccctgggcagcaagttcagatacagcggcagaacccaggcccagaccagaagagccagcgccctgatcgacagacccgccccctacttcgagagaagcagcagcaagagatacaccatgagcagaagcctggacggcgaggtgggcaccggccagtacgccaccaccaagggcatcagccagaccaacctgatcaccaccgtgacccccgagaagaaggccgaggaggagagagacgaggaggaggacaagagaagaaagggcgaggaggtgacccccatcagcgccatcagacacgagggcaagagccccggcctgggcaccgacagctgccccctgagcccccccagcacccactgcgcccccaccagccccaccgagctgagaagaagatgcaaggagaacgactgcaagctgcccggctacgagcccagcagagccgagcacctgcccggcgagcccgccctggacagcgacggccccggcagaccctacctgggcgaccaggacgtggccttcagctacagacagcagaccggcaagggcaccaccctgttcagcttcagcctgcagctgcccgagagcttccccagcctgctggacgacgacggctacctgagcttccccaacctgagcgagaccaacctgctgccccagagcctgcagcactacctgcccatcagaagccccagcctggtgccctgcttcctgttcatcttcttcttcctgctgagcgccagcttcagcgtgccctacgccctgaccctgagcttccccctggccctgtgcctgtgctacctggagcccaaggccgccagcctgagcgccagcctggacaacgaccccagcgacagcagcgaggaggagaccgacagcgagagaaccgacaccgccgccgacggcgagaccaccgccaccgagagcgaccaggaggaggacgccgagctgaaggcccaggagctggagaagacccaggacgacctgatgaagcaccagaccaacatcagcgagctgaagagaaccttcctggagaccagcaccgacaccgccgtgaccaacgagtgggagaagagactgagcaccagccccgtgagactggccgccagacaggaggacgcccccatgatcgagcccctggtgcccgaggagaccaagcagagcagcggcgagaagctgatggacggcagcgagatcttcagcctgctggagagcgccagaaagcccaccgagttcatcggcggcgtgaccagcaccagccagagctgggtgcagaagatggagaccaagaccgagagcagcggcatcgagaccgagcccaccgtgcaccacctgcccctgagcaccgagaaggtggtgcaggagaccgtgctggtggaggagagaagagtggtgcacgccagcggcgacgccagctacagcgccggcgacagcggcgacgccgccgcccagcccgccttcaccggcatcaagggcaaggagggcagcgccctgaccgagggcgccaaggaggagggcggcgaggaggtggccaaggccgtgctggagcaggaggagaccgccgccgccagcagagagagacaggaggagcagagcgccgccatccacatcagcgagaccctggagcagaagccccacttcgagagcagcaccgtgaagaccgagaccatcagcttcggcagcgtgagccccggcggcgtgaagctggagatcagcaccaaggaggtgcccgtggtgcacaccgagaccaagaccatcacctacgagagcagccaggtggaccccggcaccgacctggagcccggcgtgctgatgagcgcccagaccatcaccagcgagaccaccagcaccaccaccaccacccacatcaccaagaccgtgaagggcggcatcagcgagaccagaatcgagaagagaatcgtgatcaccggcgacgccgacatcgaccacgaccaggccctggcccaggccatcaaggaggccaaggagcagcaccccgacatgagcgtgaccaaggtggtggtgcacaaggagaccgagatcacccccgaggacggcgaggactag

SEQ ID NO: 80646 - DNA, 3264 bp, synthetic construct; identical to SEQ ID NO: 80645
  misc_feature 1..3264: note = Description of Artificial Sequence: Synthetic coding sequence
  source 1..3264: mol_type = other DNA

SEQ ID NO: 80647 - DNA, 2598 bp, synthetic construct
  misc_feature 1..2598: note = Description of Artificial Sequence: Synthetic coding sequence
  source 1..2598: mol_type = other DNA
atgaccaccgagagcggcagcgacagcgagagcaagcccgaccaggaggccgagccccaggaggccgccggcgcccagggcagagccggcgcccccgtgcccgagccccccaaggaggagcagcagcaggccctggagcagttcgccgccgccgccgcccacagcacccccgtgagaagagaggtgaccgacaaggagcaggagttcgccgccagagccgccaagcagctggagtaccagcagctggaggacgacaagctgagccagaagagcagcagcagcaagctgagcagaagccccctgaagatcgtgaagaagcccaagagcatgcagtgcaaggtgatcctgctggacggcagcgagtacacctgcgacgtggagaagagaagcagaggccaggtgctgttcgacaaggtgtgcgagcacctgaacctgctggagaaggactacttcggcctgacctacagagacgccgagaaccagaagaactggctggaccccgccaaggagatcaagaagcaggtgagaagcggcgcctggcacttcagcttcaacgtgaagttctacccccccgaccccgcccagctgagcgaggacatcaccagatactacctgtgcctgcagctgagagacgacatcgtgagcggcagactgccctgcagcttcgtgaccctggccctgctgggcagctacaccgtgcagagcgagctgggcgactacgaccccgacgagtgcggcagcgactacatcagcgagttcagattcgcccccaaccacaccaaggagctggaggacaaggtgatcgagctgcacaagagccacagaggcatgacccccgccgaggccgagatgcacttcctggagaacgccaagaagctgagcatgtacggcgtggacctgcaccacgccaaggacagcgagggcgtggagatcatgctgggcgtgtgcgccagcggcctgctgatctacagagacagactgagaatcaacagattcgcctggcccaaggtgctgaagatcagctacaagagaaacaacttctacatcaagatcagacccggcgagttcgagcagttcgagagcaccatcggcttcaagctgcccaaccacagagccgccaagagactgtggaaggtgtgcgtggagcaccacaccttcttcagactgctgctgcccgaggccccccccaagaagttcctgaccctgggcagcaagttcagatacagcggcagaacccaggcccagaccagaagagccagcgccctgatcgacagacccgccccctacttcgagagaagcagcagcaagagatacaccatgagcagaagcctggacggcgccagcgtgaacgagaaccacgagatctacatgaaggacagcatgagcgccgccgaggtgggcaccggccagtacgccaccaccaagggcatcagccagaccaacctgatcaccaccgtgacccccgagaagaaggccgaggaggagagagacgaggaggaggacaagagaagaaagggcgaggaggtgacccccatcagcgccatcagacacgagggcaagaccgacagcgagagaaccgacaccgccgccgacggcgagaccaccgccaccgaggagctggagaagacccaggacgacctgatgaagcaccagaccaacatcagcgagctgaagagaaccttcctggagaccagcaccgacaccgccgtgaccaacgagtgggagaagagactgagcaccagccccgtgagactggccgccagacaggaggacgcccccatgatcgagcccctggtgcccgaggagaagatggagaccaagaccgagagcagcggcatcgagaccgagcccaccgtgcaccacctgcccctgagcaccgagaaggtggtgcaggagaccgtgctggtggaggagagaagagtggtgcacgccagcggcgacgccagctacagcgccggcgacagcggcgacgccgccgcccagcccgccttcaccggcatcaagggcaaggagggcagcgccctgaccgagggcgccaaggaggagggcggcgaggaggtggccaaggccgtgctggagcaggaggagaccgccgccgccagcagagagagacaggaggagcagagcgccgccatccacatcagcgagaccctggagcagaagccccacttcgagagcagcaccgtgaagaccgagaccatcagcttcggcagcgtgagccccggcggcgtgaagctggagatcagcaccaaggaggtgcccgtggtgcacaccgagaccaagaccatcacctacgagagcagccaggtggaccccggcaccgacctggagcccggcgtgctgatgagcgcccagaccatcaccagcgagaccaccagcaccaccaccaccacccacatcaccaagaccgtgaagggcggcatcagcgagaccagaatcgagaagagaatcgtgatcaccggcgacgccgacatcgaccacgaccaggccctggcccaggccatcaaggaggccaaggagcagcaccccgacatgagcgtgaccaaggtggtggtgcacaaggagaccgagatcacccccgaggacggcgaggactag

SEQ ID NO: 80648 - DNA, 1155 bp, synthetic construct
  misc_feature 1..1155: note = Description of Artificial Sequence: Synthetic coding sequence
  source 1..1155: mol_type = other DNA
atgaagcaccagaccaacatcagcgagctgaagagaaccttcctggagaccagcaccgacaccgccgtgaccaacgagtgggagaagagactgagcaccagccccgtgagactggccgccagacaggaggacgcccccatgatcgagcccctggtgcccgaggagaccaaggaggagaccgagatcagcgagaaggtgatcttcctgcagcagggcagcgcccccttcctggagagccagaccaagcagagcagcggcgagaagctgatggacggcagcgagatcttcagcctgctggagagcgccagaaagcccaccgagttcatcggcggcgtgaccagcaccagccagagctgggtgcagaagatggagaccaagaccgagagcagcggcatcgagaccgagcccaccgtgcaccacctgcccctgagcaccgagaaggtggtgcaggagaccgtgctggtggaggagagaagagtggtgcacgccagcggcgacgccagctacagcgccggcgacagcggcgacgccgccgcccagcccgccttcaccggcatcaagggcaaggagggcagcgccctgaccgagggcgccaaggaggagggcggcgaggaggtggccaaggccgtgctggagcaggaggagaccgccgccgccagcagagagagacaggaggagcagagcgccgccatccacatcagcgagaccctggagcagaagccccacttcgagagcagcaccgtgaagaccgagaccatcagcttcggcagcgtgagccccggcggcgtgaagctggagatcagcaccaaggaggtgcccgtggtgcacaccgagaccaagaccatcacctacgagagcagccaggtggaccccggcaccgacctggagcccggcgtgctgatgagcgcccagaccatcaccagcgagaccaccagcaccaccaccaccacccacatcaccaagaccgtgaagggcggcatcagcgagaccagaatcgagaagagaatcgtgatcaccggcgacgccgacatcgaccacgaccaggccctggcccaggccatcaaggaggccaaggagcagcaccccgacatgagcgtgaccaaggtggtggtgcacaaggagaccgagatcacccccgaggacggcgaggactag

SEQ ID NO: 80649 - DNA, 2271 bp, synthetic construct
  misc_feature 1..2271: note = Description of Artificial Sequence: Synthetic coding sequence
  source 1..2271: mol_type = other DNA
atgcagtgcaaggtgatcctgctggacggcagcgagtacacctgcgacgtggagaagagaagcagaggccaggtgctgttcgacaaggtgtgcgagcacctgaacctgctggagaaggactacttcggcctgacctacagagacgccgagaaccagaagaactggctggaccccgccaaggagatcaagaagcaggtgagaagcggcgcctggcacttcagcttcaacgtgaagttctacccccccgaccccgcccagctgagcgaggacatcaccagatactacctgtgcctgcagctgagagacgacatcgtgagcggcagactgccctgcagcttcgtgaccctggccctgctgggcagctacaccgtgcagagcgagctgggcgactacgaccccgacgagtgcggcagcgactacatcagcgagttcagattcgcccccaaccacaccaaggagctggaggacaaggtgatcgagctgcacaagagccacagaggcatgacccccgccgaggccgagatgcacttcctggagaacgccaagaagctgagcatgtacggcgtggacctgcaccacgccaaggacagcgagggcgtggagatcatgctgggcgtgtgcgccagcggcctgctgatctacagagacagactgagaatcaacagattcgcctggcccaaggtgctgaagatcagctacaagagaaacaacttctacatcaagatcagacccggcgagttcgagcagttcgagagcaccatcggcttcaagctgcccaaccacagagccgccaagagactgtggaaggtgtgcgtggagcaccacaccttcttcagactgctgctgcccgaggccccccccaagaagttcctgaccctgggcagcaagttcagatacagcggcagaacccaggcccagaccagaagagccagcgccctgatcgacagacccgccccctacttcgagagaagcagcagcaagagatacaccatgagcagaagcctggacggcgccagcgtgaacgagaaccacgagatctacatgaaggacagcatgagcgccgccgaggtgggcaccggccagtacgccaccaccaagggcatcagccagaccaacctgatcaccaccgtgacccccgagaagaaggccgaggaggagagagacgaggaggaggacaagagaagaaagggcgaggaggtgacccccatcagcgccatcagacacgagggcaagaccgacagcgagagaaccgacaccgccgccgacggcgagaccaccgccaccgaggagctggagaagacccaggacgacctgatgaagcaccagaccaacatcagcgagctgaagagaaccttcctggagaccagcaccgacaccgccgtgaccaacgagtgggagaagagactgagcaccagccccgtgagactggccgccagacaggaggacgcccccatgatcgagcccctggtgcccgaggagaagatggagaccaagaccgagagcagcggcatcgagaccgagcccaccgtgcaccacctgcccctgagcaccgagaaggtggtgcaggagaccgtgctggtggaggagagaagagtggtgcacgccagcggcgacgccagctacagcgccggcgacagcggcgacgccgccgcccagcccgccttcaccggcatcaagggcaaggagggcagcgccctgaccgagggcgccaaggaggagggcggcgaggaggtggccaaggccgtgctggagcaggaggagaccgccgccgccagcagagagagacaggaggagcagagcgccgccatccacatcagcgagaccctggagcagaagccccacttcgagagcagcaccgtgaagaccgagaccatcagcttcggcagcgtgagccccggcggcgtgaagctggagatcagcaccaaggaggtgcccgtggtgcacaccgagaccaagaccatcacctacgagagcagccaggtggaccccggcaccgacctggagcccggcgtgctgatgagcgcccagaccatcaccagcgagaccaccagcaccaccaccaccacccacatcaccaagaccgtgaagggcggcatcagcgagaccagaatcgagaagagaatcgtgatcaccggcgacgccgacatcgaccacgaccaggccctggcccaggccatcaaggaggccaaggagcagcaccccgacatgagcgtgaccaaggtggtggtgcacaaggagaccgagatcacccccgaggacggcgaggactag

SEQ ID NO: 80650 - DNA, 1179 bp, synthetic construct
  misc_feature 1..1179: note = Description of Artificial Sequence: Synthetic coding sequence
  source 1..1179: mol_type = other DNA
atgaagcaccagaccaacatcagcgagctgaagagaaccttcctggagaccagcaccgacaccgccgtgaccaacgagtgggagaagagactgagcaccagccccgtgagactggccgccagacaggaggacgcccccatgatcgagcccctggtgcccgaggagcccagcgtgatcaagaagatgcaggagggcgacagcgccgacagcgtggtgaccagcagacagatcatcttccagaagaccgtgcccagcaccctggagaccaagcagagcagcggcgagaagctgatggacggcagcgagatcttcagcctgctggagagcgccagaaagcccaccgagttcatcggcggcgtgaccagcaccagccagagctgggtgcagaagatggagaccaagaccgagagcagcggcatcgagaccgagcccaccgtgcaccacctgcccctgagcaccgagaaggtggtgcaggagaccgtgctggtggaggagagaagagtggtgcacgccagcggcgacgccagctacagcgccggcgacagcggcgacgccgccgcccagcccgccttcaccggcatcaagggcaaggagggcagcgccctgaccgagggcgccaaggaggagggcggcgaggaggtggccaaggccgtgctggagcaggaggagaccgccgccgccagcagagagagacaggaggagcagagcgccgccatccacatcagcgagaccctggagcagaagccccacttcgagagcagcaccgtgaagaccgagaccatcagcttcggcagcgtgagccccggcggcgtgaagctggagatcagcaccaaggaggtgcccgtggtgcacaccgagaccaagaccatcacctacgagagcagccaggtggaccccggcaccgacctggagcccggcgtgctgatgagcgcccagaccatcaccagcgagaccaccagcaccaccaccaccacccacatcaccaagaccgtgaagggcggcatcagcgagaccagaatcgagaagagaatcgtgatcaccggcgacgccgacatcgaccacgaccaggccctggcccaggccatcaaggaggccaaggagcagcaccccgacatgagcgtgaccaaggtggtggtgcacaaggagaccgagatcacccccgaggacggcgaggactag

SEQ ID NO: 80651 - DNA, 936 bp, synthetic construct
  misc_feature 1..936: note = Description of Artificial Sequence: Synthetic coding sequence
  source 1..936: mol_type = other DNA
agatggcagctgggcggcgccgccaccgccgccgccggcggcgccagagtgtggagacccctgcccgccagcagaagcagcttccccccccccagccccagactggaccccggcgagttcgagggcaagagcccctgcggcggcacctgcgagcagccctacctgagcctgcccctgagatacttcttcagccccagaaaggtggtgcccgccggctgcgagcaggcccccggcggcgcccccaaggagggcttcggcgacagcgacagcgagagcaagcccgaccaggaggccgagccccaggaggccgccggcgcccagggcagagccggcgcccccgtgcccgagccccccaaggaggagcagcagcaggccctggagcagttcgccgccgccgccgcccacagcacccccgtgagaagagaggtgaccgacaaggagcaggagttcgccgccagagccgccaagcagctggagtaccagcagctggaggacgacaagctgagccagaagagcagcagcagcaagctgagcagaagccccctgaagatcgtgaagaagcccaagagcatgcagtgcaaggtgatcctgctggacggcagcgagtacacctgcgacgtggagaagagaagcagaggccaggtgctgttcgacaaggtgtgcgagcacctgaacctgctggagaaggactacttcggcctgacctacagagacgccgagaaccagaagaactggctggaccccgccaaggagatcaagaagcaggtgagaagcggcgcctggcacttcagcttcaacgtgaagttctacccccccgaccccgcccagctgagcgaggacatcaccagatactacctgtgcctgcagctgagagacgacatcgtgagcggcagactgccctgcagcttcgtgaccctggccctgctgggcagctag

SEQ ID NO: 80652 - DNA, 2652 bp, synthetic construct
  misc_feature 1..2652: note = Description of Artificial Sequence: Synthetic coding sequence
  source 1..2652: mol_type = other DNA
atgaccaccgagagcggcagcgacagcgagagcaagcccgaccaggaggccgagccccaggaggccgccggcgcccagggcagagccggcgcccccgtgcccgagccccccaaggaggagcagcagcaggccctggagcagttcgccgccgccgccgcccacagcacccccgtgagaagagaggtgaccgacaaggagcaggagttcgccgccagagccgccaagcagctggagtaccagcagctggaggacgacaagctgagccagaagagcagcagcagcaagctgagcagaagccccctgaagatcgtgaagaagcccaagagcatgcagtgcaaggtgatcctgctggacggcagcgagtacacctgcgacgtggagaagagaagcagaggccaggtgctgttcgacaaggtgtgcgagcacctgaacctgctggagaaggactacttcggcctgacctacagagacgccgagaaccagaagaactggctggaccccgccaaggagatcaagaagcaggtgagaagcggcgcctggcacttcagcttcaacgtgaagttctacccccccgaccccgcccagctgagcgaggacatcaccagatactacctgtgcctgcagctgagagacgacatcgtgagcggcagactgccctgcagcttcgtgaccctggccctgctgggcagctacaccgtgcagagcgagctgggcgactacgaccccgacgagtgcggcagcgactacatcagcgagttcagattcgcccccaaccacaccaaggagctggaggacaaggtgatcgagctgcacaagagccacagaggcatgacccccgccgaggccgagatgcacttcctggagaacgccaagaagctgagcatgtacggcgtggacctgcaccacgccaaggacagcgagggcgtggagatcatgctgggcgtgtgcgccagcggcctgctgatctacagagacagactgagaatcaacagattcgcctggcccaaggtgctgaagatcagctacaagagaaacaacttctacatcaagatcagacccggcgagttcgagcagttcgagagcaccatcggcttcaagctgcccaaccacagagccgccaagagactgtggaaggtgtgcgtggagcaccacaccttcttcagactgctgctgcccgaggccccccccaagaagttcctgaccctgggcagcaagttcagatacagcggcagaacccaggcccagaccagaagagccagcgccctgatcgacagacccgccccctacttcgagagaagcagcagcaagagatacaccatgagcagaagcctggacggcgccagcgtgaacgagaaccacgagatctacatgaaggacagcatgagcgccgccgaggtgggcaccggccagtacgccaccaccaagggcatcagccagaccaacctgatcaccaccgtgacccccgagaagaaggccgaggaggagagagacgaggaggaggacaagagaagaaagggcgaggaggtgacccccatcagcgccatcagacacgagggcaagaccgacagcgagagaaccgacaccgccgccgacggcgagaccaccgccaccgagagcgaccaggaggaggacgccgagctgaaggcccaggagctggagaagacccaggacgacctgatgaagcaccagaccaacatcagcgagctgaagagaaccttcctggagaccagcaccgacaccgccgtgaccaacgagtgggagaagagactgagcaccagccccgtgagactggccgccagacaggaggacgcccccatgatcgagcccctggtgcccgaggagaccaagcagagcagcggcgagaagctgatggacggcagcgagatcttcagcctgctggagagcgccagaaagcccaccgagttcatcggcggcgtgaccagcaccagccagagctgggtgcagaagatggagaccaagaccgagagcagcggcatcgagaccgagcccaccgtgcaccacctgcccctgagcaccgagaaggtggtgcaggagaccgtgctggtggaggagagaagagtggtgcacgccagcggcgacgccagctacagcgccggcgacagcggcgacgccgccgcccagcccgccttcaccggcatcaagggcaaggagggcagcgccctgaccgagggcgccaaggaggagggcggcgaggaggtggccaaggccgtgctggagcaggaggagaccgccgccgccagcagagagagacaggaggagcagagcgccgccatccacatcagcgagaccctggagcagaagccccacttcgagagcagcaccgtgaagaccgagaccatcagcttcggcagcgtgagccccggcggcgtgaagctggagatcagcaccaaggaggtgcccgtggtgcacaccgagaccaagaccatcacctacgagagcagccaggtggaccccggcaccgacctggagcccggcgtgctgatgagcgcccagaccatcaccagcgagaccaccagcaccaccaccaccacccacatcaccaagaccgtgaagggcggcatcagcgagaccagaatcgagaagagaatcgtgatcaccggcgacgccgacatcgaccacgaccaggagtag

SEQ ID NO: 80653 - DNA, 2271 bp, synthetic construct; identical to SEQ ID NO: 80649
  misc_feature 1..2271: note = Description of Artificial Sequence: Synthetic coding sequence
  source 1..2271: mol_type = other DNA

SEQ ID NO: 80654 - DNA, 2166 bp, synthetic construct
  misc_feature 1..2166: note = Description of Artificial Sequence: Synthetic coding sequence
  source 1..2166: mol_type = other DNA
atgggccagggcgagcccagccagagaagcaccggcctggccggcctgtacgccgcccccgccgccagccccgtgttcatcaagggcagcggcatggacgccctgggcatcaagagctgcgacttccaggccgccagaaacaacgaggagcaccacaccaaggccctgagcagcagaagactgttcgtgagaagaggccagcccttcaccatcatcctgtacttcagagcccccgtgagagccttcctgcccgccctgaagaaggtggccctgaccgcccagaccggcgagcagcccagcaagatcaacagaacccaggccaccttccccatcagcagcctgggcgacagaaagtggtggagcgccgtggtggaggagagagacgcccagagctggaccatcagcgtgaccacccccgccgacgccgtgatcggccactacagcctgctgctgcaggtgagcggcagaaagcagctgctgctgggccagttcaccctgctgttcaacccctggaacagagaggacgccgtgttcctgaagaacgaggcccagagaatggagtacctgctgaaccagaacggcctgatctacctgggcaccgccgactgcatccaggccgagagctgggacttcggccagttcgagggcgacgtgatcgacctgagcctgagactgctgagcaaggacaagcaggtggagaagtggagccagcccgtgcacgtggccagagtgctgggcgccctgctgcacttcctgaaggagcagagagtgctgcccaccccccagacccaggccacccaggagggcgccctgctgaacaagagaagaggcagcgtgcccatcctgagacagtggctgaccggcagaggcagacccgtgtacgacggccaggcctgggtgctggccgccgtggcctgcaccgtgctgagatgcctgggcatccccgccagagtggtgaccaccttcgccagcgcccagggcaccggcggcagactgctgatcgacgagtactacaacgaggagggcctgcagaacggcgagggccagagaggcagaatctggatcttccagaccagcaccgagtgctggatgaccagacccgccctgccccagggctacgacggctggcagatcctgcaccccagcgcccccaacggcggcggcgtgctgggcagctgcgacctggtgcccgtgagagccgtgaaggagggcaccctgggcctgacccccgccgtgagcgacctgttcgccgccatcaacgccagctgcgtggtgtggaagtgctgcgaggacggcaccctggagctgaccgacagcaacaccaagtacgtgggcaacaacatcagcaccaagggcgtgggcagcgacagatgcgaggacatcacccagaactacaagtaccccgagggcagcctgcaggagaaggaggtgctggagagagtggagaaggagaagatggagagagagaaggacaacggcatcagaccccccagcctggagaccgccagccccctgtacctgctgctgaaggcccccagcagcctgcccctgagaggcgacgcccagatcagcgtgaccctggtgaaccacagcgagcaggagaaggccgtgcagctggccatcggcgtgcaggccgtgcactacaacggcgtgctggccgccaagctgtggagaaagaagctgcacctgaccctgagcgccaacctggagaagatcatcaccatcggcctgttcttcagcaacttcgagagaaacccccccgagaacaccttcctgagactgaccgccatggccacccacagcgagagcaacctgagctgcttcgcccaggaggacatcgccatctgcagaccccacctggccatcaagatgcccgagaaggccgagcagtaccagcccctgaccgccagcgtgagcctgcagaacagcctggacgcccccatggaggactgcgtgatcagcatcctgggcagaggcctgatccacagagagagaagctacagattcagaagcgtgtggcccgagaacaccatgtgcgccaagttccagttcacccccacccacgtgggcctgcagagactgaccgtggaggtggactgcaacatgttccagaacctgaccaactacaagagcgtgaccgtggtggcccccgagctgagcgcctag

SEQ ID NO: 80655 - DNA, 1860 bp, synthetic construct
  misc_feature 1..1860: note = Description of Artificial Sequence: Synthetic coding sequence
  source 1..1860: mol_type = other DNA
atgggccaggccctgggcatcaagagctgcgacttccaggccgccagaaacaacgaggagcaccacaccaaggccctgagcagcagaagactgttcgtgagaagaggccagcccttcaccatcatcctgtacttcagagcccccgtgagagccttcctgcccgccctgaagaaggtggccctgaccgcccagaccggcgagcagcccagcaagatcaacagaacccaggccaccttccccatcagcagcctgggcgacagaaagtggtggagcgccgtggtggaggagagagacgcccagagctggaccatcagcgtgaccacccccgccgacgccgtgatcggccactacagcctgctgctgcaggtgagcggcagaaagcagctgctgctgggccagttcaccctgctgttcaacccctggaacagagaggacgccgtgttcctgaagaacgaggcccagagaatggagtacctgctgaaccagaacggcctgatctacctgggcaccgccgactgcatccaggccgagagctgggacttcggccagttcgagggcgacgtgatcgacctgagcctgagactgctgagcaaggacaagcaggtggagaagtggagccagcccgtgcacgtggccagagtgctgggcgccctgctgcacttcctgaaggagcagagagtgctgcccaccccccagacccaggccacccaggagggcgccctgctgaacaagagaagaggcagcgtgcccatcctgagacagtggctgaccggcagaggcagacccgtgtacgacggccaggcctgggtgctggccgccgtggcctgcaccgtgctgagatgcctgggcatccccgccagagtggtgaccaccttcgccagcgcccagggcaccggcggcagactgctgatcgacgagtactacaacgaggagggcctgcagaacggcgagggccagagaggcagaatctggaagtgctgcgaggacggcaccctggagctgaccgacagcaacaccaagtacgtgggcaacaacatcagcaccaagggcgtgggcagcgacagatgcgaggacatcacccagaactacaagtaccccgagggcagcctgcaggagaaggaggtgctggagagagtggagaaggagaagatggagagagagaaggacaacggcatcagaccccccagcctggagaccgccagccccctgtacctgctgctgaaggcccccagcagcctgcccctgagaggcgacgcccagatcagcgtgaccctggtgaaccacagcgagcaggagaaggccgtgcagctggccatcggcgtgcaggccgtgcactacaacggcgtgctggccgccaagctgtggagaaagaagctgcacctgaccctgagcgccaacctggagaagatcatcaccatcggcctgttcttcagcaacttcgagagaaacccccccgagaacaccttcctgagactgaccgccatggccacccacagcgagagcaacctgagctgcttcgcccaggaggacatcgccatctgcagaccccacctggccatcaagatgcccgagaaggccgagcagtaccagcccctgaccgccagcgtgagcctgcagaacagcctggacgcccccatggaggactgcgtgatcagcatcctgggcagaggcctgatccacagagagagaagctacagattcagaagcgtgtggcccgagaacaccatgtgcgccaagttccagttcacccccacccacgtgggcctgcagagactgaccgtggaggtggactgcaacatgttccagaacctgaccaactacaagagcgtgaccgtggtggcccccgagctgagcgcctag

SEQ ID NO: 80656 - DNA, 2076 bp, synthetic construct
  misc_feature 1..2076: note = Description of Artificial Sequence: Synthetic coding sequence
  source 1..2076: mol_type = other DNA
atgggccaggccctgggcatcaagagctgcgacttccaggccgccagaaacaacgaggagcaccacaccaaggccctgagcagcagaagactgttcgtgagaagaggccagcccttcaccatcatcctgtacttcagagcccccgtgagagccttcctgcccgccctgaagaaggtggccctgaccgcccagaccggcgagcagcccagcaagatcaacagaacccaggccaccttccccatcagcagcctgggcgacagaaagtggtggagcgccgtggtggaggagagagacgcccagagctggaccatcagcgtgaccacccccgccgacgccgtgatcggccactacagcctgctgctgcaggtgagcggcagaaagcagctgctgctgggccagttcaccctgctgttcaacccctggaacagagaggacgccgtgttcctgaagaacgaggcccagagaatggagtacctgctgaaccagaacggcctgatctacctgggcaccgccgactgcatccaggccgagagctgggacttcggccagttcgagggcgacgtgatcgacctgagcctgagactgctgagcaaggacaagcaggtggagaagtggagccagcccgtgcacgtggccagagtgctgggcgccctgctgcacttcctgaaggagcagagagtgctgcccaccccccagacccaggccacccaggagggcgccctgctgaacaagagaagaggcagcgtgcccatcctgagacagtggctgaccggcagaggcagacccgtgtacgacggccaggcctgggtgctggccgccgtggcctgcaccgtgctgagatgcctgggcatccccgccagagtggtgaccaccttcgccagcgcccagggcaccggcggcagactgctgatcgacgagtactacaacgaggagggcctgcagaacggcgagggccagagaggcagaatctggatcttccagaccagcaccgagtgctggatgaccagacccgccctgccccagggctacgacggctggcagatcctgcaccccagcgcccccaacggcggcggcgtgctgggcagctgcgacctggtgcccgtgagagccgtgaaggagggcaccctgggcctgacccccgccgtgagcgacctgttcgccgccatcaacgccagctgcgtggtgtggaagtgctgcgaggacggcaccctggagctgaccgacagcaacaccaagtacgtgggcaacaacatcagcaccaagggcgtgggcagcgacagatgcgaggacatcacccagaactacaagtaccccgagggcagcctgcaggagaaggaggtgctggagagagtggagaaggagaagatggagagagagaaggacaacggcatcagaccccccagcctggagaccgccagccccctgtacctgctgctgaaggcccccagcagcctgcccctgagaggcgacgcccagatcagcgtgaccctggtgaaccacagcgagcaggagaaggccgtgcagctggccatcggcgtgcaggccgtgcactacaacggcgtgctggccgccaagctgtggagaaagaagctgcacctgaccctgagcgccaacctggagaagatcatcaccatcggcctgttcttcagcaacttcgagagaaacccccccgagaacaccttcctgagactgaccgccatggccacccacagcgagagcaacctgagctgcttcgcccaggaggacatcgccatctgcagaccccacctggccatcaagatgcccgagaaggccgagcagtaccagcccctgaccgccagcgtgagcctgcagaacagcctggacgcccccatggaggactgcgtgatcagcatcctgggcagaggcctgatccacagagagagaagctacagattcagaagcgtgtggcccgagaacaccatgtgcgccaagttccagttcacccccacccacgtgggcctgcagagactgaccgtggaggtggactgcaacatgttccagaacctgaccaactacaagagcgtgaccgtggtggcccccgagctgagcgcctag

SEQ ID NO: 80657 - DNA, 1842 bp, synthetic construct
  misc_feature 1..1842: note = Description of Artificial Sequence: Synthetic coding sequence
  source 1..1842: mol_type = other DNA
atgggccaggccctgggcatcaagagctgcgacttccaggccgccagaaacaacgaggagcaccacaccaaggccctgagcagcagaagactgttcgtgagaagaggccagcccttcaccatcatcctgtacttcagagcccccgtgagagccttcctgcccgccctgaagaaggtggccctgaccgcccagaccgaggacgccgtgttcctgaagaacgaggcccagagaatggagtacctgctgaaccagaacggcctgatctacctgggcaccgccgactgcatccaggccgagagctgggacttcggccagttcgagggcgacgtgatcgacctgagcctgagactgctgagcaaggacaagcaggtggagaagtggagccagcccgtgcacgtggccagagtgctgggcgccctgctgcacttcctgaaggagcagagagtgctgcccaccccccagacccaggccacccaggagggcgccctgctgaacaagagaagaggcagcgtgcccatcctgagacagtggctgaccggcagaggcagacccgtgtacgacggccaggcctgggtgctggccgccgtggcctgcaccgtgctgagatgcctgggcatccccgccagagtggtgaccaccttcgccagcgcccagggcaccggcggcagactgctgatcgacgagtactacaacgaggagggcctgcagaacggcgagggccagagaggcagaatctggatcttccagaccagcaccgagtgctggatgaccagacccgccctgccccagggctacgacggctggcagatcctgcaccccagcgcccccaacggcggcggcgtgctgggcagctgcgacctggtgcccgtgagagccgtgaaggagggcaccctgggcctgacccccgccgtgagcgacctgttcgccgccatcaacgccagctgcgtggtgtggaagtgctgcgaggacggcaccctggagctgaccgacagcaacaccaagtacgtgggcaacaacatcagcaccaagggcgtgggcagcgacagatgcgaggacatcacccagaactacaagtaccccgagggcagcctgcaggagaaggaggtgctggagagagtggagaaggagaagatggagagagagaaggacaacggcatcagaccccccagcctggagaccgccagccccctgtacctgctgctgaaggcccccagcagcctgcccctgagaggcgacgcccagatcagcgtgaccctggtgaaccacagcgagcaggagaaggccgtgcagctggccatcggcgtgcaggccgtgcactacaacggcgtgctggccgccaagctgtggagaaagaagctgcacctgaccctgagcgccaacctggagaagatcatcaccatcggcctgttcttcagcaacttcgagagaaacccccccgagaacaccttcctgagactgaccgccatggccacccacagcgagagcaacctgagctgcttcgcccaggaggacatcgccatctgcagaccccacctggccatcaagatgcccgagaaggccgagcagtaccagcccctgaccgccagcgtgagcctgcagaacagcctggacgcccccatggaggactgcgtgatcagcatcctgggcagaggcctgatccacagagagagaagctacagattcagaagcgtgtggcccgagaacaccatgtgcgccaagttccagttcacccccacccacgtgggcctgcagagactgaccgtggaggtggactgcaacatgttccagaacctgaccaactacaagagcgtgaccgtggtggcccccgagctgagcgcctag

SEQ ID NO: 80658 - DNA, 1218 bp, synthetic construct
  misc_feature 1..1218: note = Description of Artificial Sequence: Synthetic coding sequence
  source 1..1218: mol_type = other DNA
atggagagactgcagaagcagcccctgaccagccccggcagcgtgagccccagcagagacagcagcgtgcccggcagccccagcagcatcgtggccaagatggacaaccaggtgctgggctacaaggacctggccgccatccccaaggacaaggccatcctggacatcgagagacccgacctgatgatctacgagccccacttcacctacagcctgctggagcacgtggagctgcccagaagcagagagagaagcctgagccccaagagcaccagccccccccccagccccgaggtgtgggccgacagcagaagccccggcatcatcagccaggccagcgcccccagaaccaccggcacccccagaaccagcctgccccacttccaccaccccgagaccagcagacccgacagcaacatctacaagaagccccccatctacaagcagagagagagcgtgggcggcagcccccagaccaagcacctgatcgaggacctgatcatcgagagcagcaagttccccgccgcccagccccccgaccccaaccagcccgccaagatcgagaccgactactggccctgcccccccagcctggccgtggtggagaccgagtggagaaagagaaaggccagcagaagaggcgccgaggaggaggaggaggaggaggacgacgacagcggcgaggagatgaaggccctgagagagagacagagagaggagctgagcaaggtgaccagcaacctgggcaagatgatcctgaaggaggagatggagaagagcctgcccatcagaagaaagaccagaagcctgcccgacagaacccccttccacaccagcctgcaccagggcaccagcaagagcagcagcctgcccgcctacggcagaaccaccctgagcagactgcagagcaccgagttcagccccagcggcagcgagaccggcagccccggcctgcagaacggcgagggccagagaggcagaatggacagaggcaacagcctgccctgcgtgctggagcagaagatctacccctacgagatgctggtggtgaccaacaagggcagaaccaagctgccccccggcgtggacagaatgagactggagagacacctgagcgccgaggacttcagcagagtgttcgccatgagccccgaggagttcggcaagctggccctgtggaagagaaacgagctgaagaagaaggccagcctgttctag

SEQ ID NO: 80659 - DNA, 1218 bp, synthetic construct; identical to SEQ ID NO: 80658
  misc_feature 1..1218: note = Description of Artificial Sequence: Synthetic coding sequence
  source 1..1218: mol_type = other DNA

SEQ ID NO: 80660 - DNA, 1626 bp, synthetic construct
  misc_feature 1..1626: note = Description of Artificial Sequence: Synthetic coding sequence
  source 1..1626: mol_type = other DNA
atgatctacgagccccacttcacctacagcctgctggagcacgtggagctgcccagaagcagagagagaagcctgagccccaagagcaccagccccccccccagccccgaggtgtgggccgacagcagaagccccggcatcatcagccaggccagcgcccccagaaccaccggcacccccagaaccagcctgccccacttccaccaccccgagaccagcagacccgacagcaacatctacaagaagccccccatctacaagcagagagagagcgtgggcggcagcccccagaccaagcacctgatcgaggacctgatcatcgagagcagcaagttccccgccgcccagccccccgaccccaaccagcccgccaagatcgagaccgactactggccctgcccccccagcctggccgtggtggagaccgagtggagaaagagaaaggccagcagaagaggcgccgaggaggaggaggaggaggaggacgacgacagcggcgaggagatgaaggccctgagagagagacagagagaggagctgagcaaggtgaccagcaacctgggcaagatgatcctgaaggaggagatggagaagagcctgcccatcagaagaaagaccagaagcctgcccgacagaacccccttccacaccagcctgcaccagggcaccagcaagagcagcagcctgcccgcctacggcagaaccaccctgagcagactgcagagcaccgagttcagccccagcggcagcgagaccggcagccccggcctgcagaacggcgagggccagagaggcagaatggacagaggcaacagcctgccctgcgtgctggagcagaagatctacccctacgagatgctggtggtgaccaacaagggcagaaccaagctgccccccggcgtggacagaatgagactggagagacacctgagcgccgaggacttcagcagagtgttcgccatgagccccgaggagttcggcaagctggccctgtggaagagaaacgagctgaagaagaaggccagcctgttcggcgccctggtggtgagacccgtgggctgcctggagcagctggagggcagatgcagaggcggcaagagacccggcagaaagagcagcagactgctgtgcagaccccccagcccccccatcctgacccccgacagcttccccgccctgcagccccccgcccccctgaccctggtgggcaccggccccagcagcgccagcggcagagaggtgaccccccccctgcagctggccctgaccagcgccagaaagcccagagccagcaagcccttcgcccccgccctgagactgccccagaagcccggcctgagagtggagatgccccccacccacgaccccggccccccccccgccagcagacccagaaacggcaacagcagcaccaagcccggcaccggccagaagctgggcctgcccccccccctggacggcgtgaagagacccggcctggcccacttcggcgtgagctggctgcccgccctgacctacacccacgcccccccccacaccctgtgcagcctgaagaacgtgatctactggggcccccccagctgcttcccccacctgcccctgccctacctgaccccccccgcctag

SEQ ID NO: 80661 - DNA, 1152 bp, synthetic construct
  misc_feature 1..1152: note = Description of Artificial Sequence: Synthetic coding sequence
  source 1..1152: mol_type = other DNA
atggagagactgcagaagcagcccctgaccagccccggcagcgtgagccccagcagagacagcagcgtgcccggcagccccagcagcatcgtggccaagatggacaaccaggtgctgggctacaaggacctggccgccatccccaaggacaaggccatcctggacatcgagagacccgacctgatgatctacgagccccacttcacctacagcctgctggagcacgtggagctgcccagaagcagagagagaagcctgagccccaagagcaccagccccccccccagccccgaggtgtgggccgacagcagaagccccggcatcatcagccaggccagcgcccccagaaccaccggcacccccagaaccagcctgccccacttccaccaccccgagaccagcagacccgacagcaacatctacaagaagccccccatctacaagcagagagagagcgtgggcggcagcccccagaccaagcacctgatcgaggacctgatcatcgagagcagcaagttccccgccgcccagccccccgaccccaaccagcccgccaagatcgagaccgactactggccctgcccccccagcctggccgtggtggagaccgagtggagaaagagaaaggccagcagaagaggcgccgaggaggaggaggaggaggaggacgacgacagcggcgaggagatgaaggccctgagagagagacagagagaggagctgagcaaggtgaccagcaacctgggcaagatgatcctgaaggaggagatggagaagagcctgcccatcagaagaaagaccagaagcctgcccgacagaacccccttccacaccagcctgcaccagggcaccagcaagagcagcagcctgcccgcctacggcagaaccaccctgagcagactgcagagcaccgagttcagccccagcggcagcgagaccggcagccccggcctgcagatctacccctacgagatgctggtggtgaccaacaagggcagaaccaagctgccccccggcgtggacagaatgagactggagagacacctgagcgccgaggacttcagcagagtgttcgccatgagccccgaggagttcggcaagctggccctgtggaagagaaacgagctgaagaagaaggccagcctgttctag

SEQ ID NO: 80662 - DNA, 1152 bp, synthetic construct; identical to SEQ ID NO: 80661
  misc_feature 1..1152: note = Description of Artificial Sequence: Synthetic coding sequence
  source 1..1152: mol_type = other DNA

SEQ ID NO: 80663 - DNA, 1218 bp, synthetic construct; identical to SEQ ID NO: 80658
  misc_feature 1..1218: note = Description of Artificial Sequence: Synthetic coding sequence
  source 1..1218: mol_type = other DNA

SEQ ID NO: 80664 - DNA, 1077 bp, synthetic construct
  misc_feature 1..1077: note = Description of Artificial Sequence: Synthetic coding sequence
  source 1..1077: mol_type = other DNA
atggagagactgcagaaggccaagatggacaaccaggtgctgggctacaaggacctggccgccatccccaaggacaaggccatcctggacatcgagagacccgacctgatgatctacgagccccacttcacctacagcctgctggagcacgtggagctgcccagaagcagagagagaagcctgagccccaagagcaccagccccccccccagccccgaggtgtgggccgacagcagaagccccggcatcatcagccaggccagcgcccccagaaccaccggcacccccagaaccagcctgccccacttccaccaccccgagaccagcagacccgacagcaacatctacaagaagccccccatctacaagcagagagagagcgtgggcggcagcccccagaccaagcacctgatcgaggacctgatcatcgagagcagcaagttccccgccgcccagccccccgaccccaaccagcccgccaagatcgagaccgactactggccctgcccccccagcctggccgtggtggagaccgagtggagaaagagaaaggccagcagaagaggcgccgaggaggaggaggaggaggaggacgacgacagcggcgaggagatgaaggccctgagagagagacagagagaggagctgagcaaggtgaccagcaacctgggcaagatgatcctgaaggaggagatggagaagagcctgcccatcagaagaaagaccagaagcctgcccgacagaacccccttccacaccagcctgcaccagggcaccagcaagagcagcagcctgcccgcctacggcagaaccaccctgagcagactgcagagcaccgagttcagccccagcggcagcgagaccggcagccccggcctgcagatctacccctacgagatgctggtggtgaccaacaagggcagaaccaagctgccccccggcgtggacagaatgagactggagagacacctgagcgccgaggacttcagcagagtgttcgccatgagccccgaggagttcggcaagctggccctgtggaagagaaacgagctgaagaagaaggccagcctgttctag

SEQ ID NO: 80665 - DNA, 1152 bp, synthetic construct; identical to SEQ ID NO: 80661
  misc_feature 1..1152: note = Description of Artificial Sequence: Synthetic coding sequence
  source 1..1152: mol_type = other DNA

SEQ ID NO: 80666 - DNA, 1218 bp, synthetic construct; identical to SEQ ID NO: 80658
  misc_feature 1..1218: note = Description of Artificial Sequence: Synthetic coding sequence
  source 1..1218: mol_type = other DNA

SEQ ID NO: 80667 - DNA, 1098 bp, synthetic construct
  misc_feature 1..1098: note = Description of Artificial Sequence: Synthetic coding sequence
  source 1..1098: mol_type = other DNA
atggagagactgcagaaggccaagatggacaaccaggtgctgggctacaaggacctggccgccatccccaaggacaaggccatcctggacatcgagagacccgacctgatgatctacgagccccacttcacctacagcctgctggagcacgtggagctgcccagaagcagagaggtgtgggccgacagcagaagccccggcatcatcagccaggccagcgcccccagaaccaccggcacccccagaaccagcctgccccacttccaccaccccgagaccagcagacccgacagcaacatctacaagaagccccccatctacaagcagagagagagcgtgggcggcagcccccagaccaagcacctgatcgaggacctgatcatcgagagcagcaagttccccgccgcccagccccccgaccccaaccagcccgccaagatcgagaccgactactggccctgcccccccagcctggccgtggtggagaccgagtggagaaagagaaaggccagcagaagaggcgccgaggaggaggaggaggaggaggacgacgacagcggcgaggagatgaaggccctgagagagagacagagagaggagctgagcaaggtgaccagcaacctgggcaagatgatcctgaaggaggagatggagaagagcctgcccatcagaagaaagaccagaagcctgcccgacagaacccccttccacaccagcctgcaccagggcaccagcaagagcagcagcctgcccgcctacggcagaaccaccctgagcagactgcagagcaccgagttcagccccagcggcagcgagaccggcagccccggcctgcagaacggcgagggccagagaggcagaatggacagaggcaacagcctgccctgcgtgctggagcagaagatctacccctacgagatgctggtggtgaccaacaagggcagaaccaagctgccccccggcgtggacagaatgagactggagagacacctgagcgccgaggacttcagcagagtgttcgccatgagccccgaggagttcggcaagctggccctgtggaagagaaacgagctgaagaagaaggccagcctgttctag

SEQ ID NO: 80668 - DNA, 570 bp, synthetic construct
  misc_feature 1..570: note = Description of Artificial Sequence: Synthetic coding sequence
  source 1..570: mol_type = other DNA
atggacgccgtggacgccaccatggagaagctgagagcccagtgcctgagcagaggcgccagcggcatccagggcctggccagattcttcagacagctggacagagacggcagcagaagcctggacgccgacgagttcagacagggcctggccaagctgggcctggtgctggaccaggccgaggccgagggcgtgtgcagaaagtgggacagaaacggcagcggcaccctggacctggaggagttcctgagagccctgagaccccccatgagccaggccagagaggccgtgatcgccgccgccttcgccaagctggacagaagcggcgacggcgtggtgaccgtggacgacctgagaggcgtgtacagcggcagagcccaccccaaggtgagaagcggcgagtggaccgaggacgaggtgctgagaagattcctggacaacttcgacagcagcgagaaggacggccaggtgaccctggccgagttccaggactactacagcggcgtgagcgccagcatgaacaccgacgaggagttcgtggccatgatgaccagcgcctggcagctgtag

SEQ ID NO: 80669 - DNA, 2565 bp, synthetic construct
  misc_feature 1..2565: note = Description of Artificial Sequence: Synthetic coding sequence
  source 1..2565: mol_type = other DNA
atggccctggagcaggccctgcaggccgccagacagggcgagctggacgtgctgagaagcctgcacgccgccggcctgctgggccccagcctgagagaccccctggacgccctgcccgtgcaccacgccgccagagccggcaagctgcactgcctgagattcctggtggaggaggccgccctgcccgccgccgccagagccagaaacggcgccacccccgcccacgacgccagcgccaccggccacctggcctgcctgcagtggctgctgagccagggcggctgcagagtgcaggacaaggacaacagcggcgccaccgtgctgcacctggccgccagattcggccaccccgaggtggtgaactggctgctgcaccacggcggcggcgaccccaccgccgccaccgacatgggcgccctgcccatccactacgccgccgccaagggcgacttccccagcctgagactgctggtggagcactaccccgagggcgtgaacgcccagaccaagaacggcgccacccccctgtacctggcctgccaggagggccacctggaggtgacccagtacctggtgcaggagtgcggcgccgacccccacgccagagcccacgacggcatgacccccctgcacgccgccgcccagatgggccacagccccgtgatcgtgtggctggtgagctgcaccgacgtgagcctgagcgagcaggacaaggacggcgccaccgccatgcacttcgccgccagcagaggccacaccaaggtgctgagctggctgctgctgcacggcggcgagatcagcgccgacctgtggggcggcacccccctgcacgacgccgccgagaacggcgagctggagtgctgccagatcctggtggtgaacggcgccgagctggacgtgagagacagagacggctacaccgccgccgacctgagcgacttcaacggccacagccactgcaccagatacctgagaaccgtggagaacctgagcgtggagcacagagtgctgagcagagaccccagcgccgagctggaggccaagcagcccgacagcggcatgagcagccccaacaccaccgtgagcgtgcagcccctgaacttcgacctgagcagccccaccagcaccctgagcaactacgacagctgcagcagcagccacagcagcatcaagggccagcaccccccctgcggcctgagcagcgccagagccgccgacatccagagctacatggacatgctgaaccccgagctgggcctgcccagaggcaccatcggcaagcccaccccccccccccccccccccagcttccccccccccccccccccccccggcacccagctgcccccccccccccccggctaccccgcccccaagccccccgtgggcccccaggccgccgacatctacatgcagaccaagaacaagctgagacacgtggagaccgaggccctgaagaaggagctgagcagctgcgacggccacgacggcctgagaagacaggacagcagcagaaagcccagagccttcagcaagcagcccagcaccggcgactactacagacagctgggcagatgccccggcgagaccctggccgccagacccggcatggcccacagcgaggaggtgagagccagacagcccgccagagccggctgccccagactgggccccgccgccagaggcagcctggagggccccagcgcccccccccaggccgccctgctgcccggcaaccacgtgcccaacggctgcgccgccgaccccaaggccagcagagagctgccccccccccccccccccccccccccccccctgcccgaggccgccagcagccccccccccgccccccccctgcccctggagagcgccggccccggctgcggccagagaagaagcagcagcagcaccggcagcaccaagagcttcaacatgatgagccccaccggcgacaacagcgagctgctggccgagatcaaggccggcaagagcctgaagcccaccccccagagcaagggcctgaccaccgtgttcagcggcatcggccagcccgccttccagcccgacagccccctgcccagcgtgagccccgccctgagccccgtgagaagccccaccccccccgccgccggcttccagcccctgctgaacggcagcctggtgcccgtgccccccaccacccccgcccccggcgtgcagctggacgtggaggccctgatccccacccacgacgagcagggcagacccatccccgagtggaagagacaggtgatggtgagaaagatgcagctgaagatgcaggaggaggaggagcagagaagaaaggaggaggaggaggaggccagactggccagcatgcccgcctggagaagagacctgctgagaaagaagctggaggaggagagagagcagaagagaaaggaggaggagagacagaagcaggaggagctgagaagagagaaggagcagagcgagaagctgagaaccctgggctacgacgagagcaagctggccccctggcagagacaggtgatcctgaagaagggcgacatcgccaagtactag

SEQ ID NO: 80670 - DNA, 867 bp, synthetic construct
  misc_feature 1..867: note = Description of Artificial Sequence: Synthetic coding sequence
  source 1..867: mol_type = other DNA
atggcccacagcgaggaggccgccctgctgcccggcaaccacgtgcccaacggctgcgccgccgaccccaaggccagcagagagctgccccccccccccccccccccccccccccccctgcccgaggccgccagcagccccccccccgccccccccctgcccctggagagcgccggccccggctgcggccagagaagaagcagcagcagcaccggcagcaccaagagcttcaacatgatgagccccaccggcgacaacagcgagctgctggccgagatcaaggccggcaagagcctgaagcccaccccccagagcaagggcctgaccaccgtgttcagcggcatcggccagcccgccttccagcccgacagccccctgcccagcgtgagccccgccctgagccccgtgagaagccccaccccccccgccgccggcttccagcccctgctgaacggcagcctggtgcccgtgccccccaccacccccgcccccggcgtgcagctggacgtggaggccctgatccccacccacgacgagcagggcagacccatccccgagtggaagagacaggtgatggtgagaaagatgcagctgaagatgcaggaggaggaggagcagagaagaaaggaggaggaggaggaggccagactggccagcatgcccgcctggagaagagacctgctgagaaagaagctggaggaggagagagagcagaagagaaaggaggaggagagacagaagcaggaggagctgagaagagagaaggagcagagcgagaagctgagaaccctgggctacgacgagagcaagctggccccctggcagagacaggtgatcctgaagaagggcgacatcgccaagtactag

SEQ ID NO: 80671 - DNA, 645 bp, synthetic construct
  misc_feature 1..645: note = Description of Artificial Sequence: Synthetic coding sequence
  source 1..645: mol_type = other DNA
gacggcatgacccccctgcacgccgccgcccagatgggccacagccccgtgatcgtgtggctggacaaggacggcgccaccgccatgcacttcgccgccagcagaggccacaccaaggtgctgagctggctgctgctgcacggcggcgagatcagcgccgacctgtggggcggcacccccctgcacgacgccgccgagaacggcgagctggagtgctgccagatcctggtggtgaacggcgccgagctggacgtgagagacagagacggctacaccgccgccgacctgagcgacttcaacggccacagccactgcaccagatacctgagaaccgtggagaacctgagcgtggagcacagagtgctgagcagagaccccagcgccgagctggaggccaagcagcccgacagcggcatgagcagccccaacaccaccgtgagcgtgcagcccctgaacttcgacctgagcagccccaccagcaccctgagcaactacgacagctgcagcagcagccacagcagcatcaagggccagcaccccccctgcggcctgagcagcgccagagccgccgacatccagagctacatggacatgctgaaccccgagctgggcctgcccagaggcaccatcggcaagcccacctag

SEQ ID NO: 80672 - DNA, 567 bp, synthetic construct
  misc_feature 1..567: note = Description of Artificial Sequence: Synthetic coding sequence
  source 1..567: mol_type = other DNA
tgagagatcaaggccggcaagagcctgaagcccaccccccagagcaagggcctgaccaccgtgttcagcggcatcggccagcccgccttccagcccgacagccccctgcccagcgtgagccccgccctgagccccgtgagaagccccaccccccccgccgccggcttccagcccctgctgaacggcagcctggtgcccgtgccccccaccacccccgcccccggcgtgcagctggacgtggaggccctgatccccacccacgacgagcagggcagacccatccccgagtggaagagacaggtgatggtgagaaagatgcagctgaagatgcaggaggaggaggagcagagaagaaaggaggaggaggaggaggccagactggccagcatgcccgcctggagaagagacctgctgagaaagaagctggaggaggagagagagcagaagagaaaggaggaggagagacagaagcaggaggagctgagaagagagaaggagcagagcgagaagctgagaaccctgggctacgacgagagcaagctggccccctggcagagacagatctag

SEQ ID NO: 80673 - DNA, 1335 bp, synthetic construct
  misc_feature 1..1335: note = Description of Artificial Sequence: Synthetic coding sequence
  source 1..1335: mol_type = other DNA
atggccagagtgggccccggcagagccggcgtgagctgccagggcagaggcagaggcagaggcggcagcggccagagaagaccccccacctgggagatcagcgacagcgacgccgaggacagcgccggcagcgaggccgccgccagagccagagaccccgccggcgagagaagagccgccgccgaggccctgagactgctgagacccgagcaggtgctgaagagactggccgtgtgcgtggacaccgccatcctggaggacgccggcgccgacgtgctgatggaggccctggaggccctgggctgcgagtgcagaatcgagccccagagacccgccagaagcctgagatggaccagagccagccccgacccctgccccagaagcctgccccccgaggtgtgggccgccggcgagcaggagctgctgctgctgctggagcccgaggagttcctgcagggcgtggccaccctgacccagatcagcggccccacccactgggtgccctggatcagccccgagaccaccgccagaccccacctggccgtgatcggcctggacgcctacctgtggtacagaagcctgagctgcccccagcagggctggctgggcagaggcttcagaggcggcggcctgtggcagagacccagcagcggcagagccggccccatgggcagcggcgaggagtggagccccctgctgagaagcagacagcacgtgagcagaggcacccagcagcccgagagccccaaggtggccggcgccgaggtggccgtgagctggcccgaggtggaggaggtgagagcctgcctgagctgggccctggtgctgctgcagctgtgggccaacctggacgtgctgctggtggccagctggcaggagctgagcagacacgtgtgcgccgtgaccaaggccctggcccagtaccccctgaagtgcgtgatgcccagactgaagggcggcagaatcaccagcagacagtacagagagagccaggccttcagcttctgcaccgccggcagatgggccgccggcgagcccgtggccagagacggcgccggcctgcaggccgcctggagaagacagatcagacagttcagcagagtgagccccgccgtggccgacgccgtggtgaccgccttccccagccccagactgctgcagcaggccctggaggcctgcagcaccgagagagagagaatgggcctgctggccgacctgcccgtgccccccagcgagggcggcagacccagaagagtgggccccgacctgagcagaagaatctgcctgttcctgaccaccgccaaccccgacctgctgctggacctgggcagctag

SEQ ID NO: 80674 - DNA, 1161 bp, synthetic construct
  misc_feature 1..1161: note = Description of Artificial Sequence: Synthetic coding sequence
  source 1..1161: mol_type = other DNA
atggccagagtgggccccggcagagccggcgtgagctgccagggcagaggcagaggcagaggcggcagcggccagagaagaccccccacctgggagatcagcgacagcgacgccgaggacagcgccggcagcgaggccgccgccagagccagagaccccgccggcgagagaagagccgccgccgaggccctgagactgctgagacccgagcaggtgctgaagagactggccgtgtgcgtggacaccgccatcctggaggacgccggcgccgacgtgctgatggaggccctggaggccctgggctgcgagtgcagaatcgagccccagagacccgccagaagcctgagatggaccagagccagccccgacccctgccccagaagcctgccccccgaggtgtgggccgccggcgagcaggagctgctgctgctgctggagcccgaggagttcctgcagggcgtggccaccctgacccagatcagcggccccacccactgggtgccctggatcagccccgagaccaccgccagaccccacctggccgtgatcggcctggacgcctacctgtggagcagacagcacgtgagcagaggcacccagcagcccgagagccccaaggtggccggcgccgaggtggccgtgagctggcccgaggtggaggaggtgagagcctgcctgagctgggccctggtgctgctgcagctgtgggccaacctggacgtgctgctggtggccagctggcaggagctgagcagacacgtgtgcgccgtgaccaaggccctggcccagtaccccctgaagtgcgtgatgcccagactgaagggcggcagaatcaccagcagacagtacagagagagccaggccttcagcttctgcaccgccggcagatgggccgccggcgagcccgtggccagagacggcgccggcctgcaggccgcctggagaagacagatcagacagttcagcagagtgagccccgccgtggccgacgccgtggtgaccgccttccccagccccagactgctgcagcaggccctggaggcctgcagcaccgagagagagagaatgggcctgctggccgtgggccccgacctgagcagaagaatctgcctgttcctgaccaccgccaaccccgacctgctgctggacctgggcagctag

SEQ ID NO: 80675 - DNA, 2523 bp, synthetic construct
  misc_feature 1..2523: note = Description of Artificial Sequence: Synthetic coding sequence
  source 1..2523: mol_type = other DNA
atgatgagcatccaggagaagagcaaggagaacagcagcaaggtgaccaagaagagcgacgacaagaacagcgagaccgagatccaggacagccagaagaacctggccaagaagagcggccccaaggagaccatcaagagccaggccaagagcagcagcgagagcaagatcaaccagcccgagctggagaccagaatgagcaccagaagcagcaaggccgccagcaacgacaaggccaccaagagcatcaacaagaacaccgtgaccgtgagaggctacagccaggagagcaccaagaagaagctgagccagaagaagctggtgcacgagaaccccaaggccaacgagcagctgaacagaagaagccagagactgcagcagctgaccgaggtgagcagaagaagcctgagaagcagagagatccagggccaggtgcaggccgtgaagcagagcctgccccccaccaagaaggagcagtgcagcagcacccagagcaagagcaacaagaccagccagaagcacgtgaagagaaaggtgctggaggtgaagagcgacagcaaggaggacgagaacctggtgatcaacgaggtgatcaacagccccaagggcaagaagagaaaggtggagcaccagaccgcctgcgcctgcagcagccagtgcacccagggcagcgagaagtgcccccagaagaccaccagaagagacgagaccaagcccgtgcccgtgaccagcgaggtgaagagaagcaagatggccaccagcgtggtgcccaagaagaacgagatgaagaagagcgtgcacacccaggtgaacaccaacaccaccctgcccaagagcccccagcccagcgtgcccgagcagagcgacaacgagctggagcaggccggcaagagcaagagaggcagcatcctgcagctgtgcgaggagatcgccggcgagatcgagagcgacaacgtggaggtgaagaaggagagcagccagatggagagcgtgaaggaggagaagcccaccgagatcaagctggaggagaccagcgtggagagacagatcctgcaccagaaggagaccaaccaggacgtgcagtgcaacagattcttccccagcagaaagaccaagcccgtgaagtgcatcctgaacggcatcaacagcagcgccaagaagaacagcaactggaccaagatcaagctgagcaagttcaacagcgtgcagcacaacaagctggacagccaggtgagccccaagctgggcctgctgagaaccagcttcagcccccccgccctggagatgcaccaccccgtgacccagagcaccttcctgggcaccaagctgcacgacagaaacatcacctgccagcaggagaagatgaaggagatcaacagcgaggaggtgaagatcaacgacatcaccgtggagatcaacaagaccaccgagagagcccccgagaactgccacctggccaacgagatcaagcccagcgacccccccctggacaaccagatgaagcacagcttcgacagcgccagcaacaagaacttcagccagtgcctggagagcaagctggagaacagccccgtggagaacgtgaccgccgccagcaccctgctgagccaggccaagatcgacaccggcgagaacaagttccccggcagcgccccccagcagcacagcatcctgagcaaccagaccagcaagagcagcgacaacagagagacccccagaaaccacagcctgcccaagtgcaacagccacctggagatcaccatccccaaggacctgaagctgaaggaggccgagaagaccgacgagaagcagctgatcatcgacgccggccagaagagattcggcgccgtgagctgcaacgtgtgcggcatgctgtacaccgccagcaaccccgaggacgagacccagcacctgctgttccacaaccagttcatcagcgccgtgaagtacgtgggctggaagaaggagagaatcctggccgagtaccccgacggcagaatcatcatggtgctgcccgaggaccccaagtacgccctgaagaaggtggacgagatcagagagatggtggacaacgacctgggcttccagcaggcccccctgatgtgctacagcagaaccaagaccctgctgttcatcagcaacgacaagaaggtggtgggctgcctgatcgccgagcacatccagtggggctacagagtgatcgaggagaagctgcccgtgatcagaagcgaggaggagaaggtgagattcgagagacagaaggcctggtgctgcagcaccctgcccgagcccgccatctgcggcatcagcagaatctgggtgttcagcatgatgagaagaaagaagatcgccagcagaatgatcgagtgcctgagaagcaacttcatctacggcagctacctgagcaaggaggagatcgccttcagcgaccccacccccgacggcaagctgttcgccacccagtactgcggcaccggccagttcctggtgtacaacttcatcaacggccagaacagcacctag

SEQ ID NO: 80676 - DNA, 2106 bp, synthetic construct
  misc_feature 1..2106: note = Description of Artificial Sequence: Synthetic coding sequence
  source 1..2106: mol_type = other DNA
atgatgagcatccaggagaagagcaaggagaacagcagcaaggtgaccaagaagagcgacgacaagaacagcgagaccgagatccaggacagccagaagaacctggccaagaagagcggccccaaggagaccatcaagagccaggccaagagcagcagcgagagcaagatcaaccagcccgagctggagaccagaatgagcaccagaagcagcaaggccgccagcaacgacaaggccaccaagagcatcaacaagaacaccgtgaccgtgagaggctacagccaggagagcaccaagaagaagctgagccagaagaagctggtgcacgagaaccccaaggccaacgagcagctgaacagaagaagccagagactgcagcagctgaccgaggtgagcagaagaagcctgagaagcagagagatccagggccaggtgcaggccgtgaagcagagcctgccccccaccaagaaggagcagtgcagcagcacccagagcaagagcaacaagaccagccagaagcacgtgaagagaaaggtgctggaggtgaagagcgacagcaaggaggacgagaacctggtgatcaacgaggtgatcaacagccccaagggcaagaagagaaaggtggagcaccagaccgcctgcgcctgcagcagccagtgcacccagggcagcgagaagtgcccccagaagaccaccagaagagacgagaccaagcccgtgcccgtgaccagcgaggtgaagagaagcaagatggccaccagcgtggtgcccaagaagaacgagatgaagaagagcgtgcacacccaggtgaacaccaacaccaccctgcccaagagcccccagcccagcgtgcccgagcagagcgacaacgagctggagcaggccggcaagagcaagagaggcagcatcctgcagctgtgcgaggagatcgccggcgagatcgagagcgacaacgtggaggtgaagaaggagagcagccagatggagagcgtgaaggaggagaagcccaccgagatcaagctggaggagaccagcgtggagagacagatcctgcaccagaaggagaccaaccaggacgtgcagtgcaacagattcttccccagcagaaagaccaagcccgtgaagtgcatcctgaacggcatcaacagcagcgccaagaagaacagcaactggaccaagatcaagctgagcaagttcaacagcgtgcagcacaacaagctggacagccaggtgagccccaagctgggcctgctgagaaccagcttcagcccccccgccctggagatgcaccaccccgtgacccagagcaccttcctgggcaccaagctgcacgacagaaacatcacctgccagcaggagaagatgaaggagatcaacagcgaggaggtgaagatcaacgacatcaccgtggagatcaacaagaccaccgagagagcccccgagaactgccacctggccaacgagatcaagcccagcgacccccccctggacaaccagatgaagcacagcttcgacagcgccagcaacaagaacttcagccagtgcctggagagcaagctggagaacagccccgtggagaacgtgaccgccgccagcaccctgctgagccaggccaagatcgacaccggcgagaacaagttccccggcagcgccccccagcagcacagcatcctgagcaaccagaccagcaagagcagcgacaacagagagacccccagaaaccacagcctgcccaagtgcaacagccacctggagatcaccatccccaaggacctgaagctgaaggaggccgagaagaccgacgagaagcagctgatcatcgacgccggccagaagagattcggcgccgtgagctgcaacgtgtgcggcatgctgtacaccgccagcaaccccgaggacgagacccagcacctgctgttccacaaccagttcatcagcgccgtgaagtacgtggtgctgctgatcaaccaccacgagtgcggcagcgaggaggagttcatcaccagcctgttcctgagcatgttcaacttcagatacacccagagaagcttcagcttccccatcagattcctggagggcctggaggagagaaagaacagcggctag

SEQ ID NO: 80677 - DNA, 1806 bp, synthetic construct
  misc_feature 1..1806: note = Description of Artificial Sequence: Synthetic coding sequence
  source 1..1806: mol_type = other DNA
atggccgccctgacccccagaaagagaaagcaggacagcctgaagtgcgacagcctgctgcacttcaccgagaacctgttccccagccccaacaagaagcactgcttctaccagaacagcgacaagaacgaggagaacctgcactgcagccagcaggagcacttcgtgctgagcgccctgaagaccaccgagatcaacagactgcccagcgccaaccagggcagccccttcaagagcgccctgagcaccgtgagcttctacaaccagaacaagtggtacctgaaccccctggagagaaagctgatcaaggagagcagaagcacctgcctgaagaccaacgacgaggacaagagcttccccatcgtgaccgagaagatgcagggcaagcccgtgtgcagcaagaagaacaacaagaagccccagaagagcctgaccgccaagtaccagcccaagtacagacacatcaagcccgtgagcagaaacagcagaaacagcaagcagaacagagtgatctacaagcccatcgtggagaaggagaacaactgccacagcgccgagaacaacagcaacgcccccagagtgctgagccagaagatcaagccccaggtgaccctgcagggcggcgccgccttcttcgtgagaaagaagagcagcctgagaaagagcagcctggagaacgagcccagcctgggcagaacccagaagagcaagagcgaggtgatcgaggacagcgacgtggagaccgtgagcgagaagaagaccttcgccaccagacaggtgcccaagtgcctggtgctggaggagaagctgaagatcggcctgctgagcgccagcagcaagaacaaggagaagctgatcaaggacagcagcgacgacagagtgagcagcaaggagcacaaggtggacaagaacgaggccttcagcagcgaggacagcctgggcgagaacaagaccatcagccccaagagcaccgtgtaccccatcttcagcgccagcagcgtgaacagcaagagaagcctgggcgaggagcagttcagcgtgggcagcgtgaacttcatgaagcagaccaacatccagaagaacaccaacaccagagacaccagcaagaagaccaaggaccagctgatcatcgacgccggccagaagcacttcggcgccaccgtgtgcaagagctgcggcatgatctacaccgccagcaaccccgaggacgagatgcagcacgtgcagcaccaccacagattcctggagggcatcaagtacgtgggctggaagaaggagagagtggtggccgagttctgggacggcaagatcgtgctggtgctgccccacgaccccagcttcgccatcaagaaggtggaggacgtgcaggagctggtggacaacgagctgggcttccagcaggtggtgcccaagtgccccaacaagatcaagaccttcctgttcatcagcgacgagaagagagtggtgggctgcctgatcgccgagcccatcaagcaggccttcagagtgctgagcgagcccatcggccccgagagccccagcagcaccgagtgccccagagcctggcagtgcagcgacgtgcccgagcccgccgtgtgcggcatcagcagaatctgggtgttcagactgaagagaagaaagagaatcgccagaagactggtggacaccctgagaaactgcttcatgttcggctgcttcctgagcaccgacgagatcgccttcagcgaccccacccccgacggcaagctgttcgccaccaagtactgcaacacccccaacttcctggtgtacaacttcaacagctag

SEQ ID NO: 80678 - DNA, 720 bp, synthetic construct
  misc_feature 1..720: note = Description of Artificial Sequence: Synthetic coding sequence
  source 1..720: mol_type = other DNA
atgaagcagaccaacatccagaagaacaccaacaccagagacaccagcaagaagaccaaggaccagctgatcatcgacgccggccagaagcacttcggcgccaccgtgtgcaagagctgcggcatgatctacaccgccagcaaccccgaggacgagatgcagcacgtgcagcaccaccacagattcctggagggcatcaagtacgtgggctggaagaaggagagagtggtggccgagttctgggacggcaagatcgtgctggtgctgccccacgaccccagcttcgccatcaagaaggtggaggacgtgcaggagctggtggacaacgagctgggcttccagcaggtggtgcccaagtgccccaacaagatcaagaccttcctgttcatcagcgacgagaagagagtggtgggctgcctgatcgccgagcccatcaagcaggccttcagagtgctgagcgagcccatcggccccgagagccccagcagcaccgagtgccccagagcctggcagtgcagcgacgtgcccgagcccgccgtgtgcggcatcagcagaatctgggtgttcagactgaagagaagaaagagaatcgccagaagactggtggacaccctgagaaactgcttcatgttcggctgcttcctgagcaccgacgagatcgccttcagcgaccccacccccgacgactgcagaagactgaacagataccaggagacctag

SEQ ID NO: 80679 - DNA, 849 bp, synthetic construct
  misc_feature 1..849: note = Description of Artificial Sequence: Synthetic coding sequence
  source 1..849: mol_type = other DNA
atggccctgaagcagatcagcagcaacaagtgcttcggcggcctgcagaaggtgttcgagcacgacagcgtggagctgaactgcaagatgaagttcgccgtgtacctgccccccaaggccgagaccggcaagtgccccgccctgtactggctgagcggcctgacctgcaccgagcagaacttcatcagcaagagcggctaccaccagagcgccagcgagcacggcctggtggtgatcgcccccgacaccagccccagaggctgcaacatcaagggcgaggacgagagctgggacttcggcaccggcgccggcttctacgtggacgccaccgaggacccctggaagaccaactacagaatgtacagctacgtgaccgaggagctgccccagctgatcaacgccaacttccccgtggacccccagagaatgagcatcttcggccacagcatgggcggccacggcgccctgatctgcgccctgaagaaccccggcaagtacaagagcgtgagcgccttcgcccccatctgcaaccccgtgctgtgcccctggggcaagaaggccttcagcggctacctgggcaccgaccagagcaagtggaaggcctacgacgccacccacctggtgaagagctaccccggcagccagctggacatcctgatcgaccagggcaaggacgaccagttcctgctggacggccagctgctgcccgacaacttcatcgccgcctgcaccgagaagaagatccccgtggtgttcagactgcaggagggctacgaccacagctactacttcatcgccaccttcatcaccgaccacatcagacaccacgccaagtacctgaacgcctag

SEQ ID NO: 80680 - DNA, 642 bp, synthetic construct
  misc_feature 1..642: note = Description of Artificial Sequence: Synthetic coding sequence
  source 1..642: mol_type = other DNA
atggccatcacccagttcagactgttcaagttctgcacctgcctggccaccgtgttcagcttcctgaagagactgatctgcagaagcggcagaggcagaaagctgagcggcgaccagatcaccctgcccaccaccgtggactacagcagcgtgcccaagcagaccgacgtggaggagtggaccagctgggacgaggacgcccccaccagcgtgaagatcgagggcggcaacggcaacgtggccacccagcagaacagcctggagcagctggagcccgactacttcaaggacatgacccccaccatcagaaagacccagaagatcgtgatcaagaagagagagcccctgaacttcggcatccccgacggcagcaccggcttcagcagcagactggccgccacccaggacctgcccttcatccaccagagcagcgagctgggcgacctggacacctggcaggagaacaccaacgcctgggaggaggaggaggacgccgcctggcaggccgaggaggtgctgagacagcagaagctggccgacagagagaagagagccgccgagcagcagagaaagaagatggagaaggaggcccagagactgatgaagaaggagcagaacaagatcggcgtgaagctgagctag

SEQ ID NO: 80681 - DNA, 642 bp, synthetic construct; identical to SEQ ID NO: 80680
  misc_feature 1..642: note = Description of Artificial Sequence: Synthetic coding sequence
  source 1..642: mol_type = other DNA

SEQ ID NO: 80682 - DNA, 594 bp, synthetic construct
  misc_feature 1..594: note = Description of Artificial Sequence: Synthetic coding sequence
  source 1..594: mol_type = other DNA
atggccatcacccagttcagactgttcaagttctgcacctgcctggccaccgtgttcagcttcctgaagagactgatctgcagaagcggcagaggcagaaagctgagcggcgaccagatcaccctgcccaccaccgtggactacagcagcgtgcccaagcagaccgacgtggaggagtggaccagctgggacgaggacgcccccaccagcgtgaagatcgagggcggcaacggcaacgtggccacccagcagaacagcctggagcagctggagcccgactacttcaaggacatgacccccaccatcagaaagacccagaagatcgtgatcaagaagagagagcccctgaacttcggcatccccgacggcagcaccggcttcagcagcagactggccgccacccaggacctgcccttcatccaccagagcagcgagctgggcgacctggacacctggcaggagaacaccaacgcctgggaggaggaggaggacgccgcctggcaggccgaggaggtgctgagacagcagaagctggccgacagagagaagagagccgccgagcagcagagaaagaagatggagaaggaggcctag

SEQ ID NO: 80683 - DNA, 777 bp, synthetic construct
  misc_feature 1..777: note = Description of Artificial Sequence: Synthetic coding sequence
  source 1..777: mol_type = other DNA
atggccatcacccagttcagactgttcaagttctgcacctgcctggccaccgtgttcagcttcctgaagagactgatctgcagaagcggcagaggcagaaagctgagcggcgaccagatcaccctgcccaccaccgtggactacagcagcgtgcccaagcagaccgacgtggaggagtggaccagctgggacgaggacgcccccaccagcgtgaagatcgagggcggcaacggcaacgtggccacccagcagaacagcctggagcagctggagcccgactacttcaaggacatgacccccaccatcagaaagacccagaagatcgtgatcaagaagagagagcccctgaacttcggcatccccgacggcagcaccggcttcagcagcagactggccgccacccaggacctgcccttcatccaccagagcagcgagctgggcgacctggacacctggcaggagaacaccaacgcctgggaggaggaggaggacgccgcctggcaggccgaggaggtgctgagaagcagaaccaacgtgtgcctgctgtgcagcctgctgttccaccaccccacccccaccagcaccccctacatcaaccagagcgtgaagatcgagagagtgagcctgggccagtggagctacggcaagagcaaggagcagcagaagctggccgacagagagaagagagccgccgagcagcagagaaagaagatggagaaggaggcccagagactgatgaagaaggagcagaacaagatcggcgtgaagctgagctag

SEQ ID NO: 80684 - DNA, 237 bp, synthetic construct
  misc_feature 1..237: note = Description of Artificial Sequence: Synthetic coding sequence
  source 1..237: mol_type = other DNA
atggccatcacccagttcagactgttcaagttctgcacctgcctggccaccgtgttcagcttcctgaagagactgatctgcagaagcggcagaggcagaaagctgagcggcgaccagatcaccctgcccaccaccgtggactacagcagcgtgcccaagcagaccgacgtggaggagtggaccagctgggacgaggacgcccccaccagcgtgaagatcgagggcggcaacggctag

SEQ ID NO: 80685 - DNA, 1272 bp, synthetic construct
  misc_feature 1..1272: note = Description of Artificial Sequence: Synthetic coding sequence
  source 1..1272: mol_type = other DNA
atgagcagccaggtggtgggcatcgagcccctgtacatcaaggccgagcccgccagccccgacagccccaagggcagcagcgagaccgagaccgagccccccgtggccctggcccccggccccgcccccaccagatgcctgcccggccacaaggaggaggaggacggcgagggcgccggccccggcgagcagggcggcggcaagctggtgctgagcagcctgcccaagagactgtgcctggtgtgcggcgacgtggccagcggctaccactacggcgtggccagctgcgaggcctgcaaggccttcttcaagagaaccatccagggcagcatcgagtacagctgccccgccagcaacgagtgcgagatcaccaagagaagaagaaaggcctgccaggcctgcagattcaccaagtgcctgagagtgggcatgctgaaggagggcgtgagactggacagagtgagaggcggcagacagaagtacaagagaagacccgaggtggaccccctgcccttccccggccccttccccgccggccccctggccgtggccggcggccccagaaagaccgccgcccccgtgaacgccctggtgagccacctgctggtggtggagcccgagaagctgtacgccatgcccgaccccgccggccccgacggccacctgcccgccgtggccaccctgtgcgacctgttcgacagagagatcgtggtgaccatcagctgggccaagagcatccccggcttcagcagcctgagcctgagcgaccagatgagcgtgctgcagagcgtgtggatggaggtgctggtgctgggcgtggcccagagaagcctgcccctgcaggacgagctggccttcgccgaggacctggtgctggacgaggagggcgccagagccgccggcctgggcgagctgggcgccgccctgctgcagctggtgagaagactgcaggccctgagactggagagagaggagtacgtgctgctgaaggccctggccctggccaacagcgacagcgtgcacatcgaggacgccgaggccgtggagcagctgagagaggccctgcacgaggccctgctggagtacgaggccggcagagccggccccggcggcggcgccgagagaagaagagccggcagactgctgctgaccctgcccctgctgagacagaccgccggcaaggtgctggcccacttctacggcgtgaagctggagggcaaggtgcccatgcacaagctgttcctggagatgctggaggccatgatggactag

SEQ ID NO: 80686 - DNA, 1272 bp, synthetic construct; identical to SEQ ID NO: 80685
  misc_feature 1..1272: note = Description of Artificial Sequence: Synthetic coding sequence
  source 1..1272: mol_type = other DNA

SEQ ID NO: 80687 - DNA, 1269 bp, synthetic construct
  misc_feature 1..1269: note = Description of Artificial Sequence: Synthetic coding sequence
  source 1..1269: mol_type = other DNA
atgagcagccaggtggtgggcatcgagcccctgtacatcaaggccgagcccgccagccccgacagccccaagggcagcagcgagaccgagaccgagccccccgtggccctggcccccggccccgcccccaccagatgcctgcccggccacaaggaggaggaggacggcgagggcgccggccccggcgagcagggcggcggcaagctggtgctgagcagcctgcccaagagactgtgcctggtgtgcggcgacgtggccagcggctaccactacggcgtggccagctgcgaggcctgcaaggccttcttcaagagaaccatccagggcagcatcgagtacagctgccccgccagcaacgagtgcgagatcaccaagagaagaagaaaggcctgccaggcctgcagattcaccaagtgcctgagagtgggcatgctgaaggagggcgtgagactggacagagtgagaggcggcagacagaagtacaagagaagacccgaggtggaccccctgcccttccccggccccttccccgccggccccctggccgtggccggcggccccagaaagaccgcccccgtgaacgccctggtgagccacctgctggtggtggagcccgagaagctgtacgccatgcccgaccccgccggccccgacggccacctgcccgccgtggccaccctgtgcgacctgttcgacagagagatcgtggtgaccatcagctgggccaagagcatccccggcttcagcagcctgagcctgagcgaccagatgagcgtgctgcagagcgtgtggatggaggtgctggtgctgggcgtggcccagagaagcctgcccctgcaggacgagctggccttcgccgaggacctggtgctggacgaggagggcgccagagccgccggcctgggcgagctgggcgccgccctgctgcagctggtgagaagactgcaggccctgagactggagagagaggagtacgtgctgctgaaggccctggccctggccaacagcgacagcgtgcacatcgaggacgccgaggccgtggagcagctgagagaggccctgcacgaggccctgctggagtacgaggccggcagagccggccccggcggcggcgccgagagaagaagagccggcagactgctgctgaccctgcccctgctgagacagaccgccggcaaggtgctggcccacttctacggcgtgaagctggagggcaaggtgcccatgcacaagctgttcctggagatgctggaggccatgatggactag

SEQ ID NO: 80688 - DNA, 330 bp, synthetic construct
  misc_feature 1..330: note = Description of Artificial Sequence: Synthetic coding sequence
  source 1..330: mol_type = other DNA
atgagcagccaggtggtgggcatcgagcccctgtacatcaaggccgagcccgccagccccgacagccccaagggcagcagcgagaccgagaccgagccccccgtggccctggcccccggccccgcccccaccagatgcctgcccggccacaaggaggaggaggacggcgagggcgccggccccggcgagcagggcggcggcaagctggtgctgagcagcctgcccaagagactgtgcctggtgtgcggcgacgtggccagcggctaccactacggcgtggccagctgcgaggcctgcaaggccttcttcaagagaaccatccagggctag

SEQ ID NO: 80689 - DNA, 1503 bp, synthetic construct
  misc_feature 1..1503: note = Description of Artificial Sequence: Synthetic coding sequence
  source 1..1503: mol_type = other DNA
atgagcagcgacgacagacacctgggcagcagctgcggcagcttcatcaagaccgagcccagcagccccagcagcggcatcgacgccctgagccaccacagccccagcggcagcagcgacgccagcggcggcttcggcctggccctgggcacccacgccaacggcctggacagcccccccatgttcgccggcgccggcctgggcggcaccccctgcagaaagagctacgaggactgcgccagcggcatcatggaggacagcgccatcaagtgcgagtacatgctgaacgccatccccaagagactgtgcctggtgtgcggcgacatcgccagcggctaccactacggcgtggccagctgcgaggcctgcaaggccttcttcaagagaaccatccagggcaacatcgagtacagctgccccgccaccaacgagtgcgagatcaccaagagaagaagaaagagctgccaggcctgcagattcatgaagtgcctgaaggtgggcatgctgaaggagggcgtgagactggacagagtgagaggcggcagacagaagtacaagagaagactggacagcgagagcagcccctacctgagcctgcagatcagcccccccgccaagaagcccctgaccaagatcgtgagctacctgctggtggccgagcccgacaagctgtacgccatgcccccccccggcatgcccgagggcgacatcaaggccctgaccaccctgtgcgacctggccgacagagagctggtggtgatcatcggctgggccaagcacatccccggcttcagcagcctgagcctgggcgaccagatgagcctgctgcagagcgcctggatggagatcctgatcctgggcatcgtgtacagaagcctgccctacgacgacaagctggtgtacgccgaggactacatcatggacgaggagcacagcagactggccggcctgctggagctgtacagagccatcctgcagctggtgagaagatacaagaagctgaaggtggagaaggaggagttcgtgaccctgaaggccctggccctggccaacagcgacagcatgtacatcgaggacctggaggccgtgcagaagctgcaggacctgctgcacgaggccctgcaggactacgagctgagccagagacacgaggagccctggagaaccggcaagctgctgctgaccctgcccctgctgagacagaccgccgccaaggccgtgcagcacttctacagcgtgaagctgcagggcaaggtgcccatgcacaagctgttcctggagatgctggaggccaaggcctgggccagagccgacagcctgcaggagtggagacccctggagcaggtgcccagccccctgcacagagccaccaagagacagcacgtgcacttcctgacccccctgccccccccccccagcgtggcctgggtgggcaccgcccaggccggctaccacctggaggtgttcctgccccagagagccggctggcccagagccgcctag

SEQ ID NO: 80690 - DNA, 1527 bp, synthetic construct
  misc_feature 1..1527: note = Description of Artificial Sequence: Synthetic coding sequence
  source 1..1527: mol_type = other DNA
atgagcagcgacgacagacacctgggcagcagctgcggcagcttcatcaagaccgagcccagcagccccagcagcggcatcgacgccctgagccaccacagccccagcggcagcagcgacgccagcggcggcttcggcctggccctgggcacccacgccaacggcctggacagcccccccatgttcgccggcgccggcctgggcggcaccccctgcagaaagagctacgaggactgcgccagcggcatcatggaggacagcgccatcaagtgcgagtacatgctgaacgccatccccaagagactgtgcctggtgtgcggcgacatcgccagcggctaccactacggcgtggccagctgcgaggcctgcaaggccttcttcaagagaaccatccagggcaacatcgagtacagctgccccgccaccaacgagtgcgagatcaccaagagaagaagaaagagctgccaggcctgcagattcatgaagtgcctgaaggtgggcatgctgaaggagggcgtgagactggacagagtgagaggcggcagacagaagtacaagagaagactggacagcgagagcagcccctacctgagcctgcagatcagcccccccgccaagaagcccctgaccaagatcgtgagctacctgctggtggccgagcccgacaagctgtacgccatgcccccccccggcatgcccgagggcgacatcaaggccctgaccaccctgtgcgacctggccgacagagagctggtggtgatcatcggctgggccaagcacatccccggcttcagcagcctgagcctgggcgaccagatgagcctgctgcagagcgcctggatggagatcctgatcctgggcatcgtgtacagaagcctgccctacgacgacaagctggtgtacgccgaggactacatcatggacgaggagcacagcagactggccggcctgctggagctgtacagagccatcctgcagctggtgagaagatacaagaagctgaaggtggagaaggaggagttcgtgaccctgaaggccctggccctggccaacagcgacagcatgtacatcgaggacctggaggccgtgcagaagctgcaggacctgctgcacgaggccctgcaggactacgagctgagccagagacacgaggagccctggagaaccggcaagctgctgctgaccctgcccctgctgagacagaccgccgccaaggccgtgcagcacttctacagcgtgaagctgcagggcaaggtgcccatgcacaagctgttcctggagatgctggaggccaaggtgggccaggagcagctgagaggcagccccaaggacgagagaatgagcagccacgacggcaagtgccccttccagagcgccgccttcaccagcagagaccagagcaacagccccggcatccccaaccccagacccagcagccccacccccctgaacgagagaggcagacagatcagccccagcaccagaacccccggcggccagggcaagcacctgtggctgaccatgtag

SEQ ID NO: 80691 - DNA, 1503 bp, synthetic construct; identical to SEQ ID NO: 80689
  misc_feature 1..1503: note = Description of Artificial Sequence: Synthetic coding sequence
  source 1..1503: mol_type = other DNA

SEQ ID NO: 80692 - DNA, 1527 bp, synthetic construct; identical to SEQ ID NO: 80690
  misc_feature 1..1527: note = Description of Artificial Sequence: Synthetic coding sequence
  source 1..1527: mol_type = other DNA

SEQ ID NO: 80693 - DNA, 1527 bp, synthetic construct
  misc_feature 1..1527: note = Description of Artificial Sequence: Synthetic coding sequence
  source 1..1527: mol_type = other DNA
atgctgctgaacagaatgagcagcgacgacagacacctgggcagcagctgcggcagcttcatcaagaccgagcccagcagccccagcagcggcatcgacgccctgagccaccacagccccagcggcagcagcgacgccagcggcggcttcggcctggccctgggcacccacgccaacggcctggacagcccccccatgttcgccggcgccggcctgggcggcaccccctgcagaaagagctacgaggactgcgccagcggcatcatggaggacagcgccatcaagtgcgagtacatgctgaacgccatccccaagagactgtgcctggtgtgcggcgacatcgccagcggctaccactacggcgtggccagctgcgaggcctgcaaggccttcttcaagagaaccatccagggcaacatcgagtacagctgccccgccaccaacgagtgcgagatcaccaagagaagaagaaagagctgccaggcctgcagattcatgaagtgcctgaaggtgggcatgctgaaggagggcgtgagactggacagagtgagaggcggcagacagaagtacaagagaagactggacagcgagagcagcccctacctgagcctgcagatcagcccccccgccaagaagcccctgaccaagatcgtgagctacctgctggtggccgagcccgacaagctgtacgccatgcccccccccggcatgcccgagggcgacatcaaggccctgaccaccctgtgcgacctggccgacagagagctggtggtgatcatcggctgggccaagcacatccccggcttcagcagcctgagcctgggcgaccagatgagcctgctgcagagcgcctggatggagatcctgatcctgggcatcgtgtacagaagcctgccctacgacgacaagctggtgtacgccgaggactacatcatggacgaggagcacagcagactggccggcctgctggagctgtacagagccatcctgcagctggtgagaagatacaagaagctgaaggtggagaaggaggagttcgtgaccctgaaggccctggccctggccaacagcgacagcatgtacatcgaggacctggaggccgtgcagaagctgcaggacctgctgcacgaggccctgcaggactacgagctgagccagagacacgaggagccctggagaaccggcaagctgctgctgaccctgcccctgctgagacagaccgccgccaaggccgtgcagcacttctacagcgtgaagctgcagggcaaggtgcccatgcacaagctgttcctggagatgctggaggccaaggtgggccaggagcagctgagaggcagccccaaggacgagagaatgagcagccacgacggcaagtgccccttccagagcgccgccttcaccagcagagaccagagcaacagccccggcatccccaaccccagacccagcagccccacccccctgaacgagagaggcagacagatcagccccagcaccagaacccccggcggccagggcaagcactag

SEQ ID NO: 80694 - DNA, 1302 bp, synthetic construct
  misc_feature 1..1302: note = Description of Artificial Sequence: Synthetic coding sequence
  source 1..1302: mol_type = other DNA
atgagcagcgacgacagacacctgggcagcagctgcggcagcttcatcaagaccgagcccagcagccccagcagcggcatcgacgccctgagccaccacagccccagcggcagcagcgacgccagcggcggcttcggcctggccctgggcacccacgccaacggcctggacagcccccccatgttcgccggcgccggcctgggcggcaccccctgcagaaagagctacgaggactgcgccagcggcatcatggaggacagcgccatcaagtgcgagtacatgctgaacgccatccccaagagactgtgcctggtgtgcggcgacatcgccagcggctaccactacggcgtggccagctgcgaggcctgcaaggccttcttcaagagaaccatccagggcaacatcgagtacagctgccccgccaccaacgagtgcgagatcaccaagagaagaagaaagagctgccaggcctgcagattcatgaagtgcctgaaggtgggcatgctgaaggagggcgtgagactggacagagtgagaggcggcagacagaagtacaagagaagactggacagcgagagcagcccctacctgagcctgcagatcagcccccccgccaagaagcccctgaccaagatcgtgagctacctgctggtggccgagcccgacaagctgtacgccatgcccccccccggcatgcccgagggcgacatcaaggccctgaccaccctgtgcgacctggccgacagagagctggtggtgatcatcggctgggccaagcacatccccggcttcagcagcctgagcctgggcgaccagatgagcctgctgcagagcgcctggatggagatcctgatcctgggcatcgtgtacagaagcctgccctacgacgacaagctggtgtacgccgaggactacatcatggacgaggagcacagcagactggccggcctgctggagctgtacagagccatcctgcagctggtgagaagatacaagaagctgaaggtggagaaggaggagttcgtgaccctgaaggccctggccctggccaacagcgacagcatgtacatcgaggacctggaggccgtgcagaagctgcaggacctgctgcacgaggccctgcaggactacgagctgagccagagacacgaggagccctggagaaccggcaagctgctgctgaccctgcccctgctgagacagaccgccgccaaggccgtgcagcacttctacagcgtgaagctgcagggcaaggtgcccatgcacaagctgttcctggagatgctggaggccaaggtgtag

SEQ ID NO: 80695 - DNA, 1311 bp, synthetic construct
  misc_feature 1..1311: note = Description of Artificial Sequence: Synthetic coding sequence
  source 1..1311: mol_type = other DNA
atgagcaacaaggacagacacatcgacagcagctgcagcagcttcatcaagaccgagcccagcagccccgccagcctgaccgacagcgtgaaccaccacagccccggcggcagcagcgacgccagcggcagctacagcagcaccatgaacggccaccagaacggcctggacagcccccccctgtaccccagcgcccccatcctgggcggcagcggccccgtgagaaagctgtacgacgactgcagcagcaccatcgtggaggacccccagaccaagtgcgagtacatgctgaacagcatgcccaagagactgtgcctggtgtgcggcgacatcgccagcggctaccactacggcgtggccagctgcgaggcctgcaaggccttcttcaagagaaccatccagggcaacatcgagtacagctgccccgccaccaacgagtgcgagatcaccaagagaagaagaaagagctgccaggcctgcagattcatgaagtgcctgaaggtgggcatgctgaaggagggcgtgagactggacagagtgagaggcggcagacagaagtacaagagaagaatcgacgccgagaacagcccctacctgaacccccagctggtgcagcccgccaagaagccctacaacaagatcgtgagccacctgctggtggccgagcccgagaagatctacgccatgcccgaccccaccgtgcccgacagcgacatcaaggccctgaccaccctgtgcgacctggccgacagagagctggtggtgatcatcggctgggccaagcacatccccggcttcagcaccctgagcctggccgaccagatgagcctgctgcagagcgcctggatggagatcctgatcctgggcgtggtgtacagaagcctgagcttcgaggacgagctggtgtacgccgacgactacatcatggacgaggaccagagcaagctggccggcctgctggacctgaacaacgccatcctgcagctggtgaagaagtacaagagcatgaagctggagaaggaggagttcgtgaccctgaaggccatcgccctggccaacagcgacagcatgcacatcgaggacgtggaggccgtgcagaagctgcaggacgtgctgcacgaggccctgcaggactacgaggccggccagcacatggaggaccccagaagagccggcaagatgctgatgaccctgcccctgctgagacagaccagcaccaaggccgtgcagcacttctacaacatcaagctggagggcaaggtgcccatgcacaagctgttcctggagatgctggaggccaaggtgtgctag

SEQ ID NO: 80696 - DNA, 1308 bp, synthetic construct
  misc_feature 1..1308: note = Description of Artificial Sequence: Synthetic coding sequence
  source 1..1308: mol_type = other DNA
atgagcaacaaggacagacacatcgacagcagctgcagcagcttcatcaagaccgagcccagcagccccgccagcctgaccgacagcgtgaaccaccacagccccggcggcagcagcgacgccagcggcagctacagcagcaccatgaacggccaccagaacggcctggacagcccccccctgtaccccagcgcccccatcctgggcggcagcggccccgtgagaaagctgtacgacgactgcagcagcaccatcgtggaggacccccagaccaagtgcgagtacatgctgaacagcatgcccaagagactgtgcctggtgtgcggcgacatcgccagcggctaccactacggcgtggccagctgcgaggcctgcaaggccttcttcaagagaaccatccagggcaacatcgagtacagctgccccgccaccaacgagtgcgagatcaccaagagaagaagaaagagctgccaggcctgcagattcatgaagtgcctgaaggtgggcatgctgaaggagggcgtgagactggacagagtgagaggcggcagacagaagtacaagagaagaatcgacgccgagaacagcccctacctgaacccccagctggtgcagcccgccaagaagccctacaacaagatcgtgagccacctgctggtggccgagcccgagaagatctacgccatgcccgaccccaccgtgcccgacagcgacatcaaggccctgaccaccctgtgcgacctggccgacagagagctggtggtgatcatcggctgggccaagcacatccccggcttcagcaccctgagcctggccgaccagatgagcctgctgcagagcgcctggatggagatcctgatcctgggcgtggtgtacagaagcctgagcttcgaggacgagctggtgtacgccgacgactacatcatggacgaggaccagagcaagctggccggcctgctggacctgaacaacgccatcctgcagctggtgaagaagtacaagagcatgaagctggagaaggaggagttcgtgaccctgaaggccatcgccctggccaacagcgacagcatgcacatcgaggacgtggaggccgtgcagaagctgcaggacgtgctgcacgaggccctgcaggactacgaggccggccagcacatggaggaccccagaagagccggcaagatgctgatgaccctgcccctgctgagacagaccagcaccaaggccgtgcagcacttctacaacatcaagctggagggcaaggtgcccatgcacaagctgttcctggagatgctggaggccaaggtgtag

SEQ ID NO: 80697 - DNA, 1308 bp, synthetic construct; identical to SEQ ID NO: 80696
  misc_feature 1..1308: note = Description of Artificial Sequence: Synthetic coding sequence
  source 1..1308: mol_type = other DNA

SEQ ID NO: 80698 - DNA, 1308 bp, synthetic construct; identical to SEQ ID NO: 80696
  misc_feature 1..1308: note = Description of Artificial Sequence: Synthetic coding sequence
  source 1..1308: mol_type = other DNA

SEQ ID NO: 80699 - DNA, 1308 bp, synthetic construct; identical to SEQ ID NO: 80696
  misc_feature 1..1308: note = Description of Artificial Sequence: Synthetic coding sequence
  source 1..1308: mol_type = other DNA

SEQ ID NO: 80700 - DNA, 1308 bp, synthetic construct; identical to SEQ ID NO: 80696
  misc_feature 1..1308: note = Description of Artificial Sequence: Synthetic coding sequence
  source 1..1308: mol_type = other DNA

SEQ ID NO: 80701 - DNA, 1308 bp, synthetic construct; identical to SEQ ID NO: 80696
  misc_feature 1..1308: note = Description of Artificial Sequence: Synthetic coding sequence
  source 1..1308: mol_type = other DNA

SEQ ID NO: 80702 - DNA, 1329 bp, synthetic construct
  misc_feature 1..1329: note = Description of Artificial Sequence: Synthetic coding sequence
  source 1..1329: mol_type = other DNA
atgagcaacaaggacagacacatcgacagcagctgcagcagcttcatcaagaccgagcccagcagccccgccagcctgaccgacagcgtgaaccaccacagccccggcggcagcagcgacgccagcggcagctacagcagcaccatgaacggccaccagaacggcctggacagcccccccctgtaccccagcgcccccatcctgggcggcagcggccccgtgagaaagctgtacgacgactgcagcagcaccatcgtggaggacccccagaccaagtgcgagtacatgctgaacagcatgcccaagagactgtgcctggtgtgcggcgacatcgccagcggctaccactacggcgtggccagctgcgaggcctgcaaggccttcttcaagagaaccatccagggcaacatcgagtacagctgccccgccaccaacgagtgcgagatcaccaagagaagaagaaagagctgccaggcctgcagattcatgaagtgcctgaaggtgggcatgctgaaggagggcgtgagactggacagagtgagaggcggcagacagaagtacaagagaagaatcgacgccgagaacagcccctacctgaacccccagctggtgcagcccgccaagaagcccctgctgtggagcgaccccgccgacaacaagatcgtgagccacctgctggtggccgagcccgagaagatctacgccatgcccgaccccaccgtgcccgacagcgacatcaaggccctgaccaccctgtgcgacctggccgacagagagctggtggtgatcatcggctgggccaagcacatccccggcttcagcaccctgagcctggccgaccagatgagcctgctgcagagcgcctggatggagatcctgatcctgggcgtggtgtacagaagcctgagcttcgaggacgagctggtgtacgccgacgactacatcatggacgaggaccagagcaagctggccggcctgctggacctgaacaacgccatcctgcagctggtgaagaagtacaagagcatgaagctggagaaggaggagttcgtgaccctgaaggccatcgccctggccaacagcgacagcatgcacatcgaggacgtggaggccgtgcagaagctgcaggacgtgctgcacgaggccctgcaggactacgaggccggccagcacatggaggaccccagaagagccggcaagatgctgatgaccctgcccctgctgagacagaccagcaccaaggccgtgcagcacttctacaacatcaagctggagggcaaggtgcccatgcacaagctgttcctggagatgctggaggccaaggtgtag

SEQ ID NO: 80703 - DNA, 1377 bp, synthetic construct
  misc_feature 1..1377: note = Description of Artificial Sequence: Synthetic coding sequence
  source 1..1377: mol_type = other DNA
atggacagcgtggagctgtgcctgcccgagagcttcagcctgcactacgaggaggagctgctgtgcagaatgagcaacaaggacagacacatcgacagcagctgcagcagcttcatcaagaccgagcccagcagccccgccagcctgaccgacagcgtgaaccaccacagccccggcggcagcagcgacgccagcggcagctacagcagcaccatgaacggccaccagaacggcctggacagcccccccctgtaccccagcgcccccatcctgggcggcagcggccccgtgagaaagctgtacgacgactgcagcagcaccatcgtggaggacccccagaccaagtgcgagtacatgctgaacagcatgcccaagagactgtgcctggtgtgcggcgacatcgccagcggctaccactacggcgtggccagctgcgaggcctgcaaggccttcttcaagagaaccatccagggcaacatcgagtacagctgccccgccaccaacgagtgcgagatcaccaagagaagaagaaagagctgccaggcctgcagattcatgaagtgcctgaaggtgggcatgctgaaggagggcgtgagactggacagagtgagaggcggcagacagaagtacaagagaagaatcgacgccgagaacagcccctacctgaacccccagctggtgcagcccgccaagaagccctacaacaagatcgtgagccacctgctggtggccgagcccgagaagatctacgccatgcccgaccccaccgtgcccgacagcgacatcaaggccctgaccaccctgtgcgacctggccgacagagagctggtggtgatcatcggctgggccaagcacatccccggcttcagcaccctgagcctggccgaccagatgagcctgctgcagagcgcctggatggagatcctgatcctgggcgtggtgtacagaagcctgagcttcgaggacgagctggtgtacgccgacgactacatcatggacgaggaccagagcaagctggccggcctgctggacctgaacaacgccatcctgcagctggtgaagaagtacaagagcatgaagctggagaaggaggagttcgtgaccctgaaggccatcgccctggccaacagcgacagcatgcacatcgaggacgtggaggccgtgcagaagctgcaggacgtgctgcacgaggccctgcaggactacgaggccggccagcacatggaggaccccagaagagccggcaagatgctgatgaccctgcccctgctgagacagaccagcaccaaggccgtgcagcacttctacaacatcaagctggagggcaaggtgcccatgcacaagctgttcctggagatgctggaggccaaggtgtag

SEQ ID NO: 80704 - DNA, 171 bp, synthetic construct
  misc_feature 1..171: note = Description of Artificial Sequence: Synthetic coding sequence
  source 1..171: mol_type = other DNA
atgagcaacaaggacagacacatcgacagcagctgcagcagcttcatcaagaccgagcccagcagccccgccagcctgaccgacagcgtgaaccaccacagccccggcggcagcagcgacgccagcggcagctacagcagcaccatgaacggccaccagaacggcctgtag

SEQ ID NO: 80705 - DNA, 279 bp, synthetic construct
  misc_feature 1..279: note = Description of Artificial Sequence: Synthetic coding sequence
  source 1..279: mol_type = other DNA
atgagcaacaaggacagacacatcgacagcagctgcagcagcttcatcaagaccgagcccagcagccccgccagcctgaccgacagcgtgaaccaccacagccccggcggcagcagcgacgccagcggcagctacagcagcaccatgaacggccaccagaacggcctggacagcccccccctgtaccccagcgcccccatcctgggcggcagcggccccgtgagaaagctgtacgacgactgcagcagcaccatcgtggaggacccccagaccaagtag

SEQ ID NO: 80706 - DNA, 1065 bp, synthetic construct
  misc_feature 1..1065: note = Description of Artificial Sequence: Synthetic coding sequence
  source 1..1065: mol_type = other DNA
atgagcaacaaggacagacacatcgacagcagctgcagcagcttcatcaagaccgagcccagcagccccgccagcctgaccgacagcgtgaaccaccacagccccggcggcagcagcgacgccagcggcagctacagcagcaccatgaacggccaccagaacggcctggacagcccccccctgtaccccagcgcccccatcctgggcggcagcggccccgtgagaaagctgtacgacgactgcagcagcaccatcgtggaggacccccagaccaagtgcgagtacatgctgaacagcatgcccaagagactgtgcctggtgtgcggcgacatcgccagcggctaccactacggcgtggccagctgcgaggcctgcaaggccttcttcaagagaaccatccagggcaacatcgagtacagctgccccgccaccaacgagtgcgagatcaccaagagaagaagaaagagctgccaggcctgcagattcatgaagtgcctgaaggtgggcatgctgaaggagggcgtgagactggacagagtgagaggcggcagacagaagtacaagagaagaatcgacgccgagaacagcccctacctgaacccccagctggtgcagcccgccaagaagccctacaacaagatcgtgagccacctgctggtggccgagcccgagaagatctacgccatgcccgaccccaccgtgcccgacagcgacatcaaggccctgaccaccctgtgcgacctggccgacagagagctggtggtgatcatcggctgggccaagcacatccccggcttcagcaccctgagcctggccgaccagatgagcctgctgcagagcgcctggatggagatcctgatcctgggcgtggtgtacagaagcctgagcttcgaggacgagctggtgtacgccgacgactacatcatggacgaggaccagagcaagctggccggcctgctggacctgaacaacgccatcctgcagctggtgaagaagtacaagagcatgaagctggagaaggaggagttcgtgaccctgaaggccatcgccctggccaacagctag

SEQ ID NO: 80707 - DNA, 153 bp, synthetic construct
  misc_feature 1..153: note = Description of Artificial Sequence: Synthetic coding sequence
  source 1..153: mol_type = other DNA
atgagcaacaaggacagacacatcgacagcagctgcagcagcttcatcaagaccgagcccagcagccccgccagcctgaccgacagcgtgaaccaccacagccccggcggcagcagcgacgccagcggcagctacagcagcaccatgaactag

SEQ ID NO: 80708 - DNA, 1308 bp, synthetic construct; identical to SEQ ID NO: 80696
  misc_feature 1..1308: note = Description of Artificial Sequence: Synthetic coding sequence
  source 1..1308: mol_type = other DNA

SEQ ID NO: 80709 - DNA, 1308 bp, synthetic construct; identical to SEQ ID NO: 80696
  misc_feature 1..1308: note = Description of Artificial Sequence: Synthetic coding sequence
  source 1..1308: mol_type = other DNA

SEQ ID NO: 80710 - DNA, 1308 bp, synthetic construct; identical to SEQ ID NO: 80696
  misc_feature 1..1308: note = Description of Artificial Sequence: Synthetic coding sequence
  source 1..1308: mol_type = other DNA

SEQ ID NO: 80711 - DNA, 1413 bp, synthetic construct
  misc_feature 1..1413: note = Description of Artificial Sequence: Synthetic coding sequence
  source 1..1413: mol_type = other DNA
atgtggagagagtgcgactggggcctgggcgccgtgaagagcgacctggcctgcgtgcccagcgccaagagactgctgtgcagaatgagcaacaaggacagacacatcgacagcagctgcagcagcttcatcaagaccgagcccagcagccccgccagcctgaccgacagcgtgaaccaccacagccccggcggcagcagcgacgccagcggcagctacagcagcaccatgaacggccaccagaacggcctggacagcccccccctgtaccccagcgcccccatcctgggcggcagcggccccgtgagaaagctgtacgacgactgcagcagcaccatcgtggaggacccccagaccaagtgcgagtacatgctgaacagcatgcccaagagactgtgcctggtgtgcggcgacatcgccagcggctaccactacggcgtggccagctgcgaggcctgcaaggccttcttcaagagaaccatccagggcaacatcgagtacagctgccccgccaccaacgagtgcgagatcaccaagagaagaagaaagagctgccaggcctgcagattcatgaagtgcctgaaggtgggcatgctgaaggagggcgtgagactggacagagtgagaggcggcagacagaagtacaagagaagaatcgacgccgagaacagcccctacctgaacccccagctggtgcagcccgccaagaagcccctgctgtggagcgaccccgccgacaacaagatcgtgagccacctgctggtggccgagcccgagaagatctacgccatgcccgaccccaccgtgcccgacagcgacatcaaggccctgaccaccctgtgcgacctggccgacagagagctggtggtgatcatcggctgggccaagcacatccccggcttcagcaccctgagcctggccgaccagatgagcctgctgcagagcgcctggatggagatcctgatcctgggcgtggtgtacagaagcctgagcttcgaggacgagctggtgtacgccgacgactacatcatggacgaggaccagagcaagctggccggcctgctggacctgaacaacgccatcctgcagctggtgaagaagtacaagagcatgaagctggagaaggaggagttcgtgaccctgaaggccatcgccctggccaacagcgacagcatgcacatcgaggacgtggaggccgtgcagaagctgcaggacgtgctgcacgaggccctgcaggactacgaggccggccagcacatggaggaccccagaagagccggcaagatgctgatgaccctgcccctgctgagacagaccagcaccaaggccgtgcagcacttctacaacatcaagctggagggcaaggtgcccatgcacaagctgttcctggagatgctggaggccaaggtgtag

SEQ ID NO: 80712 - DNA, 1359 bp, synthetic construct
  misc_feature 1..1359: note = Description of Artificial Sequence: Synthetic coding sequence
  source 1..1359: mol_type = other DNA
atgctgtgcggcagacccagaagcagcagcgacaacagaaacttcctgagagagagagccggcctgagcagcgccgccgtgcagaccagaatcggcaacagcgccgccagcagaagaagccccgccgccagaccccccgtgcccgccccccccgccctgcccagaggcagacccggcaccgagggcagcaccagcctgagcgcccccgccgtgctggtggtggccgtggccgtggtggtggtggtggtgagcgccgtggcctgggccatggccaactacatccacgtgccccccggcagccccgaggtgcccaagctgaacgtgaccgtgcaggaccaggaggagcacagatgcagagagggcgccctgagcctgctgcagcacctgagaccccactgggacccccaggaggtgaccctgcagctgttcaccgacggcatcaccaacaagctgatcggctgctacgtgggcaacaccatggaggacgtggtgctggtgagaatctacggcaacaagaccgagctgctggtggacagagacgaggaggtgaagagcttcagagtgctgcaggcccacggctgcgccccccagctgtactgcaccttcaacaacggcctgtgctacgagttcatccagggcgaggccctggaccccaagcacgtgtgcaaccccgccatcttcagactgatcgccagacagctggccaagatccacgccatccacgcccacaacggctggatccccaagagcaacctgtggctgaagatgggcaagtacttcagcctgatccccaccggcttcgccgacgaggacatcaacaagagattcctgagcgacatccccagcagccagatcctgcaggaggagatgacctggatgaaggagatcctgagcaacctgggcagccccgtggtgctgtgccacaacgacctgctgtgcaagaacatcatctacaacgagaagcagggcgacgtgcagttcatcgactacgagtacagcggctacaactacctggcctacgacatcggcaaccacttcaacgagttcgccggcgtgagcgacgtggactacagcctgtaccccgacagagagctgcagagccagtggctgagagcctacctggaggcctacaaggagttcaagggcttcggcaccgaggtgaccgagaaggaggtggagatcctgttcatccaggtgaaccagttcgccctggccagccacttcttctggggcctgtgggccctgatccaggccaagtacagcaccatcgagttcgacttcctgggctacgccatcgtgagattcaaccagtacttcaagatgaagcccgaggtgaccgccctgaaggtgcccgagtag

SEQ ID NO: 80713 - DNA, 777 bp, synthetic construct
  misc_feature 1..777: note = Description of Artificial Sequence: Synthetic coding sequence
  source 1..777: mol_type = other DNA
atgctgtgcggcagacccagaagcagcagcgacaacagaaacttcctgagagagagagccggcctgagcagcgccgccgtgcagaccagaatcggcaacagcgccgccagcagaagaagccccgccgccagaccccccgtgcccgccccccccgccctgcccagaggcagacccggcaccgagggcagcaccagcctgagcgcccccgccgtgctggtggtggccgtggccgtggtggtggtggtggtgagcgccgtggcctgggccatggccaactacatccacgtgccccccggcagccccgaggtgcccaagctgaacgtgaccgtgcaggaccaggaggagcacagatgcagagagggcgccctgagcctgctgcagcacctgagaccccactgggacccccaggaggtgaccctgcagctgttcaccgacggcatcaccaacaagctgatcggctgctacgtgggcaacaccatggaggacgtggtgctggtgagaatctacggcaacaagaccgagctgctggtggacagagacgaggaggtgaagagcttcagagtgctgcaggcccacggctgcgccccccagctgtactgcaccttcaacaacggcctgtgctacgagttcatccagggcgaggccctggaccccaagcacgtgtgcaaccccgccatcttcagcctgagcagcctgaccctgtgcaagggcaagaccaccagatgcttcggcctgaccggctgcagaggcagcagactgctgctgagcttcttctag

SEQ ID NO: 80714 - DNA, 1305 bp, synthetic construct
  misc_feature 1..1305: note = Description of Artificial Sequence: Synthetic coding sequence
  source 1..1305: mol_type = other DNA
atgctgtgcggcagacccagaagcagcagcgacaacagaaacttcctgagagagagagccggcctgagcagcgccgccgtgcagaccagaatcggcaacagcgccgccagcagaagaagccccgccgccagaccccccgtgcccgccccccccgccctgcccagaggcagacccggcaccgagggcagcaccagcctgagcgcccccgccgtgctggtggtggccgtggccgtggtggtggtggtggtgagcgccgtggcctgggccatggccaactacatccacgtgccccccggcagccccgaggtgcccaagctgaacgtgaccgtgcaggaccaggaggagcacagatgcagagagggcgccctgagcctgctgcagcacctgagaccccactgggacccccaggaggtgaccctgcagctgttcaccgacggcatcaccaacaagctgatcggctgctacgtgggcaacaccatggaggacgtggtgctggtgagaatctacggcaacaagaccgagctgctggtggacagagacgaggaggtgaagagcttcagagtgctgcaggcccacggctgcgccccccagctgtactgcaccttcaacaacggcctgtgctacgagttcatccagggcgaggccctggaccccaagcacgtgtgcaaccccgccatcttcagactgatcgccagacagctggccaagatccacgccatccacgcccacaacggctggatccccaagagcaacctgtggctgaagatgggcaagtacttcagcctgatccccaccggcttcgccgacgaggacatcaacaagagattcctgagcgacatccccagcagccagatcctgcaggaggagatgacctggatgaaggagatcctgagcaacctgggcagccccgtggtgctgtgccacaacgacctgctgtgcaagaacatcatctacaacgagaagcagggcgacgtgcagttcatcgactacgagtacagcggctacaactacctggcctacgacatcggcaaccacttcaacgagttcgccggcgtgagcgacgtggactacagcctgtaccccgacagagagctgcagagccagtggctgagagcctacctggaggcctacaaggagttcaagggcttcggcaccgaggtgaccgagaaggaggtggagatcctgttcatccaggtgaaccagttcgccctgggcgagaacctgaacttcatcatcggcaacaagtactgccagctgttcagcctgaagtggctgctgatcagcttcggcgactgcggcctgtag

SEQ ID NO: 80715 - DNA, 627 bp, synthetic construct
  misc_feature 1..627: note = Description of Artificial Sequence: Synthetic coding sequence
  source 1..627: mol_type = other DNA
atggccaagatccacaccatccacgccaacggcagcctgcccaagcccatcctgtggcacaagatgcacaactacttcaccctggtgaagaacgagatcaaccccagcctgagcgccgacgtgcccaaggtggaggtgctggagagagagctggcctggctgaaggagcacctgagccagctggagagccccgtggtgttctgccacaacgacctgctgtgcaagaacatcatctacgacagcatcaagggccacgtgagattcatcgactacgagtacgccggctacaactaccaggccttcgacatcggcaaccacttcaacgagttcgccggcgtgaacgaggtggactactgcctgtaccccgccagagagacccagctgcagtggctgcactactacctgcaggcccagaagggcatggccgtgacccccagagaggtgcagagactgtacgtgcaggtgaacaagttcgccctggccagccacttcttctgggccctgtgggccctgatccagaaccagtacagcaccatcgacttcgacttcctgagatacgccgtgatcagattcaaccagtacttcaaggtgaagccccaggccagcgccctggagatgcccaagtag

SEQ ID NO: 80716 - DNA, 954 bp, synthetic construct
  misc_feature 1..954: note = Description of Artificial Sequence: Synthetic coding sequence
  source 1..954: mol_type = other DNA
atggaggagaaggccgccgccagcgccagctgcagagagccccccggcccccccagagccgccgccgtggcctacttcggcatcagcgtggaccccgacgacatcctgcccggcgccctgagactgatccaggagctgagaccccactggaagcccgagcaggtgagaaccaagagattcaccgacggcatcaccaacaagctggtggcctgctacgtggaggaggacatgcaggactgcgtgctggtgagagtgtacggcgagagaaccgagctgctggtggacagagagaacgaggtgagaaacttccagctgctgagagcccacagctgcgcccccaagctgtactgcaccttccagaacggcctgtgctacgagtacatgcagggcgtggccctggagcccgagcacatcagagagcccagactgttcagcctgagcgccgacgtgcccaaggtggaggtgctggagagagagctggcctggctgaaggagcacctgagccagctggagagccccgtggtgttctgccacaacgacctgctgtgcaagaacatcatctacgacagcatcaagggccacgtgagattcatcgactacgagtacgccggctacaactaccaggccttcgacatcggcaaccacttcaacgagttcgccggcgtgaacgaggtggactactgcctgtaccccgccagagagacccagctgcagtggctgcactactacctgcaggcccagaagggcatggccgtgacccccagagaggtgcagagactgtacgtgcaggtgaacaagttcgccctggccagccacttcttctgggccctgtgggccctgatccagaaccagtacagcaccatcgacttcgacttcctgagatacgccgtgatcagattcaaccagtacttcaaggtgaagccccaggccagcgccctggagatgcccaagtag

SEQ ID NO: 80717 - DNA, 1185 bp, synthetic construct
  misc_feature 1..1185: note = Description of Artificial Sequence: Synthetic coding sequence
  source 1..1185: mol_type = other DNA
atggccgtgccccccagcgccccccagcccagagccagcttccacctgagaagacacaccccctgcccccagtgcagctggggcatggaggagaaggccgccgccagcgccagctgcagagagccccccggcccccccagagccgccgccgtggcctacttcggcatcagcgtggaccccgacgacatcctgcccggcgccctgagactgatccaggagctgagaccccactggaagcccgagcaggtgagaaccaagagattcaccgacggcatcaccaacaagctggtggcctgctacgtggaggaggacatgcaggactgcgtgctggtgagagtgtacggcgagagaaccgagctgctggtggacagagagaacgaggtgagaaacttccagctgctgagagcccacagctgcgcccccaagctgtactgcaccttccagaacggcctgtgctacgagtacatgcagggcgtggccctggagcccgagcacatcagagagcccagactgttcagactgatcgccctggagatggccaagatccacaccatccacgccaacggcagcctgcccaagcccatcctgtggcacaagatgcacaactacttcaccctggtgaagaacgagatcaaccccagcctgagcgccgacgtgcccaaggtggaggtgctggagagagagctggcctggctgaaggagcacctgagccagctggagagccccgtggtgttctgccacaacgacctgctgtgcaagaacatcatctacgacagcatcaagggccacgtgagattcatcgactacgagtacgccggctacaactaccaggccttcgacatcggcaaccacttcaacgagttcgccggcgtgaacgaggtggactactgcctgtaccccgccagagagacccagctgcagtggctgcactactacctgcaggcccagaagggcatggccgtgacccccagagaggtgcagagactgtacgtgcaggtgaacaagttcgccctgggccccagctgcgtgagcagcaccatgaccgccagcctgcagtgctgcagagtgggcaacagacacggcgagatcgccagactgaccctgagcggcctgttccccggcgtgagcctgctgctgggcagcctgggcccccaccccgagcccgtgctgcaccacagactgtag

SEQ ID NO: 80718 - DNA, 1161 bp, synthetic construct
  misc_feature 1..1161: note = Description of Artificial Sequence: Synthetic coding sequence
  source 1..1161: mol_type = other DNA
atggccgtgccccccagcgccccccagcccagagccagcttccacctgagaagacacaccccctgcccccagtgcagctggggcatggaggagaaggccgccgccagcgccagctgcagagagccccccggcccccccagagccgccgccgtggcctacttcggcatcagcgtggaccccgacgacatcctgcccggcgccctgagactgatccaggagctgagaccccactggaagcccgagcaggtgagaaccaagagattcaccgacggcatcaccaacaagctggtggcctgctacgtggaggaggacatgcaggactgcgtgctggtgagagtgtacggcgagagaaccgagctgctggtggacagagagaacgaggtgagaaacttccagctgctgagagcccacagctgcgcccccaagctgtactgcaccttccagaacggcctgtgctacgagtacatgcagggcgtggccctggagcccgagcacatcagagagcccagactgttcagactgatcgccctggagatggccaagatccacaccatccacgccaacggcagcctgcccaagcccatcctgtggcacaagatgcacaactacttcaccctggtgaagaacgagatcaaccccagcctgagcgccgacgtgcccaaggtggaggtgctggagagagagctggcctggctgaaggagcacctgagccagctggagagccccgtggtgttctgccacaacgacctgctgtgcaagaacatcatctacgacagcatcaagggccacgtgagattcatcgactacgagtacgccggctacaactaccaggccttcgacatcggcaaccacttcaacgagttcgccggcgtgaacgaggtggactactgcctgtaccccgccagagagacccagctgcagtggctgcactactacctgcaggcccagaagggcatggccgtgacccccagagaggtgcagagactgtacgtgcaggtgaacaagttcgccctggccagccacttcttctgggccctgtgggccctgatccagaaccagtacagcaccatcgacttcgacttcctgagatacgccgtgatcagattcaaccagtacttcaaggtgaagccccaggccagcgccctggagatgcccaagtag

SEQ ID NO: 80719 - DNA, 759 bp, synthetic construct
  misc_feature 1..759: note = Description of Artificial Sequence: Synthetic coding sequence
  source 1..759: mol_type = other DNA
agaagactgggcggcggcaccgccgagggcaagaccggcagaggcctgggcggccccagctgggacaccggccccagagccatgggcagcctgagcagacccagcttcagcgacagactgatcgccctggagatggccaagatccacaccatccacgccaacggcagcctgcccaagcccatcctgtggcacaagatgcacaactacttcaccctggtgaagaacgagatcaaccccagcctgagcgccgacgtgcccaaggtggaggtgctggagagagagctggcctggctgaaggagcacctgagccagctggagagccccgtggtgttctgccacaacgacctgctgtgcaagaacatcatctacgacagcatcaagggccacgtgagattcatcgactacgagtacgccggctacaactaccaggccttcgacatcggcaaccacttcaacgagttcgccggcgtgaacgaggtggactactgcctgtaccccgccagagagacccagctgcagtggctgcactactacctgcaggcccagaagggcatggccgtgacccccagagaggtgcagagactgtacgtgcaggtgaacaagttcgccctggccagccacttcttctgggccctgtgggccctgatccagaaccagtacagcaccatcgacttcgacttcctgagatacgccgtgatcagattcaaccagtacttcaaggtgaagccccaggccagcgccctggagatgcccaagtag

SEQ ID NO: 80720 - DNA, 765 bp, synthetic construct
  misc_feature 1..765: note = Description of Artificial Sequence: Synthetic coding sequence
  source 1..765: mol_type = other DNA
atggccgaggccgtgctgagagtggccagaagacagctgagccagagaggcggcagcggcgcccccatcctgctgagacagatgttcgagcccgtgagctgcaccttcacctacctgctgggcgacagagagagcagagaggccgtgctgatcgaccccgtgctggagaccgcccccagagacgcccagctgatcaaggagctgggcctgagactgctgtacgccgtgaacacccactgccacgccgaccacatcaccggcagcggcctgctgagaagcctgctgcccggctgccagagcgtgatcagcagactgagcggcgcccaggccgacctgcacatcgaggacggcgacagcatcagattcggcagattcgccctggagaccagagccagccccggccacacccccggctgcgtgaccttcgtgctgaacgaccacagcatggccttcaccggcgacgccctgctgatcagaggctgcggcagaaccgacttccagcagggctgcgccaagaccctgtaccacagcgtgcacgagaagatcttcaccctgcccggcgactgcctgatctaccccgcccacgactaccacggcttcaccgtgagcaccgtggaggaggagagaaccctgaaccccagactgaccctgagctgcgaggagttcgtgaagatcatgggcaacctgaacctgcccaagccccagcagatcgacttcgccgtgcccgccaacatgagatgcggcgtgcagacccccaccgcctag

SEQ ID NO: 80721 - DNA, 1020 bp, synthetic construct
  misc_feature 1..1020: note = Description of Artificial Sequence: Synthetic coding sequence
  source 1..1020: mol_type = other DNA
atggccgacagcgtgaagaccttcctgcaggacctggccagaggcatcaaggacagcatctggggcatctgcaccatcagcaagctggacgccagaatccagcagaagagagaggagcagagaagaagaagagccagcagcgtgctggcccagagaagagcccagagcatcgagagaaagcaggagagcgagcccagaatcgtgagcagaatcttccagtgctgcgcctggaacggcggcgtgttctggttcagcctgctgctgttctacagagtgttcatccccgtgctgcagagcgtgaccgccagaatcatcggcgaccccagcctgcacggcgacgtgtggagctggctggagttcttcctgaccagcatcttcagcgccctgtgggtgctgcccctgttcgtgctgagcaaggtggtgaacgccatctggttccaggacatcgccgacctggccttcgaggtgagcggcagaaagccccaccccttccccagcgtgagcaagatcatcgccgacatgctgttcaacctgctgctgcaggccctgttcctgatccagggcatgttcgtgagcctgttccccatccacctggtgggccagctggtgagcctgctgcacatgagcctgctgtacagcctgtactgcttcgagtacagatggttcaacaagggcatcgagatgcaccagagactgagcaacatcgagagaaactggccctactacttcggcttcggcctgcccctggccttcctgaccgccatgcagagcagctacatcatcagcggctgcctgttcagcatcctgttccccctgttcatcatcagcgccaacgaggccaagcccggcaaggcctacctgttccagctgagactgttcagcctggtggtgttcctgagcaacagactgttccacaagaccgtgtacctgcagagcgccctgagcagcagcaccagcgccgagaagttccccagcccccaccccagccccgccaagctgaaggccaccgccggccactag

SEQ ID NO: 80722 - DNA, 786 bp, synthetic construct
  misc_feature 1..786: note = Description of Artificial Sequence: Synthetic coding sequence
  source 1..786: mol_type = other DNA
atggccgacagcgtgaagaccttcctgcaggacctggccagaggcatcaaggacagcatctggggcatctgcaccatcagcaagctggacgccagaatccagcagaagagagaggagcagagaagaagaagagccagcagcgtgctggcccagagaagagcccagagcatcgagagaaagcaggagagcgagcccagaatcgtgagcagaatcttccagtgctgcgcctggaacggcggcgtgttctggttcagcctgctgctgttctacagagtgttcatccccgtgctgcagagcgtgaccgccagaatcatcggcgaccccagcctgcacggcgacgtgtggagctggctggagttcttcctgaccagcatcttcagcgccctgtgggtgctgcccctgttcgtgctgagcaaggtggtgaacgccatctggttccaggacatcgccgacctggccttcgaggtgagcggcagaaagccccaccccttccccagcgtgagcaagatcatcgccgacatgctgttcaacctgctgctgcaggccctgttcctgatccagggcatgttcgtgagcctgttccccatccacctggtgggccagctggtgagcctgctgcacatgagcctgctgtacagcctgtactgcttcgagtacagatggttcaacaaggtggccgccttcagcctgagcagcttcctgtacagcctgagcgcccccatgaagcagagacccgccaagcacatcagcagcagctgcgccagcagcccctggtggagcagctag

SEQ ID NO: 80723 - DNA, 903 bp, synthetic construct
  misc_feature 1..903: note = Description of Artificial Sequence: Synthetic coding sequence
  source 1..903: mol_type = other DNA
atgatcctggagggcggcggcgtgatgaacctgaaccccggcaacaacctgctgcaccagccccccgcctggaccgacagctacagcacctgcaacgtgagcagcggcttcttcggcggccagtggcacgagatccacccccagtactggaccaagtaccaggtgtgggagtggctgcagcacctgctggacaccaaccagctggacgccaactgcatccccttccaggagttcgacatcaacggcgagcacctgtgcagcatgagcctgcaggagttcaccagagccgccggcaccgccggccagctgctgtacagcaacctgcagcacctgaagtggaacggccagtgcagcagcgacctgttccagagcacccacaacgtgatcgtgaagaccgagcagaccgagcccagcatcatgaacacctggaaggacgagaactacctgtacgacaccaactacggcagcaccgtggacctgctggacagcaagaccttctgcagagcccagatcagcatgaccaccaccagccacctgcccgtggccgagagccccgacatgaagaaggagcaggacccccccgccaagtgccacaccaagaagcacaaccccagaggcacccacctgtgggagttcatcagagacatcctgctgaaccccgacaagaaccccggcctgatcaagtgggaggacagaagcgagggcgtgttcagattcctgaagagcgaggccgtggcccagctgtggggcaagaagaagaacaacagcagcatgacctacgagaagctgagcagagccatgagatactactacaagagagagatcctggagagagtggacggcagaagactggtgtacaagttcggcaagaacgccagaggctggagagagaacgagaactag

SEQ ID NO: 80724 - DNA, 903 bp, synthetic construct; identical to SEQ ID NO: 80723
  misc_feature 1..903: note = Description of Artificial Sequence: Synthetic coding sequence
  source 1..903: mol_type = other DNA

SEQ ID NO: 80725 - DNA, 969 bp, synthetic construct
  misc_feature 1..969: note = Description of Artificial Sequence: Synthetic coding sequence
  source 1..969: mol_type = other DNA
atgggcctgcccgagagaagaggcctggtgctgctgctgagcctggccgagatcctgttcaagatcatgatcctggagggcggcggcgtgatgaacctgaaccccggcaacaacctgctgcaccagccccccgcctggaccgacagctacagcacctgcaacgtgagcagcggcttcttcggcggccagtggcacgagatccacccccagtactggaccaagtaccaggtgtgggagtggctgcagcacctgctggacaccaaccagctggacgccaactgcatccccttccaggagttcgacatcaacggcgagcacctgtgcagcatgagcctgcaggagttcaccagagccgccggcaccgccggccagctgctgtacagcaacctgcagcacctgaagtggaacggccagtgcagcagcgacctgttccagagcacccacaacgtgatcgtgaagaccgagcagaccgagcccagcatcatgaacacctggaaggacgagaactacctgtacgacaccaactacggcagcaccgtggacctgctggacagcaagaccttctgcagagcccagatcagcatgaccaccaccagccacctgcccgtggccgagagccccgacatgaagaaggagcaggacccccccgccaagtgccacaccaagaagcacaaccccagaggcacccacctgtgggagttcatcagagacatcctgctgaaccccgacaagaaccccggcctgatcaagtgggaggacagaagcgagggcgtgttcagattcctgaagagcgaggccgtggcccagctgtggggcaagaagaagaacaacagcagcatgacctacgagaagctgagcagagccatgagatactactacaagagagagatcctggagagagtggacggcagaagactggtgtacaagttcggcaagaacgccagaggctggagagagaacgagaactag

SEQ ID NO: 80726 - DNA, 903 bp, synthetic construct; identical to SEQ ID NO: 80723
  misc_feature 1..903: note = Description of Artificial Sequence: Synthetic coding sequence
  source 1..903: mol_type = other DNA

SEQ ID NO: 80727 - DNA, 834 bp, synthetic construct
  misc_feature 1..834: note = Description of Artificial Sequence: Synthetic coding sequence
  source 1..834: mol_type = other DNA
atgatcctggagggcggcggcgtgatgaacctgaaccccggcaacaacctgctgcaccagccccccgcctggaccgacagctacagcacctgcaacgtgagcagcggcttcttcggcggccagtggcacgagatccacccccagtactggaccaagtaccaggtgtgggagtggctgcagcacctgctggacaccaaccagctggacgccaactgcatccccttccaggagttcgacatcaacggcgagcacctgtgcagcatgagcctgcaggagttcaccagagccgccggcaccgccggccagctgctgtacagcaacctgcagcacctgaagtggaacggccagtgcagcagcgacctgttccagagcacccacaacgtgatcgtgaagaccgagcagaccgagcccagcatcatgaacacctggaaggacgagaactacctgtacgacaccaactacggcagcaccgtggccgagagccccgacatgaagaaggagcaggacccccccgccaagtgccacaccaagaagcacaaccccagaggcacccacctgtgggagttcatcagagacatcctgctgaaccccgacaagaaccccggcctgatcaagtgggaggacagaagcgagggcgtgttcagattcctgaagagcgaggccgtggcccagctgtggggcaagaagaagaacaacagcagcatgacctacgagaagctgagcagagccatgagatactactacaagagagagatcctggagagagtggacggcagaagactggtgtacaagttcggcaagaacgccagaggctggagagagaacgagaactag

SEQ ID NO: 80728 - DNA, 555 bp, synthetic construct
  misc_feature 1..555: note = Description of Artificial Sequence: Synthetic coding sequence
  source 1..555: mol_type = other DNA
atggacctgtggaactgggacgaggccagcccccaggaggtgccccccggcaacaagctggccggcctggagggcgccaagctgggcttctgcttccccgacctggccctgcagggcgacacccccaccgccaccgccgagacctgctggaagggcaccagcagcagcctggccagcttcccccagctggactggggcagcgccctgctgcaccccgaggtgccctggggcgccgagcccgacagccaggccctgccctggagcggcgactggaccgacatggcctgcaccgcctgggacagctggagcggcgccagccagaccctgggccccgcccccctgggccccggccccatccccgccgccggcagcgagggcgccgccggccagaactgcagcccccccgcccccggcctgtaccacctgctggagcccggcgccgcctgcggctggcaccacctgttcgaggccgtgcccgagctgagcagccacagactgctgagaaccgagcccgccgtgggcccctgccagttcggcagcatgccccagaactag

SEQ ID NO: 80729 - DNA, 468 bp, synthetic construct
  misc_feature 1..468: note = Description of Artificial Sequence: Synthetic coding sequence
  source 1..468: mol_type = other DNA
atggacctgtggaactgggacgaggccagcccccaggaggtgccccccggcaacaagctggccggcctggagggcgccaagctgggcttctgcttccccgacctggccctgcagggcgacacccccaccgccaccgccgagacctgctggaagggccccatccagctgtggcagttcctgctggagctgctgcacgacggcgccagaagcagctgcatcagatggaccggcaacagcagagagttccagctgtgcgaccccaaggaggtggccagactgtggggcgagagaaagagaaagcccggcatgaactacgagaagctgagcagaggcctgagatactactacagaagagacatcgtgagaaagagcggcggcagaaagtacacctacagattcggcggcagagtgcccagcctggcctaccccgactgcgccggcggcggcagaggcgccgagacccagtag

SEQ ID NO: 80730 - DNA, 1029 bp, synthetic construct
  misc_feature 1..1029: note = Description of Artificial Sequence: Synthetic coding sequence
  source 1..1029: mol_type = other DNA
atggacctgtggaactgggacgaggccagcccccaggaggtgccccccggcaacaagctggccggcctggagggcgccaagctgggcttctgcttccccgacctggccctgcagggcgacacccccaccgccaccgccgagacctgctggaagggcaccagcagcagcctggccagcttcccccagctggactggggcagcgccctgctgcaccccgaggtgccctggggcgccgagcccgacagccaggccctgccctggagcggcgactggaccgacatggcctgcaccgcctgggacagctggagcggcgccagccagaccctgggccccgcccccctgggccccggccccatccccgccgccggcagcgagggcgccgccggccagaactgcgtgcccgtggccggcgaggccaccagctggagcagagcccaggccgccggcagcaacaccagctgggactgcagcgtgggccccgacggcgacacctactggggcagcggcctgggcggcgagcccagaaccgactgcaccatcagctggggcggccccgccggccccgactgcaccaccagctggaaccccggcctgcacgccggcggcaccaccagcctgaagagataccagagcagcgccctgaccgtgtgcagcgagcccagcccccagagcgacagagccagcctggccagatgccccaagaccaaccacagaggccccatccagctgtggcagttcctgctggagctgctgcacgacggcgccagaagcagctgcatcagatggaccggcaacagcagagagttccagctgtgcgaccccaaggaggtggccagactgtggggcgagagaaagagaaagcccggcatgaactacgagaagctgagcagaggcctgagatactactacagaagagacatcgtgagaaagagcggcggcagaaagtacacctacagattcggcggcagagtgcccagcctggcctaccccgactgcgccggcggcggcagaggcgccgagacccagtag

SEQ ID NO: 80731 - DNA, 1029 bp, synthetic construct; identical to SEQ ID NO: 80730
  misc_feature 1..1029: note = Description of Artificial Sequence: Synthetic coding sequence
  source 1..1029: mol_type = other DNA

SEQ ID NO: 80732 - DNA, 432 bp, synthetic construct
  misc_feature 1..432: note = Description of Artificial Sequence: Synthetic coding sequence
  source 1..432: mol_type = other DNA
atgaaggccggctgcagcatcgtggagaagcccgagggcggcggcggctaccagttccccgactgggcctacaagaccgagagcagccccggcagcagacagatccagctgtggcacttcatcctggagctgctgcagaaggaggagttcagacacgtgatcgcctggcagcagggcgagtacggcgagttcgtgatcaaggaccccgacgaggtggccagactgtggggcagaagaaagtgcaagccccagatgaactacgacaagctgagcagagccctgagatactactacaacaagagaatcctgcacaagaccaagggcaagagattcacctacaagttcaacttcaacaagctggtgatgcccaactaccccttcatcaacatcagaagcagcggcaagatccagaccctgctggtgggcaactag

SEQ ID NO: 80733 - DNA, 1539 bp, synthetic construct
  misc_feature 1..1539: note = Description of Artificial Sequence: Synthetic coding sequence
  source 1..1539: mol_type = other DNA
atgaaggccggctgcagcatcgtggagaagcccgagggcggcggcggctaccagttccccgactgggcctacaagaccgagagcagccccggcagcagacagatccagctgtggcacttcatcctggagctgctgcagaaggaggagttcagacacgtgatcgcctggcagcagggcgagtacggcgagttcgtgatcaaggaccccgacgaggtggccagactgtggggcagaagaaagtgcaagccccagatgaactacgacaagctgagcagagccctgagatactactacaacaagagaatcctgcacaagaccaagggcaagagattcacctacaagttcaacttcaacaagctggtgatgcccaactaccccttcatcaacatcagaagcagcggcgtggtgccccagagcgccccccccgtgcccaccgccagcagcagattccacttcccccccctggacacccacagccccaccaacgacgtgcagcccggcagattcagcgccagcagcctgaccgccagcggccaggagagcagcaacggcaccgacagaaagaccgagctgagcgagctggaggacggcagcgccgccgactggagaagaggcgtggaccccgtgagcagcagaaacgccatcggcggcggcggcatcggccaccagaagagaaagcccgacatcatgctgcccctgttcgccagacccggcatgtaccccgacccccacagccccttcgccgtgagccccatccccggcagaggcggcgtgctgaacgtgcccatcagccccgccctgagcctgacccccaccatcttcagctacagccccagccccggcctgagccccttcaccagcagcagctgcttcagcttcaaccccgaggagatgaagcactacctgcacagccaggcctgcagcgtgttcaactaccacctgagccccagaaccttccccagataccccggcctgatggtgccccccctgcagtgccagatgcaccccgaggagagcacccagttcagcatcaagctgcagcccccccccgtgggcagaaagaacagagagagagtggagagcagcgaggagagcgcccccgtgaccacccccaccatggccagcatcccccccagaatcaaggtggagcccgccagcgagaaggaccccgagagcctgagacagagcgccagagagaaggaggagcacacccaggaggagggcaccgtgcccagcagaaccatcgaggaggagaagggcaccatcttcgccagacccgccgccccccccatctggcccagcgtgcccatcagcacccccagcggcgagcccctggaggtgaccgaggacagcgaggacagacccggcaaggagcccagcgcccccgagaagaaggaggacgccctgatgccccccaagctgagactgaagagaagatggaacgacgaccccgaggccagagagctgagcaagagcggcaagttcctgtggaacggcagcggcccccagggcctggccaccgccgccgccgacgcctag

SEQ ID NO: 80734 - DNA, 1533 bp, synthetic construct
  misc_feature 1..1533: note = Description of Artificial Sequence: Synthetic coding sequence
  source 1..1533: mol_type = other DNA
atggacggcttctacgaccagcaggtgcccttcatggtgcccggcaagagcagaagcgaggagtgcagaggcagacccgtgatcgacagaaagagaaagttcctggacaccgacctggcccacgacagcgaggagctgttccaggacctgagccagctgcaggaggcctggctggccgaggcccaggtgcccgacgacgagcagttcgtgcccgacttccagagcgacaacctggtgctgcacgcccccccccccaccaagatcaagagagagctgcacagccccagcagcgagctgagcagctgcagccacgagcaggccctgggcgccaactacggcgagaagtgcctgtacaactactgcgcctacgacagaaagccccccagcggcttcaagcccctgaccccccccaccacccccctgagccccacccaccagaaccccctgttcccccccccccaggccaccctgcccaccagcggccacgcccccgccgccggccccgtgcagggcgtgggccccgcccccgccccccacagcctgcccgagcccggcccccagcagcagaccttcgccgtgcccagacccccccaccagcccctgcagatgcccaagatgatgcccgagaaccagtaccccagcgagcagagattccagagacagctgagcgagccctgccaccccttccccccccagcccggcgtgcccggcgacaacagacccagctaccacagacagatgagcgagcccatcgtgcccgccgcccccccccccccccagggcttcaagcaggagtaccacgaccccctgtacgagcacggcgtgcccggcatgcccggcccccccgcccacggcttccagagccccatgggcatcaagcaggagcccagagactactgcgtggacagcgaggtgcccaactgccagagcagctacatgagaggcggctacttcagcagcagccacgagggcttcagctacgagaaggaccccagactgtacttcgacgacacctgcgtggtgcccgagagactggagggcaaggtgaagcaggagcccaccatgtacagagagggccccccctaccagagaagaggcagcctgcagctgtggcagttcctggtgaccctgctggacgaccccgccaacgcccacttcatcgcctggaccggcagaggcatggagttcaagctgatcgagcccgaggaggtggccagaagatggggcatccagaagaacagacccgccatgaactacgacaagctgagcagaagcctgagatactactacgagaagggcatcatgcagaaggtggccggcgagagatacgtgtacaagttcgtgtgcgaccccgacgccctgttcagcatggccttccccgacaaccagagacccttcctgaaggccgagagcgagtgccacctgagcgaggaggacaccctgcccctgacccacttcgaggacagccccgcctacctgctggacatggacagatgcagcagcctgccctacgccgagggcttcgcctactag

SEQ ID NO: 80735 - DNA, 399 bp, synthetic construct
  misc_feature 1..399: note = Description of Artificial Sequence: Synthetic coding sequence
  source 1..399: mol_type = other DNA
atggacggcttctacgaccagcaggtgcccttcatggtgcccggcaagagcagaagcgaggagtgcagaggcagacccgtgatcgacagaaagagaaagttcctggacaccgacctggcccacgacagcgaggagctgttccaggacctgagccagctgcaggaggcctggctggccgaggcccaggtgcccgacgacgagcagttcgtgcccgacttccagagcgacaacctggtgctgcacgcccccccccccaccaagatcaagagagagctgcacagccccagcagcgagctgagcagctgcagccacgagcaggccctgggcgccaactacggcgagaagtgcctgtacaactactgcgcctacgacagaaagccccccagcggcttcaagtag

SEQ ID NO: 80736 - DNA, 423 bp, synthetic construct
  misc_feature 1..423: note = Description of Artificial Sequence: Synthetic coding sequence
  source 1..423: mol_type = other DNA
atggacggcttctacgaccagcaggtgcccttcatggtgcccggcaagagcagaagcgaggagtgcagaggcagacccgtgatcgacagaaagagaaagttcctggacaccgacctggcccacgacagcgaggagctgttccaggacctgagccagctgcaggaggcctggctggccgaggcccaggtgcccgacgacgagcagttcgtgcccgacttccagagcgacaacctggtgctgcacgcccccccccccaccaagatcaagagagagctgcacagccccagcagcgagctgagcagctgcagccacgagcaggccctgggcgccaactacggcgagaagtgcctgtacaactactgcgcctacgacagaaagccccccagcggcttcaagcccctgaccccccccaccaccccctag

SEQ ID NO: 80737 - DNA, 1533 bp, synthetic construct; identical to SEQ ID NO: 80734
  misc_feature 1..1533: note = Description of Artificial Sequence: Synthetic coding sequence
  source 1..1533: mol_type = other DNA

SEQ ID NO: 80738 - DNA, 453 bp, synthetic construct
  misc_feature 1..453: note = Description of Artificial Sequence: Synthetic coding sequence
  source 1..453: mol_type = other DNA
atggacggcttctacgaccagcaggtgcccttcatggtgcccggcaagagcagaagcgaggagtgcagaggcagacccgtgatcgacagaaagagaaagttcctggacaccgacctggcccacgacagcgaggagctgttccaggacctgagccagctgcaggaggcctggctggccgaggcccaggtgcccgacgacgagcagttcgtgcccgacttccagagcgacaacctggtgctgcacgcccccccccccaccaagatcaagagagagctgcacagccccagcagcgagctgagcagctgcagccacgagcaggccctgggcgccaactacggcgagaagtgcctgtacaactactgcgcctacgacagaaagccccccagcggcttcaagcccctgaccccccccaccacccccctgagccccacccaccagaaccccctgttctag

SEQ ID NO: 80739 - DNA, 1659 bp, synthetic construct
  misc_feature 1..1659: note = Description of Artificial Sequence: Synthetic coding sequence
  source 1..1659: mol_type = other DNA
atgagcgagagaagatgcccccccgagcacagagagggcgtgaacgacaccggcggcagcctgttcccccagaagctgctgaacgccgagaccagccagagcggcatcagagacgccgagagcaccatggacggcttctacgaccagcaggtgcccttcatggtgcccggcaagagcagaagcgaggagtgcagaggcagacccgtgatcgacagaaagagaaagttcctggacaccgacctggcccacgacagcgaggagctgttccaggacctgagccagctgcaggaggcctggctggccgaggcccaggtgcccgacgacgagcagttcgtgcccgacttccagagcgacaacctggtgctgcacgcccccccccccaccaagatcaagagagagctgcacagccccagcagcgagctgagcagctgcagccacgagcaggccctgggcgccaactacggcgagaagtgcctgtacaactactgcgcctacgacagaaagccccccagcggcttcaagcccctgaccccccccaccacccccctgagccccacccaccagaaccccctgttcccccccccccaggccaccctgcccaccagcggccacgcccccgccgccggccccgtgcagggcgtgggccccgcccccgccccccacagcctgcccgagcccggcccccagcagcagaccttcgccgtgcccagacccccccaccagcccctgcagatgcccaagatgatgcccgagaaccagtaccccagcgagcagagattccagagacagctgagcgagccctgccaccccttccccccccagcccggcgtgcccggcgacaacagacccagctaccacagacagatgagcgagcccatcgtgcccgccgcccccccccccccccagggcttcaagcaggagtaccacgaccccctgtacgagcacggcgtgcccggcatgcccggcccccccgcccacggcttccagagccccatgggcatcaagcaggagcccagagactactgcgtggacagcgaggtgcccaactgccagagcagctacatgagaggcggctacttcagcagcagccacgagggcttcagctacgagaaggaccccagactgtacttcgacgacacctgcgtggtgcccgagagactggagggcaaggtgaagcaggagcccaccatgtacagagagggccccccctaccagagaagaggcagcctgcagctgtggcagttcctggtgaccctgctggacgaccccgccaacgcccacttcatcgcctggaccggcagaggcatggagttcaagctgatcgagcccgaggaggtggccagaagatggggcatccagaagaacagacccgccatgaactacgacaagctgagcagaagcctgagatactactacgagaagggcatcatgcagaaggtggccggcgagagatacgtgtacaagttcgtgtgcgaccccgacgccctgttcagcatggccttccccgacaaccagagacccttcctgaaggccgagagcgagtgccacctgagcgaggaggacaccctgcccctgacccacttcgaggacagccccgcctacctgctggacatggacagatgcagcagcctgccctacgccgagggcttcgcctactag

SEQ ID NO: 80740 - DNA, 1359 bp, synthetic construct
  misc_feature 1..1359: note = Description of Artificial Sequence: Synthetic coding sequence
  source 1..1359: mol_type = other DNA
atgagcgagacccccgcccagtgcagcatcaagcaggagagaatcagctacaccccccccgagagccccgtgcccagctacgccagcagcacccccctgcacgtgcccgtgcccagagccctgagaatggaggaggacagcatcagactgcccgcccacctgagactgcagcccatctactggagcagagacgacgtggcccagtggctgaagtgggccgagaacgagttcagcctgagacccatcgacagcaacaccttcgagatgaacggcaaggccctgctgctgctgaccaaggaggacttcagatacagaagcccccacagcggcgacgtgctgtacgagctgctgcagcacatcctgaagcagagaaagcccagaatcctgttcagccccttcttccaccccggcaacagcatccacacccagcccgaggtgatcctgcaccagaaccacgaggaggacaactgcgtgcagagaacccccagacccagcgtggacaacgtgcaccacaacccccccaccatcgagctgctgcacagaagcagaagccccatcaccaccaaccacagacccagccccgaccccgagcagagacccctgagaagccccctggacaacatgatcagaagactgagccccgccgagagagcccagggccccagaccccaccaggagaacaaccaccaggagagctaccccctgagcgtgagccccatggagaacaaccactgccccgccagcagcgagagccaccccaagcccagcagccccagacaggagagcaccagagtgatccagctgatgcccagccccatcatgcaccccctgatcctgaaccccagacacagcgtggacttcaagcagagcagactgagcgaggacggcctgcacagagagggcaagcccatcaacctgagccacagagaggacctggcctacatgaaccacatcatggtgagcgtgagcccccccgaggagcacgccatgcccatcggcagaatcgccgactgcagactgctgtgggactacgtgtaccagctgctgagcgacagcagatacgagaacttcatcagatgggaggacaaggagagcaagatcttcagaatcgtggaccccaacggcctggccagactgtggggcaaccacaagaacagaaccaacatgacctacgagaagatgagcagagccctgagacactactacaagctgaacatcatcagaaaggagcccggccagagactgctgttcagattcatgaagacccccgacgagatcatgagcggcagaaccgacagactggagcacctggagagccaggagctggacgagcagatctaccaggaggacgagtgctag

SEQ ID NO: 80741 - DNA, 954 bp, synthetic construct
  misc_feature 1..954: note = Description of Artificial Sequence: Synthetic coding sequence
  source 1..954: mol_type = other DNA
atgcaggagggcgagctggccatcagccccatcagccccgtggccgccatgccccccctgggcacccacgtgcaggccagatgcgaggcccagatcaacctgctgggcgagggcggcatctgcaagctgcccggcagactgagaatccagcccgccctgtggagcagagaggacgtgctgcactggctgagatgggccgagcaggagtacagcctgccctgcaccgccgagcacggcttcgagatgaacggcagagccctgtgcatcctgaccaaggacgacttcagacacagagcccccagcagcggcgacgtgctgtacgagctgctgcagtacatcaagacccagagaagagccctggtgtgcggccccttcttcggcggcatcttcagactgaagacccccacccagcacagccccgtgccccccgaggaggtgaccggccccagccagatggacaccagaagaggccacctgctgcagccccccgaccccggcctgaccagcaacttcggccacctggacgaccccggcctggccagatggacccccggcaaggaggagagcctgaacctgtgccactgcgccgagctgggctgcagaacccagggcgtgtgcagcttccccgccatgccccaggcccccatcgacggcagaatcgccgactgcagactgctgtgggactacgtgtaccagctgctgctggacaccagatacgagccctacatcaagtgggaggacaaggacgccaagatcttcagagtggtggaccccaacggcctggccagactgtggggcaaccacaagaacagagtgaacatgacctacgagaagatgagcagagccctgagacactactacaagctgaacatcatcaagaaggagcccggccagaagctgctgttcagaaacggcctgcagctgatcttcatcttcatctggagcttccagtag

SEQ ID NO: 80742 - DNA, 1026 bp, synthetic construct
  misc_feature 1..1026: note = Description of Artificial Sequence: Synthetic coding sequence
  source 1..1026: mol_type = other DNA
atgcaggagggcgagctggccatcagccccatcagccccgtggccgccatgccccccctgggcacccacgtgcaggccagatgcgaggcccagatcaacctgctgggcgagggcggcatctgcaagctgcccggcagactgagaatccagcccgccctgtggagcagagaggacgtgctgcactggctgagatgggccgagcaggagtacagcctgccctgcaccgccgagcacggcttcgagatgaacggcagagccctgtgcatcctgaccaaggacgacttcagacacagagcccccagcagcggcgacgtgctgtacgagctgctgcagtacatcaagacccagagaagagccctggtgtgcggccccttcttcggcggcatcttcagactgaagacccccacccagcacagccccgtgccccccgaggaggtgaccggccccagccagatggacaccagaagaggccacctgctgcagccccccgaccccggcctgaccagcaacttcggccacctggacgaccccggcctggccagatggacccccggcaaggaggagagcctgaacctgtgccactgcgccgagctgggctgcagaacccagggcgtgtgcagcttccccgccatgccccaggcccccatcgacggcagaatcgccgactgcagactgctgtgggactacgtgtaccagctgctgctggacaccagatacgagccctacatcaagtgggaggacaaggacgccaagatcttcagagtggtggaccccaacggcctggccagactgtggggcaaccacaagaacagagtgaacatgacctacgagaagatgagcagagccctgagacactactacaagctgaacatcatcaagaaggagcccggccagaagctgctgttcagattcctgaagacccccggcaagatggtgcaggacaagcacagccacctggagcccctggagagccaggagcaggacagaatcgagttcaaggacaagagacccgagatcagcccctag

SEQ ID NO: 80743 - DNA, 795 bp, synthetic construct
  misc_feature 1..795: note = Description of Artificial Sequence: Synthetic coding sequence
  source 1..795: mol_type = other DNA
atgcaggagggcgagctggccatcagccccatcagccccgtggccgccatgccccccctgggcacccacgtgcaggccagatgcgaggcccagatcaacctgctgggcgagggcggcatctgcaagctgcccggcagactgagaatccagcccgccctgtggagcagagaggacgtgctgcactggctgagatgggccgagcaggagtacagcctgccctgcaccgccgagcacggcttcgagatgaacggcagagccctgtgcatcctgaccaaggacgacttcagacacagagcccccagcagcggcgacgtgctgtacgagctgctgcagtacatcaagacccagagaagagccctggtgtgcggccccttcttcggcggcatcttcagactgaagacccccacccagcacagccccgtgccccccgaggactgcagactgctgtgggactacgtgtaccagctgctgctggacaccagatacgagccctacatcaagtgggaggacaaggacgccaagatcttcagagtggtggaccccaacggcctggccagactgtggggcaaccacaagaacagagtgaacatgacctacgagaagatgagcagagccctgagacactactacaagctgaacatcatcaagaaggagcccggccagaagctgctgttcagattcctgaagacccccggcaagatggtgcaggacaagcacagccacctggagcccctggagagccaggagcaggacagaatcgagttcaaggacaagagacccgagatcagcccctag

SEQ ID NO: 80744 - DNA, 861 bp, synthetic construct
  misc_feature 1..861: note = Description of Artificial Sequence: Synthetic coding sequence
  source 1..861: mol_type = other DNA
atgcaggagggcgagctggccatcagccccatcagccccgtggccgccatgccccccctgggcacccacgtgcaggccagatgcgaggcccagatcaacctgctgggcgagggcggcatctgcaagctgcccggcagactgagagacgtgctgtacgagctgctgcagtacatcaagacccagagaagagccctggtgtgcggccccttcttcggcggcatcttcagactgaagacccccacccagcacagccccgtgccccccgaggaggtgaccggccccagccagatggacaccagaagaggccacctgctgcagccccccgaccccggcctgaccagcaacttcggccacctggacgaccccggcctggccagatggacccccggcaaggaggagagcctgaacctgtgccactgcgccgagctgggctgcagaacccagggcgtgtgcagcttccccgccatgccccaggcccccatcgacggcagaatcgccgactgcagactgctgtgggactacgtgtaccagctgctgctggacaccagatacgagccctacatcaagtgggaggacaaggacgccaagatcttcagagtggtggaccccaacggcctggccagactgtggggcaaccacaagaacagagtgaacatgacctacgagaagatgagcagagccctgagacactactacaagctgaacatcatcaagaaggagcccggccagaagctgctgttcagattcctgaagacccccggcaagatggtgcaggacaagcacagccacctggagcccctggagagccaggagcaggacagaatcgagttcaaggacaagagacccgagatcagcccctag

SEQ ID NO: 80745 - DNA, 573 bp, synthetic construct
  misc_feature 1..573: note = Description of Artificial Sequence: Synthetic coding sequence
  source 1..573: mol_type = other DNA
atggacaccagaagaggccacctgctgcagccccccgaccccggcctgaccagcaacttcggccacctggacgaccccggcctggccagatggacccccggcaaggaggagagcctgaacctgtgccactgcgccgagctgggctgcagaacccagggcgtgtgcagcttccccgccatgccccaggcccccatcgacggcagaatcgccgactgcagactgctgtgggactacgtgtaccagctgctgctggacaccagatacgagccctacatcaagtgggaggacaaggacgccaagatcttcagagtggtggaccccaacggcctggccagactgtggggcaaccacaagaacagagtgaacatgacctacgagaagatgagcagagccctgagacactactacaagctgaacatcatcaagaaggagcccggccagaagctgctgttcagattcctgaagacccccggcaagatggtgcaggacaagcacagccacctggagcccctggagagccaggagcaggacagaatcgagttcaaggacaagagacccgagatcagcccctag

SEQ ID NO: 80746 - DNA, 1242 bp, synthetic construct
  misc_feature 1..1242: note = Description of Artificial Sequence: Synthetic coding sequence
  source 1..1242: mol_type = other DNA
atggccagctgcgccgagcccagcgagcccagcgcccccctgcccgccggcgtgccccccctggaggacttcgaggtgctggacggcgtggaggacgccgagggcgaggaggaggaggaggaggaggaggaggaggaggacgacctgagcgagctgccccccctggaggacatgggccagccccccgccgaggaggccgagcagcccggcgccctggccagagagttcctggccgccatggagcccgagcccgcccccgcccccgcccccgaggagtggctggacatcctgggcaacggcctgctgagaaagaagaccctggtgcccggcccccccggcagcagcagacccgtgaagggccaggtggtgaccgtgcacctgcagaccagcctggagaacggcaccagagtgcaggaggagcccgagctggtgttcaccctgggcgactgcgacgtgatccaggccctggacctgagcgtgcccctgatggacgtgggcgagaccgccatggtgaccgccgacagcaagtactgctacggcccccagggcagcagaagcccctacatccccccccacgccgccctgtgcctggaggtgaccctgaagaccgccgtggacggccccgacctggagatgctgaccggccaggagagagtggccctggccaacagaaagagagagtgcggcaacgcccactaccagagagccgacttcgtgctggccgccaacagctacgacctggccatcaaggccatcaccagcagcgccaaggtggacatgaccttcgaggaggaggcccagctgctgcagctgaaggtgaagtgcctgaacaacctggccgccagccagctgaagctggaccactacagagccgccctgagaagctgcagcctggtgctggagcaccagcccgacaacatcaaggccctgttcagaaagggcaaggtgctggcccagcagggcgagtacagcgaggccatccccatcctgagagccgccctgaagctggagcccagcaacaagaccatccacgccgagctgagcaagctggtgaagaagcacgccgcccagagaagcaccgagaccgccctgtacagaaagatgctgggcaaccccagcagactgcccgccaagtgccccggcaagggcgcctggagcatcccctggaagtggctgttcggcgccaccgccgtggccctgggcggcgtggccctgagcgtggtgatcgccgccagaaactag

SEQ ID NO: 80747 - DNA, 1422 bp, synthetic construct
  misc_feature 1..1422: note = Description of Artificial Sequence: Synthetic coding sequence
  source 1..1422: mol_type = other DNA
atgaactacgacaagctgagcagagccctgagatactactacaacaagagaatcctgcacaagaccaagggcaagagattcacctacaagttcaacttcaacaagctggtgctggtgaactaccccttcatcgacgtgggcctggccggcggcgccgtgccccagagcgccccccccgtgcccagcggcggcagccacttcagattcccccccagcacccccagcgaggtgctgagccccaccgaggaccccagaagcccccccgcctgcagcagcagcagcagcagcctgttcagcgccgtggtggccagaagactgggcagaggcagcgtgagcgactgcagcgacggcaccagcgagctggaggagcccctgggcgaggaccccagagccagaccccccggcccccccgacctgggcgccttcagaggcccccccctggccagactgccccacgaccccggcgtgttcagagtgtaccccagacccagaggcggccccgagcccctgagccccttccccgtgagccccctggccggccccggcagcctgctgcccccccagctgagccccgccctgcccatgacccccacccacctggcctacacccccagccccaccctgagccccatgtaccccagcggcggcggcggccccagcggcagcggcggcggcagccacttcagcttcagccccgaggacatgaagagatacctgcaggcccacacccagagcgtgtacaactaccacctgagccccagagccttcctgcactaccccggcctggtggtgccccagccccagagacccgacaagtgccccctgccccccatggcccccgagaccccccccgtgcccagcagcgccagcagcagcagcagcagcagcagcagccccttcaagttcaagctgcagcccccccccctgggcagaagacagagagccgccggcgagaaggccgtggccggcgccgacaagagcggcggcagcgccggcggcctggccgagggcgccggcgccctggcccccccccccccccccccccagatcaaggtggagcccatcagcgagggcgagagcgaggaggtggaggtgaccgacatcagcgacgaggacgaggaggacggcgaggtgttcaagacccccagagccccccccgccccccccaagcccgagcccggcgaggcccccggcgccagccagtgcatgcccctgaagctgagattcaagagaagatggagcgaggactgcagactggagggcggcggcggccccgccggcggcttcgaggacgagggcgaggacaagaaggtgagaggcgagggccccggcgaggccggcggccccctgacccccagaagagtgagcagcgacctgcagcacgccaccgcccagctgagcctggagcacagagacagctag

SEQ ID NO: 80748 - DNA, 2478 bp, synthetic construct
  misc_feature 1..2478: note = Description of Artificial Sequence: Synthetic coding sequence
  source 1..2478: mol_type = other DNA
atggccgccgacgagggcagcgccgagaagcaggccggcgaggcccacatggccgccgacggcgagaccaacggcagctgcgagaacagcgacgccagcagccacgccaacgccgccaagcacacccaggacagcgccagagtgaacccccaggacggcaccaacaccctgaccagaatcgccgagaacggcgtgagcgagagagacagcgaggccgccaagcagaaccacgtgaccgccgacgacttcgtgcagaccagcgtgatcggcagcaacggctacatcctgaacaagcccgccctgcaggcccagcccctgagaaccaccagcaccctggccagcagcctgcccggccacgccgccaagaccctgcccggcggcgccggcaagggcagaacccccagcgccttcccccagacccccgccgccccccccgccaccctgggcgagggcagcgccgacaccgaggacagaaagctgcccgcccccggcgccgacgtgaaggtgcacagagccagaaagaccatgcccaagagcgtggtgggcctgcacgccgccagcaaggaccccagagaggtgagagaggccagagaccacaaggagcccaaggaggagatcaacaagaacatcagcgacttcggcagacagcagctgctgccccccttccccagcctgcaccagagcctgccccagaaccagtgctacatggccaccaccaagagccagaccgcctgcctgcccttcgtgctggccgccgccgtgagcagaaagaagaagagaagaatgggcacctacagcctggtgcccaagaagaagaccaaggtgctgaagcagagaaccgtgatcgagatgttcaagagcatcacccacagcaccgtgggcagcaagggcgagaaggacctgggcgccagcagcctgcacgtgaacggcgagagcctggagatggacagcgacgaggacgacagcgaggagctggaggaggacgacggccacggcgccgagcaggccgccgccttccccaccgaggacagcagaaccagcaaggagagcatgagcgaggccgacagagcccagaagatggacggcgagagcgaggaggagcaggagagcgtggacaccggcgaggaggaggagggcggcgacgagagcgacctgagcagcgagagcagcatcaagaagaagttcctgaagagaaagggcaagaccgacagcccctggatcaagcccgccagaaagagaagaagaagaagcagaaagaagcccagcggcgccctgggcagcgagagctacaagagcagcgccggcagcgccgagcagaccgcccccggcgacagcaccggctacatggaggtgagcctggacagcctggacctgagagtgaagggcatcctgagcagccaggccgagggcctggccaacggccccgacgtgctggagaccgacggcctgcaggaggtgcccctgtgcagctgcagaatggagacccccaagagcagagagatcaccaccctggccaacaaccagtgcatggccaccgagagcgtggaccacgagctgggcagatgcaccaacagcgtggtgaagtacgagctgatgagacccagcaacaaggcccccctgctggtgctgtgcgaggaccacagaggcagaatggtgaagcaccagtgctgccccggctgcggctacttctgcaccgccggcaacttcatggagtgccagcccgagagcagcatcagccacagattccacaaggactgcgccagcagagtgaacaacgccagctactgcccccactgcggcgaggagagcagcaaggccaaggaggtgaccatcgccaaggccgacaccaccagcaccgtgacccccgtgcccggccaggagaagggcagcgccctggagggcagagccgacaccaccaccggcagcgccgccggcccccccctgagcgaggacgacaagctgcagggcgccgccagccacgtgcccgagggcttcgaccccaccggccccgccggcctgggcagacccacccccggcctgagccagggccccggcaaggagaccctggagagcgccctgatcgccctggacagcgagaagcccaagaagctgagattccaccccaagcagctgtacttcagcgccagacagggcgagctgcagaaggtgctgctgatgctggtggacggcatcgaccccaacttcaagatggagcaccagaacaagagaagccccctgcacgccgccgccgaggccggccacgtggacatctgccacatgctggtgcaggccggcgccaacatcgacacctgcagcgaggaccagagaacccccctgatggaggccgccgagaacaaccacctggaggccgtgaagtacctgatcaaggccggcgccctggtggaccccaagatccagaagaccagcaaggtgtacaccgagagccaggagacccagagaagccagaccatcctgtag

SEQ ID NO: 80749 - DNA, 3462 bp, synthetic construct
  misc_feature 1..3462: note = Description of Artificial Sequence: Synthetic coding sequence
  source 1..3462: mol_type = other DNA
atggccgccgacgagggcagcgccgagaagcaggccggcgaggcccacatggccgccgacggcgagaccaacggcagctgcgagaacagcgacgccagcagccacgccaacgccgccaagcacacccaggacagcgccagagtgaacccccaggacggcaccaacaccctgaccagaatcgccgagaacggcgtgagcgagagagacagcgaggccgccaagcagaaccacgtgaccgccgacgacttcgtgcagaccagcgtgatcggcagcaacggctacatcctgaacaagcccgccctgcaggcccagcccctgagaaccaccagcaccctggccagcagcctgcccggccacgccgccaagaccctgcccggcggcgccggcaagggcagaacccccagcgccttcccccagacccccgccgccccccccgccaccctgggcgagggcagcgccgacaccgaggacagaaagctgcccgcccccggcgccgacgtgaaggtgcacagagccagaaagaccatgcccaagagcgtggtgggcctgcacgccgccagcaaggaccccagagaggtgagagaggccagagaccacaaggagcccaaggaggagatcaacaagaacatcagcgacttcggcagacagcagctgctgccccccttccccagcctgcaccagagcctgccccagaaccagtgctacatggccaccaccaagagccagaccgcctgcctgcccttcgtgctggccgccgccgtgagcagaaagaagaagagaagaatgggcacctacagcctggtgcccaagaagaagaccaaggtgctgaagcagagaaccgtgatcgagatgttcaagagcatcacccacagcaccgtgggcagcaagggcgagaaggacctgggcgccagcagcctgcacgtgaacggcgagagcctggagatggacagcgacgaggacgacagcgaggagctggaggaggacgacggccacggcgccgagcaggccgccgccttccccaccgaggacagcagaaccagcaaggagagcatgagcgaggccgacagagcccagaagatggacggcgagagcgaggaggagcaggagagcgtggacaccggcgaggaggaggagggcggcgacgagagcgacctgagcagcgagagcagcatcaagaagaagttcctgaagagaaagggcaagaccgacagcccctggatcaagcccgccagaaagagaagaagaagaagcagaaagaagcccagcggcgccctgggcagcgagagctacaagagcagcgccggcagcgccgagcagaccgcccccggcgacagcaccggctacatggaggtgagcctggacagcctggacctgagagtgaagggcatcctgagcagccaggccgagggcctggccaacggccccgacgtgctggagaccgacggcctgcaggaggtgcccctgtgcagctgcagaatggagacccccaagagcagagagatcaccaccctggccaacaaccagtgcatggccaccgagagcgtggaccacgagctgggcagatgcaccaacagcgtggtgaagtacgagctgatgagacccagcaacaaggcccccctgctggtgctgtgcgaggaccacagaggcagaatggtgaagcaccagtgctgccccggctgcggctacttctgcaccgccggcaacttcatggagtgccagcccgagagcagcatcagccacagattccacaaggactgcgccagcagagtgaacaacgccagctactgcccccactgcggcgaggagagcagcaaggccaaggaggtgaccatcgccaaggccgacaccaccagcaccgtgacccccgtgcccggccaggagaagggcagcgccctggagggcagagccgacaccaccaccggcagcgccgccggcccccccctgagcgaggacgacaagctgcagggcgccgccagccacgtgcccgagggcttcgaccccaccggccccgccggcctgggcagacccacccccggcctgagccagggccccggcaaggagaccctggagagcgccctgatcgccctggacagcgagaagcccaagaagctgagattccaccccaagcagctgtacttcagcgccagacagggcgagctgcagaaggtgctgctgatgctggtggacggcatcgaccccaacttcaagatggagcaccagaacaagagaagccccctgcacgccgccgccgaggccggccacgtggacatctgccacatgctggtgcaggccggcgccaacatcgacacctgcagcgaggaccagagaacccccctgatggaggccgccgagaacaaccacctggaggccgtgaagtacctgatcaaggccggcgccctggtggaccccaaggacgccgagggcagcacctgcctgcacctggccgccaagaagggccactacgaggtggtgcagtacctgctgagcaacggccagatggacgtgaactgccaggacgacggcggctggacccccatgatctgggccaccgagtacaagcacgtggacctggtgaagctgctgctgagcaagggcagcgacatcaacatcagagacaacgaggagaacatctgcctgcactgggccgccttcagcggctgcgtggacatcgccgagatcctgctggccgccaagtgcgacctgcacgccgtgaacatccacggcgacagccccctgcacatcgccgccagagagaacagatacgactgcgtggtgctgttcctgagcagagacagcgacgtgaccctgaagaacaaggagggcgagacccccctgcagtgcgccagcctgaacagccaggtgtggagcgccctgcagatgagcaaggccctgcaggacagcgcccccgacagacccagccccgtggagagaatcgtgagcagagacatcgccagaggctacgagagaatccccatcccctgcgtgaacgccgtggacagcgagccctgccccagcaactacaagtacgtgagccagaactgcgtgaccagccccatgaacatcgacagaaacatcacccacctgcagtactgcgtgtgcatcgacgactgcagcagcagcaactgcatgtgcggccagctgagcatgagatgctggtacgacaaggacggcagactgctgcccgagttcaacatggccgagccccccctgatcttcgagtgcaaccacgcctgcagctgctggagaaactgcagaaacagagtggtgcagaacggcctgagagccagactgcagctgtacagaaccagagacatgggctggggcgtgagaagcctgcaggacatcccccccggcaccttcgtgtgcgagtacgtgggcgagctgatcagcgacagcgaggccgacgtgagagaggaggacagctacctgttcgacctggacaacaaggtgatcagcgcctag

SEQ ID NO: 80750 - DNA, 3897 bp, synthetic construct
  misc_feature 1..3897: note = Description of Artificial Sequence: Synthetic coding sequence
  source 1..3897: mol_type = other DNA
atggccgccgccgacgccgaggccgtgcccgccagaggcgagccccagcaggactgctgcgtgaagaccgagctgctgggcgaggagacccccatggccgccgacgagggcagcgccgagaagcaggccggcgaggcccacatggccgccgacggcgagaccaacggcagctgcgagaacagcgacgccagcagccacgccaacgccgccaagcacacccaggacagcgccagagtgaacccccaggacggcaccaacaccctgaccagaatcgccgagaacggcgtgagcgagagagacagcgaggccgccaagcagaaccacgtgaccgccgacgacttcgtgcagaccagcgtgatcggcagcaacggctacatcctgaacaagcccgccctgcaggcccagcccctgagaaccaccagcaccctggccagcagcctgcccggccacgccgccaagaccctgcccggcggcgccggcaagggcagaacccccagcgccttcccccagacccccgccgccccccccgccaccctgggcgagggcagcgccgacaccgaggacagaaagctgcccgcccccggcgccgacgtgaaggtgcacagagccagaaagaccatgcccaagagcgtggtgggcctgcacgccgccagcaaggaccccagagaggtgagagaggccagagaccacaaggagcccaaggaggagatcaacaagaacatcagcgacttcggcagacagcagctgctgccccccttccccagcctgcaccagagcctgccccagaaccagtgctacatggccaccaccaagagccagaccgcctgcctgcccttcgtgctggccgccgccgtgagcagaaagaagaagagaagaatgggcacctacagcctggtgcccaagaagaagaccaaggtgctgaagcagagaaccgtgatcgagatgttcaagagcatcacccacagcaccgtgggcagcaagggcgagaaggacctgggcgccagcagcctgcacgtgaacggcgagagcctggagatggacagcgacgaggacgacagcgaggagctggaggaggacgacggccacggcgccgagcaggccgccgccttccccaccgaggacagcagaaccagcaaggagagcatgagcgaggccgacagagcccagaagatggacggcgagagcgaggaggagcaggagagcgtggacaccggcgaggaggaggagggcggcgacgagagcgacctgagcagcgagagcagcatcaagaagaagttcctgaagagaaagggcaagaccgacagcccctggatcaagcccgccagaaagagaagaagaagaagcagaaagaagcccagcggcgccctgggcagcgagagctacaagagcagcgccggcagcgccgagcagaccgcccccggcgacagcaccggctacatggaggtgagcctggacagcctggacctgagagtgaagggcatcctgagcagccaggccgagggcctggccaacggccccgacgtgctggagaccgacggcctgcaggaggtgcccctgtgcagctgcagaatggagacccccaagagcagagagatcaccaccctggccaacaaccagtgcatggccaccgagagcgtggaccacgagctgggcagatgcaccaacagcgtggtgaagtacgagctgatgagacccagcaacaaggcccccctgctggtgctgtgcgaggaccacagaggcagaatggtgaagcaccagtgctgccccggctgcggctacttctgcaccgccggcaacttcatggagtgccagcccgagagcagcatcagccacagattccacaaggactgcgccagcagagtgaacaacgccagctactgcccccactgcggcgaggagagcagcaaggccaaggaggtgaccatcgccaaggccgacaccaccagcaccgtgacccccgtgcccggccaggagaagggcagcgccctggagggcagagccgacaccaccaccggcagcgccgccggcccccccctgagcgaggacgacaagctgcagggcgccgccagccacgtgcccgagggcttcgaccccaccggccccgccggcctgggcagacccacccccggcctgagccagggccccggcaaggagaccctggagagcgccctgatcgccctggacagcgagaagcccaagaagctgagattccaccccaagcagctgtacttcagcgccagacagggcgagctgcagaaggtgctgctgatgctggtggacggcatcgaccccaacttcaagatggagcaccagaacaagagaagccccctgcacgccgccgccgaggccggccacgtggacatctgccacatgctggtgcaggccggcgccaacatcgacacctgcagcgaggaccagagaacccccctgatggaggccgccgagaacaaccacctggaggccgtgaagtacctgatcaaggccggcgccctggtggaccccaaggacgccgagggcagcacctgcctgcacctggccgccaagaagggccactacgaggtggtgcagtacctgctgagcaacggccagatggacgtgaactgccaggacgacggcggctggacccccatgatctgggccaccgagtacaagcacgtggacctggtgaagctgctgctgagcaagggcagcgacatcaacatcagagacaacgaggagaacatctgcctgcactgggccgccttcagcggctgcgtggacatcgccgagatcctgctggccgccaagtgcgacctgcacgccgtgaacatccacggcgacagccccctgcacatcgccgccagagagaacagatacgactgcgtggtgctgttcctgagcagagacagcgacgtgaccctgaagaacaaggagggcgagacccccctgcagtgcgccagcctgaacagccaggtgtggagcgccctgcagatgagcaaggccctgcaggacagcgcccccgacagacccagccccgtggagagaatcgtgagcagagacatcgccagaggctacgagagaatccccatcccctgcgtgaacgccgtggacagcgagccctgccccagcaactacaagtacgtgagccagaactgcgtgaccagccccatgaacatcgacagaaacatcacccacctgcagtactgcgtgtgcatcgacgactgcagcagcagcaactgcatgtgcggccagctgagcatgagatgctggtacgacaaggacggcagactgctgcccgagttcaacatggccgagccccccctgatcttcgagtgcaaccacgcctgcagctgctggagaaactgcagaaacagagtggtgcagaacggcctgagagccagactgcagctgtacagaaccagagacatgggctggggcgtgagaagcctgcaggacatcccccccggcaccttcgtgtgcgagtacgtgggcgagctgatcagcgacagcgaggccgacgtgagagaggaggacagctacctgttcgacctggacaacaaggacggcgaggtgtactgcatcgacgccagattctacggcaacgtgagcagattcatcaaccaccactgcgagcccaacctggtgcccgtgagagtgttcatggcccaccaggacctgagattccccagaatcgccttcttcagcaccagactgatcgaggccggcgagcagctgggcttcgactacggcgagagattctgggacatcaagggcaagctgttcagctgcagatgcggcagccccaagtgcagacacagcagcgccgccctggcccagagacaggccagcgccgcccaggaggcccaggaggacggcctgcccgacaccagcagcgccgccgccgccgaccccctgtag

SEQ ID NO: 80751 - DNA, 2427 bp, synthetic construct
  misc_feature 1..2427: note = Description of Artificial Sequence: Synthetic coding sequence
  source 1..2427: mol_type = other DNA
atggccgccgccgacgccgaggccgtgcccgccagaggcgagccccagcaggactgctgcgtgaagaccgagctgctgggcgaggagacccccatggccgccgacgagggcagcgccgagaagcaggccggcgaggcccacatggccgccgacggcgagaccaacggcagctgcgagaacagcgacgccagcagccacgccaacgccgccaagcacacccaggacagcgccagagtgaacccccaggacggcaccaacaccctgaccagaatcgccgagaacggcgtgagcgagagagacagcgaggccgccaagcagaaccacgtgaccgccgacgacttcgtgcagaccagcgtgatcggcagcaacggctacatcctgaacaagcccgccctgcaggcccagcccctgagaaccaccagcaccctggccagcagcctgcccggccacgccgccaagaccctgcccggcggcgccggcaagggcagaacccccagcgccttcccccagacccccgccgccccccccgccaccctgggcgagggcagcgccgacaccgaggacagaaagctgcccgcccccggcgccgacgtgaaggtgcacagagccagaaagaccatgcccaagagcgtggtgggcctgcacgccgccagcaaggaccccagagaggtgagagaggccagagaccacaaggagcccaaggaggagatcaacaagaacatcagcgacttcggcagacagcagctgctgccccccttccccagcctgcaccagagcctgccccagaaccagtgctacatggccaccaccaagagccagaccgcctgcctgcccttcgtgctggccgccgccgtgagcagaaagaagaagagaagaatgggcacctacagcctggtgcccaagaagaagaccaaggtgctgaagcagagaaccgtgatcgagatgttcaagagcatcacccacagcaccgtgggcagcaagggcgagaaggacctgggcgccagcagcctgcacgtgaacggcgagagcctggagatggacagcgacgaggacgacagcgaggagctggaggaggacgacggccacggcgccgagcaggccgccgccttccccaccgaggacagcagaaccagcaaggagagcatgagcgaggccgacagagcccagaagatggacggcgagagcgaggaggagcaggagagcgtggacaccggcgaggaggaggagggcggcgacgagagcgacctgagcagcgagagcagcatcaagaagaagttcctgaagagaaagggcaagaccgacagcccctggatcaagcccgccagaaagagaagaagaagaagcagaaagaagcccagcggcgccctgggcagcgagagctacaagagcagcgccggcagcgccgagcagaccgcccccggcgacagcaccggctacatggaggtgagcctggacagcctggacctgagagtgaagggcatcctgagcagccaggccgagggcctggccaacggccccgacgtgctggagaccgacggcctgcaggaggtgcccctgtgcagctgcagaatggagacccccaagagcagagagatcaccaccctggccaacaaccagtgcatggccaccgagagcgtggaccacgagctgggcagatgcaccaacagcgtggtgaagtacgagctgatgagacccagcaacaaggcccccctgctggtgctgtgcgaggaccacagaggcagaatggtgaagcaccagtgctgccccggctgcggctacttctgcaccgccggcaacttcatggagtgccagcccgagagcagcatcagccacagattccacaaggactgcgccagcagagtgaacaacgccagctactgcccccactgcggcgaggagagcagcaaggccaaggaggtgaccatcgccaaggccgacaccaccagcaccgtgacccccgtgcccggccaggagaagggcagcgccctggagggcagagccgacaccaccaccggcagcgccgccggcccccccctgagcgaggacgacaagctgcagggcgccgccagccacgtgcccgagggcttcgaccccaccggccccgccggcctgggcagacccacccccggcctgagccagggccccggcaaggagaccctggagagcgccctgatcgccctggacagcgagaagcccaagaagctgagattccaccccaagcagctgtacttcagcgccagacagggcgagctgcagaaggtgctgctgatgctggtggacggcatcgaccccaacttcaagatggagcaccagaacaagagaagccccctgcacgccgccgccgaggccggccacgtggacatctgccacatgctggtgcagttctgcagactgggcagccccagaagcagaggctgcctgtggtag

SEQ ID NO: 80752 - DNA, 3702 bp, synthetic construct
  misc_feature 1..3702: note = Description of Artificial Sequence: Synthetic coding sequence
  source 1..3702: mol_type = other DNA
atgagaggcctgcccagaggcagaggcctgatgagagccagaggcagaggcagagccgccccccccggcagcagaggcagaggcagaggcggcccccacagaggcagaggcagacccagaagcctgctgagcctgcccagagcccaggccagctggaccccccagctgagcaccggcctgaccagcccccccgtgccctgcctgcccagccagggcgaggcccccgccgagatgggcgccctgctgctggagaaggagaccagaggcgccaccgagagagtgcacggcagcctgggcgacacccccagaagcgaggagaccctgcccaaggccacccccgacagcctggagcccgccggccccagcagccccgccagcgtgaccgtgaccgtgggcgacgagggcgccgacacccccgtgggcgccacccccctgatcggcgacgagagcgagaacctggagggcgacggcgacctgagaggcggcagaatcctgctgggccacgccaccaagagcttccccagcagccccagcaagggcggcagctgccccagcagagccaagatgagcatgaccggcgccggcaagagcccccccagcgtgcagagcctggccatgagactgctgagcatgcccggcgcccagggcgccgccgccgccggcagcgagcccccccccgccaccaccagccccgagggccagcccaaggtgcacagagccagaaagaccatgagcaagcccggcaacggccagccccccgtgcccgagaagagaccccccgagatccagcacttcagaatgagcgacgacgtgcacagcctgggcaaggtgaccagcgacctggccaagagaagaaagctgaacagcggcggcggcctgagcgaggagctgggcagcgccagaagaagcggcgaggtgaccctgaccaagggcgaccccggcagcctggaggagtgggagaccgtggtgggcgacgacttcagcctgtactacgacagctacagcgtggacgagagagtggacagcgacagcaagagcgaggtggaggccctgaccgagcagctgagcgaggaggaggaggaggaggaggaggaggaggaggaggaggaggaggaggaggaggaggaggaggaggaggaggacgaggagagcggcaaccagagcgacagaagcggcagcagcggcagaagaaaggccaagaagaagtggagaaaggacagcccctgggtgaagcccagcagaaagagaagaaagagagagccccccagagccaaggagcccagaggcgtgagcaacgacaccagcagcctggagaccgagagaggcttcgaggagctgcccctgtgcagctgcagaatggaggcccccaagatcgacagaatcagcgagagagccggccacaagtgcatggccaccgagagcgtggacggcgagctgagcggctgcaacgccgccatcctgaagagagagaccatgagacccagcagcagagtggccctgatggtgctgtgcgagacccacagagccagaatggtgaagcaccactgctgccccggctgcggctacttctgcaccgccggcaccttcctggagtgccaccccgacttcagagtggcccacagattccacaaggcctgcgtgagccagctgaacggcatggtgttctgcccccactgcggcgaggacgccagcgaggcccaggaggtgaccatccccagaggcgacggcgtgaccccccccgccggcaccgccgcccccgcccccccccccctgagccaggacgtgcccggcagagccgacaccagccagcccagcgccagaatgagaggccacggcgagcccagaagacccccctgcgaccccctggccgacaccatcgacagcagcggccccagcctgaccctgcccaacggcggctgcctgagcgccgtgggcctgcccctgggccccggcagagaggccctggagaaggccctggtgatccaggagagcgagagaagaaagaagctgagattccaccccagacagctgtacctgagcgtgaagcagggcgagctgcagaaggtgatcctgatgctgctggacaacctggaccccaacttccagagcgaccagcagagcaagagaacccccctgcacgccgccgcccagaagggcagcgtggagatctgccacgtgctgctgcaggccggcgccaacatcaacgccgtggacaagcagcagagaacccccctgatggaggccgtggtgaacaaccacctggaggtggccagatacatggtgcagagaggcggctgcgtgtacagcaaggaggaggacggcagcacctgcctgcaccacgccgccaagatcggcaacctggagatggtgagcctgctgctgagcaccggccaggtggacgtgaacgcccaggacagcggcggctggacccccatcatctgggccgccgagcacaagcacatcgaggtgatcagaatgctgctgaccagaggcgccgacgtgaccctgaccgacaacgaggagaacatctgcctgcactgggccagcttcaccggcagcgccgccatcgccgaggtgctgctgaacgccagatgcgacctgcacgccgtgaactaccacggcgacacccccctgcacatcgccgccagagagagctaccacgactgcgtgctgctgttcctgagcagaggcgccaaccccgagctgagaaacaaggagggcgacaccgcctgggacctgacccccgagagaagcgacgtgtggttcgccctgcagctgaacagaaagctgagactgggcgtgggcaacagagccatcagaaccgagaagatcatctgcagagacgtggccagaggctacgagaacgtgcccatcccctgcgtgaacggcgtggacggcgagccctgccccgaggactacaagtacatcagcgagaactgcgagaccagcaccatgaacatcgacagaaacatcacccacctgcagcactgcacctgcgtggacgactgcagcagcagcaactgcctgtgcggccagctgagcatcagatgctggtacgacaaggacggcagactgctgcaggagttcaacaagatcgagccccccctgatcttcgagtgcaaccaggcctgcagctgctggagaaactgcaagaacagagtggtgcagagcggcatcaaggtgagactgcagctgtacagaaccgccaagatgggctggggcgtgagagccctgcagaccatcccccagggcaccttcatctgcgagtacgtgggcgagctgatcagcgacgccgaggccgacgtgagagaggacgacagctacctgttcgacctggacaacaaggacggcgaggtgtactgcatcgacgccagatactacggcaacatcagcagattcatcaaccacctgtgcgaccccaacatcatccccgtgagagtgttcatgctgcaccaggacctgagattccccagaatcgccttcttcagcagcagagacatcagaaccggcgaggagctgggcttcgactacggcgacagattctgggacatcaagagcaagtacttcacctgccagtgcggcagcgagaagtgcaagcacagcgccgaggccatcgccctggagcagagcagactggccagactggacccccaccccgagctgctgcccgagctgggcagcctgccccccgtgaacacctag

SEQ ID NO: 80753 - DNA, 3531 bp, synthetic construct
  misc_feature 1..3531: note = Description of Artificial Sequence: Synthetic coding sequence
  source 1..3531: mol_type = other DNA
atggccgccgccgccggcgccgccgccgccgccgccgccgagggcgaggcccccgccgagatgggcgccctgctgctggagaaggagaccagaggcgccaccgagagagtgcacggcagcctgggcgacacccccagaagcgaggagaccctgcccaaggccacccccgacagcctggagcccgccggccccagcagccccgccagcgtgaccgtgaccgtgggcgacgagggcgccgacacccccgtgggcgccacccccctgatcggcgacgagagcgagaacctggagggcgacggcgacctgagaggcggcagaatcctgctgggccacgccaccaagagcttccccagcagccccagcaagggcggcagctgccccagcagagccaagatgagcatgaccggcgccggcaagagcccccccagcgtgcagagcctggccatgagactgctgagcatgcccggcgcccagggcgccgccgccgccggcagcgagcccccccccgccaccaccagccccgagggccagcccaaggtgcacagagccagaaagaccatgagcaagcccggcaacggccagccccccgtgcccgagaagagaccccccgagatccagcacttcagaatgagcgacgacgtgcacagcctgggcaaggtgaccagcgacctggccaagagaagaaagctgaacagcggcggcggcctgagcgaggagctgggcagcgccagaagaagcggcgaggtgaccctgaccaagggcgaccccggcagcctggaggagtgggagaccgtggtgggcgacgacttcagcctgtactacgacagctacagcgtggacgagagagtggacagcgacagcaagagcgaggtggaggccctgaccgagcagctgagcgaggaggaggaggaggaggaggaggaggaggaggaggaggaggaggaggaggaggaggaggaggaggaggaggacgaggagagcggcaaccagagcgacagaagcggcagcagcggcagaagaaaggccaagaagaagtggagaaaggacagcccctgggtgaagcccagcagaaagagaagaaagagagagccccccagagccaaggagcccagaggcgtgagcaacgacaccagcagcctggagaccgagagaggcttcgaggagctgcccctgtgcagctgcagaatggaggcccccaagatcgacagaatcagcgagagagccggccacaagtgcatggccaccgagagcgtggacggcgagctgagcggctgcaacgccgccatcctgaagagagagaccatgagacccagcagcagagtggccctgatggtgctgtgcgagacccacagagccagaatggtgaagcaccactgctgccccggctgcggctacttctgcaccgccggcaccttcctggagtgccaccccgacttcagagtggcccacagattccacaaggcctgcgtgagccagctgaacggcatggtgttctgcccccactgcggcgaggacgccagcgaggcccaggaggtgaccatccccagaggcgacggcgtgaccccccccgccggcaccgccgcccccgcccccccccccctgagccaggacgtgcccggcagagccgacaccagccagcccagcgccagaatgagaggccacggcgagcccagaagacccccctgcgaccccctggccgacaccatcgacagcagcggccccagcctgaccctgcccaacggcggctgcctgagcgccgtgggcctgcccctgggccccggcagagaggccctggagaaggccctggtgatccaggagagcgagagaagaaagaagctgagattccaccccagacagctgtacctgagcgtgaagcagggcgagctgcagaaggtgatcctgatgctgctggacaacctggaccccaacttccagagcgaccagcagagcaagagaacccccctgcacgccgccgcccagaagggcagcgtggagatctgccacgtgctgctgcaggccggcgccaacatcaacgccgtggacaagcagcagagaacccccctgatggaggccgtggtgaacaaccacctggaggtggccagatacatggtgcagagaggcggctgcgtgtacagcaaggaggaggacggcagcacctgcctgcaccacgccgccaagatcggcaacctggagatggtgagcctgctgctgagcaccggccaggtggacgtgaacgcccaggacagcggcggctggacccccatcatctgggccgccgagcacaagcacatcgaggtgatcagaatgctgctgaccagaggcgccgacgtgaccctgaccgacaacgaggagaacatctgcctgcactgggccagcttcaccggcagcgccgccatcgccgaggtgctgctgaacgccagatgcgacctgcacgccgtgaactaccacggcgacacccccctgcacatcgccgccagagagagctaccacgactgcgtgctgctgttcctgagcagaggcgccaaccccgagctgagaaacaaggagggcgacaccgcctgggacctgacccccgagagaagcgacgtgtggttcgccctgcagctgaacagaaagctgagactgggcgtgggcaacagagccatcagaaccgagaagatcatctgcagagacgtggccagaggctacgagaacgtgcccatcccctgcgtgaacggcgtggacggcgagccctgccccgaggactacaagtacatcagcgagaactgcgagaccagcaccatgaacatcgacagaaacatcacccacctgcagcactgcacctgcgtggacgactgcagcagcagcaactgcctgtgcggccagctgagcatcagatgctggtacgacaaggacggcagactgctgcaggagttcaacaagatcgagccccccctgatcttcgagtgcaaccaggcctgcagctgctggagaaactgcaagaacagagtggtgcagagcggcatcaaggtgagactgcagctgtacagaaccgccaagatgggctggggcgtgagagccctgcagaccatcccccagggcaccttcatctgcgagtacgtgggcgagctgatcagcgacgccgaggccgacgtgagagaggacgacagctacctgttcgacctggacaacaaggacggcgaggtgtactgcatcgacgccagatactacggcaacatcagcagattcatcaaccacctgtgcgaccccaacatcatccccgtgagagtgttcatgctgcaccaggacctgagattccccagaatcgccttcttcagcagcagagacatcagaaccggcgaggagctgggcttcgactacggcgacagattctgggacatcaagagcaagtacttcacctgccagtgcggcagcgagaagtgcaagcacagcgccgaggccatcgccctggagcagagcagactggccagactggacccccaccccgagctgctgcccgagctgggcagcctgccccccgtgaacacctag

SEQ ID NO: 80754 - DNA, 3633 bp, synthetic construct
  misc_feature 1..3633: note = Description of Artificial Sequence: Synthetic coding sequence
  source 1..3633: mol_type = other DNA
atggccgccgccgccggcgccgccgccgccgccgccgccgagggcgaggcccccgccgagatgggcgccctgctgctggagaaggagaccagaggcgccaccgagagagtgcacggcagcctgggcgacacccccagaagcgaggagaccctgcccaaggccacccccgacagcctggagcccgccggccccagcagccccgccagcgtgaccgtgaccgtgggcgacgagggcgccgacacccccgtgggcgccacccccctgatcggcgacgagagcgagaacctggagggcgacggcgacctgagaggcggcagaatcctgctgggccacgccaccaagagcttccccagcagccccagcaagggcggcagctgccccagcagagccaagatgagcatgaccggcgccggcaagagcccccccagcgtgcagagcctggccatgagactgctgagcatgcccggcgcccagggcgccgccgccgccggcagcgagcccccccccgccaccaccagccccgagggccagcccaaggtgcacagagccagaaagaccatgagcaagcccggcaacggccagccccccgtgcccgagaagagaccccccgagatccagcacttcagaatgagcgacgacgtgcacagcctgggcaaggtgaccagcgacctggccaagagaagaaagctgaacagcggcggcggcctgagcgaggagctgggcagcgccagaagaagcggcgaggtgaccctgaccaagggcgaccccggcagcctggaggagtgggagaccgtggtgggcgacgacttcagcctgtactacgacagctacagcgtggacgagagagtggacagcgacagcaagagcgaggtggaggccctgaccgagcagctgagcgaggaggaggaggaggaggaggaggaggaggaggaggaggaggaggaggaggaggaggaggaggaggaggaggacgaggagagcggcaaccagagcgacagaagcggcagcagcggcagaagaaaggccaagaagaagtggagaaaggacagcccctgggtgaagcccagcagaaagagaagaaagagagagccccccagagccaaggagcccagaggcgtgaacggcgtgggcagcagcggccccagcgagtacatggaggtgcccctgggcagcctggagctgcccagcgagggcaccctgagccccaaccacgccggcgtgagcaacgacaccagcagcctggagaccgagagaggcttcgaggagctgcccctgtgcagctgcagaatggaggcccccaagatcgacagaatcagcgagagagccggccacaagtgcatggccaccgagagcgtggacggcgagctgagcggctgcaacgccgccatcctgaagagagagaccatgagacccagcagcagagtggccctgatggtgctgtgcgagacccacagagccagaatggtgaagcaccactgctgccccggctgcggctacttctgcaccgccggcaccttcctggagtgccaccccgacttcagagtggcccacagattccacaaggcctgcgtgagccagctgaacggcatggtgttctgcccccactgcggcgaggacgccagcgaggcccaggaggtgaccatccccagaggcgacggcgtgaccccccccgccggcaccgccgcccccgcccccccccccctgagccaggacgtgcccggcagagccgacaccagccagcccagcgccagaatgagaggccacggcgagcccagaagacccccctgcgaccccctggccgacaccatcgacagcagcggccccagcctgaccctgcccaacggcggctgcctgagcgccgtgggcctgcccctgggccccggcagagaggccctggagaaggccctggtgatccaggagagcgagagaagaaagaagctgagattccaccccagacagctgtacctgagcgtgaagcagggcgagctgcagaaggtgatcctgatgctgctggacaacctggaccccaacttccagagcgaccagcagagcaagagaacccccctgcacgccgccgcccagaagggcagcgtggagatctgccacgtgctgctgcaggccggcgccaacatcaacgccgtggacaagcagcagagaacccccctgatggaggccgtggtgaacaaccacctggaggtggccagatacatggtgcagagaggcggctgcgtgtacagcaaggaggaggacggcagcacctgcctgcaccacgccgccaagatcggcaacctggagatggtgagcctgctgctgagcaccggccaggtggacgtgaacgcccaggacagcggcggctggacccccatcatctgggccgccgagcacaagcacatcgaggtgatcagaatgctgctgaccagaggcgccgacgtgaccctgaccgacaacgaggagaacatctgcctgcactgggccagcttcaccggcagcgccgccatcgccgaggtgctgctgaacgccagatgcgacctgcacgccgtgaactaccacggcgacacccccctgcacatcgccgccagagagagctaccacgactgcgtgctgctgttcctgagcagaggcgccaaccccgagctgagaaacaaggagggcgacaccgcctgggacctgacccccgagagaagcgacgtgtggttcgccctgcagctgaacagaaagctgagactgggcgtgggcaacagagccatcagaaccgagaagatcatctgcagagacgtggccagaggctacgagaacgtgcccatcccctgcgtgaacggcgtggacggcgagccctgccccgaggactacaagtacatcagcgagaactgcgagaccagcaccatgaacatcgacagaaacatcacccacctgcagcactgcacctgcgtggacgactgcagcagcagcaactgcctgtgcggccagctgagcatcagatgctggtacgacaaggacggcagactgctgcaggagttcaacaagatcgagccccccctgatcttcgagtgcaaccaggcctgcagctgctggagaaactgcaagaacagagtggtgcagagcggcatcaaggtgagactgcagctgtacagaaccgccaagatgggctggggcgtgagagccctgcagaccatcccccagggcaccttcatctgcgagtacgtgggcgagctgatcagcgacgccgaggccgacgtgagagaggacgacagctacctgttcgacctggacaacaaggacggcgaggtgtactgcatcgacgccagatactacggcaacatcagcagattcatcaaccacctgtgcgaccccaacatcatccccgtgagagtgttcatgctgcaccaggacctgagattccccagaatcgccttcttcagcagcagagacatcagaaccggcgaggagctgggcttcgactacggcgacagattctgggacatcaagagcaagtacttcacctgccagtgcggcagcgagaagtgcaagcacagcgccgaggccatcgccctggagcagagcagactggccagactggacccccaccccgagctgctgcccgagctgggcagcctgccccccgtgaacacctag

SEQ ID NO: 80755 - DNA, 3531 bp, synthetic construct; identical to SEQ ID NO: 80753
  misc_feature 1..3531: note = Description of Artificial Sequence: Synthetic coding sequence
  source 1..3531: mol_type = other DNA

SEQ ID NO: 80756 - DNA, 3633 bp, synthetic construct; identical to SEQ ID NO: 80754
  misc_feature 1..3633: note = Description of Artificial Sequence: Synthetic coding sequence
  source 1..3633: mol_type = other DNA

SEQ ID NO: 80757 - DNA, 3804 bp, synthetic construct
  misc_feature 1..3804: note = Description of Artificial Sequence: Synthetic coding sequence
  source 1..3804: mol_type = other DNA
atgagaggcctgcccagaggcagaggcctgatgagagccagaggcagaggcagagccgccccccccggcagcagaggcagaggcagaggcggcccccacagaggcagaggcagacccagaagcctgctgagcctgcccagagcccaggccagctggaccccccagctgagcaccggcctgaccagcccccccgtgccctgcctgcccagccagggcgaggcccccgccgagatgggcgccctgctgctggagaaggagaccagaggcgccaccgagagagtgcacggcagcctgggcgacacccccagaagcgaggagaccctgcccaaggccacccccgacagcctggagcccgccggccccagcagccccgccagcgtgaccgtgaccgtgggcgacgagggcgccgacacccccgtgggcgccacccccctgatcggcgacgagagcgagaacctggagggcgacggcgacctgagaggcggcagaatcctgctgggccacgccaccaagagcttccccagcagccccagcaagggcggcagctgccccagcagagccaagatgagcatgaccggcgccggcaagagcccccccagcgtgcagagcctggccatgagactgctgagcatgcccggcgcccagggcgccgccgccgccggcagcgagcccccccccgccaccaccagccccgagggccagcccaaggtgcacagagccagaaagaccatgagcaagcccggcaacggccagccccccgtgcccgagaagagaccccccgagatccagcacttcagaatgagcgacgacgtgcacagcctgggcaaggtgaccagcgacctggccaagagaagaaagctgaacagcggcggcggcctgagcgaggagctgggcagcgccagaagaagcggcgaggtgaccctgaccaagggcgaccccggcagcctggaggagtgggagaccgtggtgggcgacgacttcagcctgtactacgacagctacagcgtggacgagagagtggacagcgacagcaagagcgaggtggaggccctgaccgagcagctgagcgaggaggaggaggaggaggaggaggaggaggaggaggaggaggaggaggaggaggaggaggaggaggaggaggacgaggagagcggcaaccagagcgacagaagcggcagcagcggcagaagaaaggccaagaagaagtggagaaaggacagcccctgggtgaagcccagcagaaagagaagaaagagagagccccccagagccaaggagcccagaggcgtgaacggcgtgggcagcagcggccccagcgagtacatggaggtgcccctgggcagcctggagctgcccagcgagggcaccctgagccccaaccacgccggcgtgagcaacgacaccagcagcctggagaccgagagaggcttcgaggagctgcccctgtgcagctgcagaatggaggcccccaagatcgacagaatcagcgagagagccggccacaagtgcatggccaccgagagcgtggacggcgagctgagcggctgcaacgccgccatcctgaagagagagaccatgagacccagcagcagagtggccctgatggtgctgtgcgagacccacagagccagaatggtgaagcaccactgctgccccggctgcggctacttctgcaccgccggcaccttcctggagtgccaccccgacttcagagtggcccacagattccacaaggcctgcgtgagccagctgaacggcatggtgttctgcccccactgcggcgaggacgccagcgaggcccaggaggtgaccatccccagaggcgacggcgtgaccccccccgccggcaccgccgcccccgcccccccccccctgagccaggacgtgcccggcagagccgacaccagccagcccagcgccagaatgagaggccacggcgagcccagaagacccccctgcgaccccctggccgacaccatcgacagcagcggccccagcctgaccctgcccaacggcggctgcctgagcgccgtgggcctgcccctgggccccggcagagaggccctggagaaggccctggtgatccaggagagcgagagaagaaagaagctgagattccaccccagacagctgtacctgagcgtgaagcagggcgagctgcagaaggtgatcctgatgctgctggacaacctggaccccaacttccagagcgaccagcagagcaagagaacccccctgcacgccgccgcccagaagggcagcgtggagatctgccacgtgctgctgcaggccggcgccaacatcaacgccgtggacaagcagcagagaacccccctgatggaggccgtggtgaacaaccacctggaggtggccagatacatggtgcagagaggcggctgcgtgtacagcaaggaggaggacggcagcacctgcctgcaccacgccgccaagatcggcaacctggagatggtgagcctgctgctgagcaccggccaggtggacgtgaacgcccaggacagcggcggctggacccccatcatctgggccgccgagcacaagcacatcgaggtgatcagaatgctgctgaccagaggcgccgacgtgaccctgaccgacaacgaggagaacatctgcctgcactgggccagcttcaccggcagcgccgccatcgccgaggtgctgctgaacgccagatgcgacctgcacgccgtgaactaccacggcgacacccccctgcacatcgccgccagagagagctaccacgactgcgtgctgctgttcctgagcagaggcgccaaccccgagctgagaaacaaggagggcgacaccgcctgggacctgacccccgagagaagcgacgtgtggttcgccctgcagctgaacagaaagctgagactgggcgtgggcaacagagccatcagaaccgagaagatcatctgcagagacgtggccagaggctacgagaacgtgcccatcccctgcgtgaacggcgtggacggcgagccctgccccgaggactacaagtacatcagcgagaactgcgagaccagcaccatgaacatcgacagaaacatcacccacctgcagcactgcacctgcgtggacgactgcagcagcagcaactgcctgtgcggccagctgagcatcagatgctggtacgacaaggacggcagactgctgcaggagttcaacaagatcgagccccccctgatcttcgagtgcaaccaggcctgcagctgctggagaaactgcaagaacagagtggtgcagagcggcatcaaggtgagactgcagctgtacagaaccgccaagatgggctggggcgtgagagccctgcagaccatcccccagggcaccttcatctgcgagtacgtgggcgagctgatcagcgacgccgaggccgacgtgagagaggacgacagctacctgttcgacctggacaacaaggacggcgaggtgtactgcatcgacgccagatactacggcaacatcagcagattcatcaaccacctgtgcgaccccaacatcatccccgtgagagtgttcatgctgcaccaggacctgagattccccagaatcgccttcttcagcagcagagacatcagaaccggcgaggagctgggcttcgactacggcgacagattctgggacatcaagagcaagtacttcacctgccagtgcggcagcgagaagtgcaagcacagcgccgaggccatcgccctggagcagagcagactggccagactggacccccaccccgagctgctgcccgagctgggcagcctgccccccgtgaacacctag

SEQ ID NO: 80758 - DNA, 3804 bp, synthetic construct; identical to SEQ ID NO: 80757
  misc_feature 1..3804: note = Description of Artificial Sequence: Synthetic coding sequence
  source 1..3804: mol_type = other DNA

SEQ ID NO: 80759 - DNA, 3702 bp, synthetic construct; identical to SEQ ID NO: 80752
  misc_feature 1..3702: note = Description of Artificial Sequence: Synthetic coding sequence
  source 1..3702: mol_type = other DNA

SEQ ID NO: 80760 - DNA, 3804 bp, synthetic construct
  misc_feature 1..3804: note = Description of Artificial Sequence: Synthetic coding sequence
  source 1..3804: mol_type = other DNA
atgagaggcctgcccagaggcagaggcctgatgagagccagaggcagaggcagagccgccccccccggcagcagaggcagaggcagaggcggcccccacagaggcagaggcagacccagaagcctgctgagcctgcccagagcccaggccagctggaccccccagctgagcaccggcctgaccagcccccccgtgccctgcctgcccagccagggcgaggcccccgccgagatgggcgccctgctgctggagaaggagaccagaggcgccaccgagagagtgcacggcagcctgggcgacacccccagaagcgaggagaccctgcccaaggccaaccccgacagcctggagcccgccggccccagcagccccgccagcgtgaccgtgaccgtgggcgacgagggcgccgacacccccgtgggcgccacccccctgatcggcgacgagagcgagaacctggagggcgacggcgacctgagaggcggcagaatcctgctgggccacgccaccaagagcttccccagcagccccagcaagggcggcagctgccccagcagagccaagatgagcatgaccggcgccggcaagagcccccccagcgtgcagagcctggccatgagactgctgagcatgcccggcgcccagggcgccgccgccgccggcagcgagcccccccccgccaccaccagccccgagggccagcccaaggtgcacagagccagaaagaccatgagcaagcccggcaacggccagccccccgtgcccgagaagagaccccccgagatccagcacttcagaatgagcgacgacgtgcacagcctgggcaaggtgaccagcgacctggccaagagaagaaagctgaacagcggcggcggcctgagcgaggagctgggcagcgccagaagaagcggcgaggtgaccctgaccaagggcgaccccggcagcctggaggagtgggagaccgtggtgggcgacgacttcagcctgtactacgacagctacagcgtggacgagagagtggacagcgacagcaagagcgaggtggaggccctgaccgagcagctgagcgaggaggaggaggaggaggaggaggaggaggaggaggaggaggaggaggaggaggaggaggaggaggaggaggacgaggagagcggcaaccagagcgacagaagcggcagcagcggcagaagaaaggccaagaagaagtggagaaaggacagcccctgggtgaagcccagcagaaagagaagaaagagagagccccccagagccaaggagcccagaggcgtgaacggcgtgggcagcagcggccccagcgagtacatggaggtgcccctgggcagcctggagctgcccagcgagggcaccctgagccccaaccacgccggcgtgagcaacgacaccagcagcctggagaccgagagaggcttcgaggagctgcccctgtgcagctgcagaatggaggcccccaagatcgacagaatcagcgagagagccggccacaagtgcatggccaccgagagcgtggacggcgagctgagcggctgcaacgccgccatcctgaagagagagaccatgagacccagcagcagagtggccctgatggtgctgtgcgagacccacagagccagaatggtgaagcaccactgctgccccggctgcggctacttctgcaccgccggcaccttcctggagtgccaccccgacttcagagtggcccacagattccacaaggcctgcgtgagccagctgaacggcatggtgttctgcccccactgcggcgaggacgccagcgaggcccaggaggtgaccatccccagaggcgacggcgtgaccccccccgccggcaccgccgcccccgcccccccccccctgagccaggacgtgcccggcagagccgacaccagccagcccagcgccagaatgagaggccacggcgagcccagaagacccccctgcgaccccctggccgacaccatcgacagcagcggccccagcctgaccctgcccaacggcggctgcctgagcgccgtgggcctgcccctgggccccggcagagaggccctggagaaggccctggtgatccaggagagcgagagaagaaagaagctgagattccaccccagacagctgtacctgagcgtgaagcagggcgagctgcagaaggtgatcctgatgctgctggacaacctggaccccaacttccagagcgaccagcagagcaagagaacccccctgcacgccgccgcccagaagggcagcgtggagatctgccacgtgctgctgcaggccggcgccaacatcaacgccgtggacaagcagcagagaacccccctgatggaggccgtggtgaacaaccacctggaggtggccagatacatggtgcagagaggcggctgcgtgtacagcaaggaggaggacggcagcacctgcctgcaccacgccgccaagatcggcaacctggagatggtgagcctgctgctgagcaccggccaggtggacgtgaacgcccaggacagcggcggctggacccccatcatctgggccgccgagcacaagcacatcgaggtgatcagaatgctgctgaccagaggcgccgacgtgaccctgaccgacaacgaggagaacatctgcctgcactgggccagcttcaccggcagcgccgccatcgccgaggtgctgctgaacgccagatgcgacctgcacgccgtgaactaccacggcgacacccccctgcacatcgccgccagagagagctaccacgactgcgtgctgctgttcctgagcagaggcgccaaccccgagctgagaaacaaggagggcgacaccgcctgggacctgacccccgagagaagcgacgtgtggttcgccctgcagctgaacagaaagctgagactgggcgtgggcaacagagccatcagaaccgagaagatcatctgcagagacgtggccagaggctacgagaacgtgcccatcccctgcgtgaacggcgtggacggcgagccctgccccgaggactacaagtacatcagcgagaactgcgagaccagcaccatgaacatcgacagaaacatcacccacctgcagcactgcacctgcgtggacgactgcagcagcagcaactgcctgtgcggccagctgagcatcagatgctggtacgacaaggacggcagactgctgcaggagttcaacaagatcgagccccccctgatcttcgagtgcaaccaggcctgcagctgctggagaaactgcaagaacagagtggtgcagagcggcatcaaggtgagactgcagctgtacagaaccgccaagatgggctggggcgtgagagccctgcagaccatcccccagggcaccttcatctgcgagtacgtgggcgagctgatcagcgacgccgaggccgacgtgagagaggacgacagctacctgttcgacctggacaacaaggacggcgaggtgtactgcatcgacgccagatactacggcaacatcagcagattcatcaaccacctgtgcgaccccaacatcatccccgtgagagtgttcatgctgcaccaggacctgagattccccagaatcgccttcttcagcagcagagacatcagaaccggcgaggagctgggcttcgactacggcgacagattctgggacatcaagagcaagtacttcacctgccagtgcggcagcgagaagtgcaagcacagcgccgaggccatcgccctggagcagagcagactggccagactggacccccaccccgagctgctgcccgagctgggcagcctgccccccgtgaacacctag

SEQ ID NO: 80761 - DNA, 897 bp, synthetic construct
  misc_feature 1..897: note = Description of Artificial Sequence: Synthetic coding sequence
  source 1..897: mol_type = other DNA
tgaagcaagagaacccccctgcacgccgccgcccagaagggcagcgtggagatctgccacgtgctgctgcaggccggcgccaacatcaacgccgtggacaagcagcagagaacccccctgatggaggccgtggtgaacaaccacctggaggtggccagatacatggtgcagagaggcggctgcgtgtacagcaaggaggaggacggcagcacctgcctgcaccacgccgccaagatcggcaacctggagatggtgagcctgctgctgagcaccggccaggtggacgtgaacgcccagggccagctgcccccccccagcctgcccagccacccccaggacagcggcggctggacccccatcatctgggccgccgagcacaagcacatcgaggtgatcagaatgctgctgaccagaggcgccgacgtgaccctgaccgacaacgaggagaacatctgcctgcactgggccagcttcaccggcagcgccgccatcgccgaggtgctgctgaacgccagatgcgacctgcacgccgtgaactaccacggcgacacccccctgcacatcgccgccagagagagctaccacgactgcgtgctgctgttcctgagcagaggcgccaaccccgagctgagaaacaaggagggcgacaccgcctgggacctgacccccgagagaagcgacgtgtggttcgccctgcagctgaacagaaagctgagactgggcgtgggcaacagagccatcagaaccgagaagatcatctgcagagacgtggccagaggctacgagaacgtgcccatcccctgcgtgaacggcgtggacggcgagccctgccccgaggactacaagtacatcagcgagaactgcgagaccagcaccatgaacatcgacagaaactag

SEQ ID NO: 80762 - DNA, 3633 bp, synthetic construct
  misc_feature 1..3633: note = Description of Artificial Sequence: Synthetic coding sequence
  source 1..3633: mol_type = other DNA
atggccgccgccgccggcgccgccgccgccgccgccgccgagggcgaggcccccgccgagatgggcgccctgctgctggagaaggagaccagaggcgccaccgagagagtgcacggcagcctgggcgacacccccagaagcgaggagaccctgcccaaggccaaccccgacagcctggagcccgccggccccagcagccccgccagcgtgaccgtgaccgtgggcgacgagggcgccgacacccccgtgggcgccacccccctgatcggcgacgagagcgagaacctggagggcgacggcgacctgagaggcggcagaatcctgctgggccacgccaccaagagcttccccagcagccccagcaagggcggcagctgccccagcagagccaagatgagcatgaccggcgccggcaagagcccccccagcgtgcagagcctggccatgagactgctgagcatgcccggcgcccagggcgccgccgccgccggcagcgagcccccccccgccaccaccagccccgagggccagcccaaggtgcacagagccagaaagaccatgagcaagcccggcaacggccagccccccgtgcccgagaagagaccccccgagatccagcacttcagaatgagcgacgacgtgcacagcctgggcaaggtgaccagcgacctggccaagagaagaaagctgaacagcggcggcggcctgagcgaggagctgggcagcgccagaagaagcggcgaggtgaccctgaccaagggcgaccccggcagcctggaggagtgggagaccgtggtgggcgacgacttcagcctgtactacgacagctacagcgtggacgagagagtggacagcgacagcaagagcgaggtggaggccctgaccgagcagctgagcgaggaggaggaggaggaggaggaggaggaggaggaggaggaggaggaggaggaggaggaggaggaggaggaggacgaggagagcggcaaccagagcgacagaagcggcagcagcggcagaagaaaggccaagaagaagtggagaaaggacagcccctgggtgaagcccagcagaaagagaagaaagagagagccccccagagccaaggagcccagaggcgtgaacggcgtgggcagcagcggccccagcgagtacatggaggtgcccctgggcagcctggagctgcccagcgagggcaccctgagccccaaccacgccggcgtgagcaacgacaccagcagcctggagaccgagagaggcttcgaggagctgcccctgtgcagctgcagaatggaggcccccaagatcgacagaatcagcgagagagccggccacaagtgcatggccaccgagagcgtggacggcgagctgagcggctgcaacgccgccatcctgaagagagagaccatgagacccagcagcagagtggccctgatggtgctgtgcgagacccacagagccagaatggtgaagcaccactgctgccccggctgcggctacttctgcaccgccggcaccttcctggagtgccaccccgacttcagagtggcccacagattccacaaggcctgcgtgagccagctgaacggcatggtgttctgcccccactgcggcgaggacgccagcgaggcccaggaggtgaccatccccagaggcgacggcgtgaccccccccgccggcaccgccgcccccgcccccccccccctgagccaggacgtgcccggcagagccgacaccagccagcccagcgccagaatgagaggccacggcgagcccagaagacccccctgcgaccccctggccgacaccatcgacagcagcggccccagcctgaccctgcccaacggcggctgcctgagcgccgtgggcctgcccctgggccccggcagagaggccctggagaaggccctggtgatccaggagagcgagagaagaaagaagctgagattccaccccagacagctgtacctgagcgtgaagcagggcgagctgcagaaggtgatcctgatgctgctggacaacctggaccccaacttccagagcgaccagcagagcaagagaacccccctgcacgccgccgcccagaagggcagcgtggagatctgccacgtgctgctgcaggccggcgccaacatcaacgccgtggacaagcagcagagaacccccctgatggaggccgtggtgaacaaccacctggaggtggccagatacatggtgcagagaggcggctgcgtgtacagcaaggaggaggacggcagcacctgcctgcaccacgccgccaagatcggcaacctggagatggtgagcctgctgctgagcaccggccaggtggacgtgaacgcccaggacagcggcggctggacccccatcatctgggccgccgagcacaagcacatcgaggtgatcagaatgctgctgaccagaggcgccgacgtgaccctgaccgacaacgaggagaacatctgcctgcactgggccagcttcaccggcagcgccgccatcgccgaggtgctgctgaacgccagatgcgacctgcacgccgtgaactaccacggcgacacccccctgcacatcgccgccagagagagctaccacgactgcgtgctgctgttcctgagcagaggcgccaaccccgagctgagaaacaaggagggcgacaccgcctgggacctgacccccgagagaagcgacgtgtggttcgccctgcagctgaacagaaagctgagactgggcgtgggcaacagagccatcagaaccgagaagatcatctgcagagacgtggccagaggctacgagaacgtgcccatcccctgcgtgaacggcgtggacggcgagccctgccccgaggactacaagtacatcagcgagaactgcgagaccagcaccatgaacatcgacagaaacatcacccacctgcagcactgcacctgcgtggacgactgcagcagcagcaactgcctgtgcggccagctgagcatcagatgctggtacgacaaggacggcagactgctgcaggagttcaacaagatcgagccccccctgatcttcgagtgcaaccaggcctgcagctgctggagaaactgcaagaacagagtggtgcagagcggcatcaaggtgagactgcagctgtacagaaccgccaagatgggctggggcgtgagagccctgcagaccatcccccagggcaccttcatctgcgagtacgtgggcgagctgatcagcgacgccgaggccgacgtgagagaggacgacagctacctgttcgacctggacaacaaggacggcgaggtgtactgcatcgacgccagatactacggcaacatcagcagattcatcaaccacctgtgcgaccccaacatcatccccgtgagagtgttcatgctgcaccaggacctgagattccccagaatcgccttcttcagcagcagagacatcagaaccggcgaggagctgggcttcgactacggcgacagattctgggacatcaagagcaagtacttcacctgccagtgcggcagcgagaagtgcaagcacagcgccgaggccatcgccctggagcagagcagactggccagactggacccccaccccgagctgctgcccgagctgggcagcctgccccccgtgaacacctag

SEQ ID NO: 80763 - DNA, 897 bp, synthetic construct; identical to SEQ ID NO: 80761
  misc_feature 1..897: note = Description of Artificial Sequence: Synthetic coding sequence
  source 1..897: mol_type = other DNA

SEQ ID NO: 80764 - DNA, 3531 bp, synthetic construct; identical to SEQ ID NO: 80753
  misc_feature 1..3531: note = Description of Artificial Sequence: Synthetic coding sequence
  source 1..3531: mol_type = other DNA

SEQ ID NO: 80765 - DNA, 3804 bp, synthetic construct; identical to SEQ ID NO: 80757
  misc_feature 1..3804: note = Description of Artificial Sequence: Synthetic coding sequence
  source 1..3804: mol_type = other DNA

SEQ ID NO: 80766 - DNA, 3633 bp, synthetic construct; identical to SEQ ID NO: 80762
  misc_feature 1..3633: note = Description of Artificial Sequence: Synthetic coding sequence
  source 1..3633: mol_type = other DNA

SEQ ID NO: 80767 - DNA, 897 bp, synthetic construct; identical to SEQ ID NO: 80761
  misc_feature 1..897: note = Description of Artificial Sequence: Synthetic coding sequence
  source 1..897: mol_type = other DNA

SEQ ID NO: 80768 - DNA, 2769 bp, synthetic construct
  misc_feature 1..2769: note = Description of Artificial Sequence: Synthetic coding sequence
  source 1..2769: mol_type = other DNA
agcgaggtggaggccctgaccgagcagctgagcgaggaggaggaggaggaggaggaggaggaggaggaggaggaggaggaggaggaggaggaggaggaggaggaggacgaggagagcggcaaccagagcgacagaagcggcagcagcggcagaagaaaggccaagaagaagtggagaaaggacagcccctgggtgaagcccagcagaaagagaagaaagagagagccccccagagccaaggagcccagaggcgtgaacggcgtgggcagcagcggccccagcgagtacatggaggtgcccctgggcagcctggagctgcccagcgagggcaccctgagccccaaccacgccggcgtgagcaacgacaccagcagcctggagaccgagagaggcttcgaggagctgcccctgtgcagctgcagaatggaggcccccaagatcgacagaatcagcgagagagccggccacaagtgcatggccaccgagagcgtggacggcgagctgagcggctgcaacgccgccatcctgaagagagagaccatgagacccagcagcagagtggccctgatggtgctgtgcgagacccacagagccagaatggtgaagcaccactgctgccccggctgcggctacttctgcaccgccggcaccttcctggagtgccaccccgacttcagagtggcccacagattccacaaggcctgcgtgagccagctgaacggcatggtgttctgcccccactgcggcgaggacgccagcgaggcccaggaggtgaccatccccagaggcgacggcgtgaccccccccgccggcaccgccgcccccgcccccccccccctgagccaggacgtgcccggcagagccgacaccagccagcccagcgccagaatgagaggccacggcgagcccagaagacccccctgcgaccccctggccgacaccatcgacagcagcggccccagcctgaccctgcccaacggcggctgcctgagcgccgtgggcctgcccctgggccccggcagagaggccctggagaaggccctggtgatccaggagagcgagagaagaaagaagctgagattccaccccagacagctgtacctgagcgtgaagcagggcgagctgcagaaggtgatcctgatgctgctggacaacctggaccccaacttccagagcgaccagcagagcaagagaacccccctgcacgccgccgcccagaagggcagcgtggagatctgccacgtgctgctgcaggccggcgccaacatcaacgccgtggacaagcagcagagaacccccctgatggaggccgtggtgaacaaccacctggaggtggccagatacatggtgcagagaggcggctgcgtgtacagcaaggaggaggacggcagcacctgcctgcaccacgccgccaagatcggcaacctggagatggtgagcctgctgctgagcaccggccaggtggacgtgaacgcccaggacagcggcggctggacccccatcatctgggccgccgagcacaagcacatcgaggtgatcagaatgctgctgaccagaggcgccgacgtgaccctgaccgacaacgaggagaacatctgcctgcactgggccagcttcaccggcagcgccgccatcgccgaggtgctgctgaacgccagatgcgacctgcacgccgtgaactaccacggcgacacccccctgcacatcgccgccagagagagctaccacgactgcgtgctgctgttcctgagcagaggcgccaaccccgagctgagaaacaaggagggcgacaccgcctgggacctgacccccgagagaagcgacgtgtggttcgccctgcagctgaacagaaagctgagactgggcgtgggcaacagagccatcagaaccgagaagatcatctgcagagacgtggccagaggctacgagaacgtgcccatcccctgcgtgaacggcgtggacggcgagccctgccccgaggactacaagtacatcagcgagaactgcgagaccagcaccatgaacatcgacagaaacatcacccacctgcagcactgcacctgcgtggacgactgcagcagcagcaactgcctgtgcggccagctgagcatcagatgctggtacgacaaggacggcagactgctgcaggagttcaacaagatcgagccccccctgatcttcgagtgcaaccaggcctgcagctgctggagaaactgcaagaacagagtggtgcagagcggcatcaaggtgagactgcagctgtacagaaccgccaagatgggctggggcgtgagagccctgcagaccatcccccagggcaccttcatctgcgagtacgtgggcgagctgatcagcgacgccgaggccgacgtgagagaggacgacagctacctgttcgacctggacaacaaggacggcgaggtgtactgcatcgacgccagatactacggcaacatcagcagattcatcaaccacctgtgcgaccccaacatcatccccgtgagagtgttcatgctgcaccaggacctgagattccccagaatcgccttcttcagcagcagagacatcagaaccggcgaggagctgggcttcgactacggcgacagattctgggacatcaagagcaagtacttcacctgccagtgcggcagcgagaagtgcaagcacagcgccgaggccatcgccctggagcagagcagactggccagactggacccccaccccgagctgctgcccgagctgggcagcctgccccccgtgaacacctag

SEQ ID NO: 80769 - DNA, 3702 bp, synthetic construct
  misc_feature 1..3702: note = Description of Artificial Sequence: Synthetic coding sequence
  source 1..3702: mol_type = other DNA
atgagaggcctgcccagaggcagaggcctgatgagagccagaggcagaggcagagccgccccccccggcagcagaggcagaggcagaggcggcccccacagaggcagaggcagacccagaagcctgctgagcctgcccagagcccaggccagctggaccccccagctgagcaccggcctgaccagcccccccgtgccctgcctgcccagccagggcgaggcccccgccgagatgggcgccctgctgctggagaaggagaccagaggcgccaccgagagagtgcacggcagcctgggcgacacccccagaagcgaggagaccctgcccaaggccaaccccgacagcctggagcccgccggccccagcagccccgccagcgtgaccgtgaccgtgggcgacgagggcgccgacacccccgtgggcgccacccccctgatcggcgacgagagcgagaacctggagggcgacggcgacctgagaggcggcagaatcctgctgggccacgccaccaagagcttccccagcagccccagcaagggcggcagctgccccagcagagccaagatgagcatgaccggcgccggcaagagcccccccagcgtgcagagcctggccatgagactgctgagcatgcccggcgcccagggcgccgccgccgccggcagcgagcccccccccgccaccaccagccccgagggccagcccaaggtgcacagagccagaaagaccatgagcaagcccggcaacggccagccccccgtgcccgagaagagaccccccgagatccagcacttcagaatgagcgacgacgtgcacagcctgggcaaggtgaccagcgacctggccaagagaagaaagctgaacagcggcggcggcctgagcgaggagctgggcagcgccagaagaagcggcgaggtgaccctgaccaagggcgaccccggcagcctggaggagtgggagaccgtggtgggcgacgacttcagcctgtactacgacagctacagcgtggacgagagagtggacagcgacagcaagagcgaggtggaggccctgaccgagcagctgagcgaggaggaggaggaggaggaggaggaggaggaggaggaggaggaggaggaggaggaggaggaggaggaggaggacgaggagagcggcaaccagagcgacagaagcggcagcagcggcagaagaaaggccaagaagaagtggagaaaggacagcccctgggtgaagcccagcagaaagagaagaaagagagagccccccagagccaaggagcccagaggcgtgagcaacgacaccagcagcctggagaccgagagaggcttcgaggagctgcccctgtgcagctgcagaatggaggcccccaagatcgacagaatcagcgagagagccggccacaagtgcatggccaccgagagcgtggacggcgagctgagcggctgcaacgccgccatcctgaagagagagaccatgagacccagcagcagagtggccctgatggtgctgtgcgagacccacagagccagaatggtgaagcaccactgctgccccggctgcggctacttctgcaccgccggcaccttcctggagtgccaccccgacttcagagtggcccacagattccacaaggcctgcgtgagccagctgaacggcatggtgttctgcccccactgcggcgaggacgccagcgaggcccaggaggtgaccatccccagaggcgacggcgtgaccccccccgccggcaccgccgcccccgcccccccccccctgagccaggacgtgcccggcagagccgacaccagccagcccagcgccagaatgagaggccacggcgagcccagaagacccccctgcgaccccctggccgacaccatcgacagcagcggccccagcctgaccctgcccaacggcggctgcctgagcgccgtgggcctgcccctgggccccggcagagaggccctggagaaggccctggtgatccaggagagcgagagaagaaagaagctgagattccaccccagacagctgtacctgagcgtgaagcagggcgagctgcagaaggtgatcctgatgctgctggacaacctggaccccaacttccagagcgaccagcagagcaagagaacccccctgcacgccgccgcccagaagggcagcgtggagatctgccacgtgctgctgcaggccggcgccaacatcaacgccgtggacaagcagcagagaacccccctgatggaggccgtggtgaacaaccacctggaggtggccagatacatggtgcagagaggcggctgcgtgtacagcaaggaggaggacggcagcacctgcctgcaccacgccgccaagatcggcaacctggagatggtgagcctgctgctgagcaccggccaggtggacgtgaacgcccaggacagcggcggctggacccccatcatctgggccgccgagcacaagcacatcgaggtgatcagaatgctgctgaccagaggcgccgacgtgaccctgaccgacaacgaggagaacatctgcctgcactgggccagcttcaccggcagcgccgccatcgccgaggtgctgctgaacgccagatgcgacctgcacgccgtgaactaccacggcgacacccccctgcacatcgccgccagagagagctaccacgactgcgtgctgctgttcctgagcagaggcgccaaccccgagctgagaaacaaggagggcgacaccgcctgggacctgacccccgagagaagcgacgtgtggttcgccctgcagctgaacagaaagctgagactgggcgtgggcaacagagccatcagaaccgagaagatcatctgcagagacgtggccagaggctacgagaacgtgcccatcccctgcgtgaacggcgtggacggcgagccctgccccgaggactacaagtacatcagcgagaactgcgagaccagcaccatgaacatcgacagaaacatcacccacctgcagcactgcacctgcgtggacgactgcagcagcagcaactgcctgtgcggccagctgagcatcagatgctggtacgacaaggacggcagactgctgcaggagttcaacaagatcgagccccccctgatcttcgagtgcaaccaggcctgcagctgctggagaaactgcaagaacagagtggtgcagagcggcatcaaggtgagactgcagctgtacagaaccgccaagatgggctggggcgtgagagccctgcagaccatcccccagggcaccttcatctgcgagtacgtgggcgagctgatcagcgacgccgaggccgacgtgagagaggacgacagctacctgttcgacctggacaacaaggacggcgaggtgtactgcatcgacgccagatactacggcaacatcagcagattcatcaaccacctgtgcgaccccaacatcatccccgtgagagtgttcatgctgcaccaggacctgagattccccagaatcgccttcttcagcagcagagacatcagaaccggcgaggagctgggcttcgactacggcgacagattctgggacatcaagagcaagtacttcacctgccagtgcggcagcgagaagtgcaagcacagcgccgaggccatcgccctggagcagagcagactggccagactggacccccaccccgagctgctgcccgagctgggcagcctgccccccgtgaacacctag

SEQ ID NO: 80770 - DNA, 3702 bp, synthetic construct; identical to SEQ ID NO: 80752
  misc_feature 1..3702: note = Description of Artificial Sequence: Synthetic coding sequence
  source 1..3702: mol_type = other DNA

SEQ ID NO: 80771 - DNA, 3633 bp, synthetic construct; identical to SEQ ID NO: 80754
  misc_feature 1..3633: note = Description of Artificial Sequence: Synthetic coding sequence
  source 1..3633: mol_type = other DNA

SEQ ID NO: 80772 - DNA, 897 bp, synthetic construct; identical to SEQ ID NO: 80761
  misc_feature 1..897: note = Description of Artificial Sequence: Synthetic coding sequence
  source 1..897: mol_type = other DNA

SEQ ID NO: 80773 - DNA, 3804 bp, synthetic construct; identical to SEQ ID NO: 80757
  misc_feature 1..3804: note = Description of Artificial Sequence: Synthetic coding sequence
  source 1..3804: mol_type = other DNA

SEQ ID NO: 80774 - DNA, 2667 bp, synthetic construct
  misc_feature 1..2667: note = Description of Artificial Sequence: Synthetic coding sequence
  source 1..2667: mol_type = other DNA
agcgaggtggaggccctgaccgagcagctgagcgaggaggaggaggaggaggaggaggaggaggaggaggaggaggaggaggaggaggaggaggaggaggaggaggacgaggagagcggcaaccagagcgacagaagcggcagcagcggcagaagaaaggccaagaagaagtggagaaaggacagcccctgggtgaagcccagcagaaagagaagaaagagagagccccccagagccaaggagcccagaggcgtgagcaacgacaccagcagcctggagaccgagagaggcttcgaggagctgcccctgtgcagctgcagaatggaggcccccaagatcgacagaatcagcgagagagccggccacaagtgcatggccaccgagagcgtggacggcgagctgagcggctgcaacgccgccatcctgaagagagagaccatgagacccagcagcagagtggccctgatggtgctgtgcgagacccacagagccagaatggtgaagcaccactgctgccccggctgcggctacttctgcaccgccggcaccttcctggagtgccaccccgacttcagagtggcccacagattccacaaggcctgcgtgagccagctgaacggcatggtgttctgcccccactgcggcgaggacgccagcgaggcccaggaggtgaccatccccagaggcgacggcgtgaccccccccgccggcaccgccgcccccgcccccccccccctgagccaggacgtgcccggcagagccgacaccagccagcccagcgccagaatgagaggccacggcgagcccagaagacccccctgcgaccccctggccgacaccatcgacagcagcggccccagcctgaccctgcccaacggcggctgcctgagcgccgtgggcctgcccctgggccccggcagagaggccctggagaaggccctggtgatccaggagagcgagagaagaaagaagctgagattccaccccagacagctgtacctgagcgtgaagcagggcgagctgcagaaggtgatcctgatgctgctggacaacctggaccccaacttccagagcgaccagcagagcaagagaacccccctgcacgccgccgcccagaagggcagcgtggagatctgccacgtgctgctgcaggccggcgccaacatcaacgccgtggacaagcagcagagaacccccctgatggaggccgtggtgaacaaccacctggaggtggccagatacatggtgcagagaggcggctgcgtgtacagcaaggaggaggacggcagcacctgcctgcaccacgccgccaagatcggcaacctggagatggtgagcctgctgctgagcaccggccaggtggacgtgaacgcccaggacagcggcggctggacccccatcatctgggccgccgagcacaagcacatcgaggtgatcagaatgctgctgaccagaggcgccgacgtgaccctgaccgacaacgaggagaacatctgcctgcactgggccagcttcaccggcagcgccgccatcgccgaggtgctgctgaacgccagatgcgacctgcacgccgtgaactaccacggcgacacccccctgcacatcgccgccagagagagctaccacgactgcgtgctgctgttcctgagcagaggcgccaaccccgagctgagaaacaaggagggcgacaccgcctgggacctgacccccgagagaagcgacgtgtggttcgccctgcagctgaacagaaagctgagactgggcgtgggcaacagagccatcagaaccgagaagatcatctgcagagacgtggccagaggctacgagaacgtgcccatcccctgcgtgaacggcgtggacggcgagccctgccccgaggactacaagtacatcagcgagaactgcgagaccagcaccatgaacatcgacagaaacatcacccacctgcagcactgcacctgcgtggacgactgcagcagcagcaactgcctgtgcggccagctgagcatcagatgctggtacgacaaggacggcagactgctgcaggagttcaacaagatcgagccccccctgatcttcgagtgcaaccaggcctgcagctgctggagaaactgcaagaacagagtggtgcagagcggcatcaaggtgagactgcagctgtacagaaccgccaagatgggctggggcgtgagagccctgcagaccatcccccagggcaccttcatctgcgagtacgtgggcgagctgatcagcgacgccgaggccgacgtgagagaggacgacagctacctgttcgacctggacaacaaggacggcgaggtgtactgcatcgacgccagatactacggcaacatcagcagattcatcaaccacctgtgcgaccccaacatcatccccgtgagagtgttcatgctgcaccaggacctgagattccccagaatcgccttcttcagcagcagagacatcagaaccggcgaggagctgggcttcgactacggcgacagattctgggacatcaagagcaagtacttcacctgccagtgcggcagcgagaagtgcaagcacagcgccgaggccatcgccctggagcagagcagactggccagactggacccccaccccgagctgctgcccgagctgggcagcctgccccccgtgaacacctag

SEQ ID NO: 80775 - DNA, 3531 bp, synthetic construct
  misc_feature 1..3531: note = Description of Artificial Sequence: Synthetic coding sequence
  source 1..3531: mol_type = other DNA
atggccgccgccgccggcgccgccgccgccgccgccgccgagggcgaggcccccgccgagatgggcgccctgctgctggagaaggagaccagaggcgccaccgagagagtgcacggcagcctgggcgacacccccagaagcgaggagaccctgcccaaggccaaccccgacagcctggagcccgccggccccagcagccccgccagcgtgaccgtgaccgtgggcgacgagggcgccgacacccccgtgggcgccacccccctgatcggcgacgagagcgagaacctggagggcgacggcgacctgagaggcggcagaatcctgctgggccacgccaccaagagcttccccagcagccccagcaagggcggcagctgccccagcagagccaagatgagcatgaccggcgccggcaagagcccccccagcgtgcagagcctggccatgagactgctgagcatgcccggcgcccagggcgccgccgccgccggcagcgagcccccccccgccaccaccagccccgagggccagcccaaggtgcacagagccagaaagaccatgagcaagcccggcaacggccagccccccgtgcccgagaagagaccccccgagatccagcacttcagaatgagcgacgacgtgcacagcctgggcaaggtgaccagcgacctggccaagagaagaaagctgaacagcggcggcggcctgagcgaggagctgggcagcgccagaagaagcggcgaggtgaccctgaccaagggcgaccccggcagcctggaggagtgggagaccgtggtgggcgacgacttcagcctgtactacgacagctacagcgtggacgagagagtggacagcgacagcaagagcgaggtggaggccctgaccgagcagctgagcgaggaggaggaggaggaggaggaggaggaggaggaggaggaggaggaggaggaggaggaggaggaggaggaggacgaggagagcggcaaccagagcgacagaagcggcagcagcggcagaagaaaggccaagaagaagtggagaaaggacagcccctgggtgaagcccagcagaaagagaagaaagagagagccccccagagccaaggagcccagaggcgtgagcaacgacaccagcagcctggagaccgagagaggcttcgaggagctgcccctgtgcagctgcagaatggaggcccccaagatcgacagaatcagcgagagagccggccacaagtgcatggccaccgagagcgtggacggcgagctgagcggctgcaacgccgccatcctgaagagagagaccatgagacccagcagcagagtggccctgatggtgctgtgcgagacccacagagccagaatggtgaagcaccactgctgccccggctgcggctacttctgcaccgccggcaccttcctggagtgccaccccgacttcagagtggcccacagattccacaaggcctgcgtgagccagctgaacggcatggtgttctgcccccactgcggcgaggacgccagcgaggcccaggaggtgaccatccccagaggcgacggcgtgaccccccccgccggcaccgccgcccccgcccccccccccctgagccaggacgtgcccggcagagccgacaccagccagcccagcgccagaatgagaggccacggcgagcccagaagacccccctgcgaccccctggccgacaccatcgacagcagcggccccagcctgaccctgcccaacggcggctgcctgagcgccgtgggcctgcccctgggccccggcagagaggccctggagaaggccctggtgatccaggagagcgagagaagaaagaagctgagattccaccccagacagctgtacctgagcgtgaagcagggcgagctgcagaaggtgatcctgatgctgctggacaacctggaccccaacttccagagcgaccagcagagcaagagaacccccctgcacgccgccgcccagaagggcagcgtggagatctgccacgtgctgctgcaggccggcgccaacatcaacgccgtggacaagcagcagagaacccccctgatggaggccgtggtgaacaaccacctggaggtggccagatacatggtgcagagaggcggctgcgtgtacagcaaggaggaggacggcagcacctgcctgcaccacgccgccaagatcggcaacctggagatggtgagcctgctgctgagcaccggccaggtggacgtgaacgcccaggacagcggcggctggacccccatcatctgggccgccgagcacaagcacatcgaggtgatcagaatgctgctgaccagaggcgccgacgtgaccctgaccgacaacgaggagaacatctgcctgcactgggccagcttcaccggcagcgccgccatcgccgaggtgctgctgaacgccagatgcgacctgcacgccgtgaactaccacggcgacacccccctgcacatcgccgccagagagagctaccacgactgcgtgctgctgttcctgagcagaggcgccaaccccgagctgagaaacaaggagggcgacaccgcctgggacctgacccccgagagaagcgacgtgtggttcgccctgcagctgaacagaaagctgagactgggcgtgggcaacagagccatcagaaccgagaagatcatctgcagagacgtggccagaggctacgagaacgtgcccatcccctgcgtgaacggcgtggacggcgagccctgccccgaggactacaagtacatcagcgagaactgcgagaccagcaccatgaacatcgacagaaacatcacccacctgcagcactgcacctgcgtggacgactgcagcagcagcaactgcctgtgcggccagctgagcatcagatgctggtacgacaaggacggcagactgctgcaggagttcaacaagatcgagccccccctgatcttcgagtgcaaccaggcctgcagctgctggagaaactgcaagaacagagtggtgcagagcggcatcaaggtgagactgcagctgtacagaaccgccaagatgggctggggcgtgagagccctgcagaccatcccccagggcaccttcatctgcgagtacgtgggcgagctgatcagcgacgccgaggccgacgtgagagaggacgacagctacctgttcgacctggacaacaaggacggcgaggtgtactgcatcgacgccagatactacggcaacatcagcagattcatcaaccacctgtgcgaccccaacatcatccccgtgagagtgttcatgctgcaccaggacctgagattccccagaatcgccttcttcagcagcagagacatcagaaccggcgaggagctgggcttcgactacggcgacagattctgggacatcaagagcaagtacttcacctgccagtgcggcagcgagaagtgcaagcacagcgccgaggccatcgccctggagcagagcagactggccagactggacccccaccccgagctgctgcccgagctgggcagcctgccccccgtgaacacctag
